United States Patent Application Publication US 2007/0054278 A1 - sequence listing, part 56

SEQ ID NO: 95196 - DNA, 116284 bp, Homo sapiens
  misc_feature (1)...(116284): n = A,T,C or G
attattcttttgctctgaagctatccaattcctgttccggtcagaaggggagatagtgggaggatatctctgaaactgcccagcgcttactgctgatattcctcaggtctgacattattgcaagagaacaaacttagatctaccctctgtgtgttcttcagtggaaggtgaattactaacgaaagtgtaataatacaaaacacaattgagtgtagccttggctttatttgtaagacctactctggagatattattttctttactccaagactacacattggatccagtctgcttcaaacaagagaccgggaaagacgggttactatgctaattgaatactaatgaggcctttgcttaagttgggttttgttgcaattatttgccactacatttcttttgtatttatgtagagggaaaaataaactacttcaaagttagcaagagtcttacttagcctgagcacttgcagaaaaaatgtcttgctactctttcttttgtacttgtaacatttgtaaagagttttgttcggcactatggaaaagcaaaatatcatcatcattattactggcctttgtccacagtggatttcatccagattctaaccagtgactctgtgactaacaatctgagtcactaagtttcagatgtttatggatttcaacacaattcccagactgaaaggttttttttttaatttactttcatgtttcaagactcagaaagaattaactgcctttctgtatttccagtctagtgcggaaagaattaaatgcctttctgtatttccaatctagtgtcactgagtgacaggctaggaacaattcagtggatagattgaactgttccttcaattacagatttgtactgacaaaagtcaattaccaaaatgtcaaaaaaaaattagtatatacttccaggacaaaagcctccaggctggcagagaattcagtgaattataaatatttgtgttttcaccatggtagtggcacaggataattacagaatttaaaatgcagagaatcacggtgatgggaaaactgaatatccacatgtggaagaatgaaactagacccctctttctcaccatatacaaaaatcaactcaaggccggatgcagtggctcatgcctgtaatcccagaactttggcaggccgaggcaggcagatcacttgaggtcaggagtttgagaccagcctggccaatgtggtgaaaccccatctctactaaaagcacaaaaattagccgggcgtggtggtgggcgcctgtaatcccagctacttgggaggctgaggcaggacaatcacctgaatctgagatgcggaggttgcagtgagccgagataaaaccactgcactccagcctgggcaacagagcaagactccgtctcaaaacaaacaaacaaacaaacaaacaaacaaacatcaactcaaaataaagactgccatgtaaaacctgagatgatgaaactgctagaaaaaaaacatagtggaaacacttcatgacattggtccaggcaaggattttttggataagacctcaacaaaaagaatgaaatcctgtcatttgcaacaacatggatgaacctggaggacattatgttaagcaagaaaagccagaaacaaaaggcaaatacgacatgatctcacttatatgtggaattttaaaaagttgatcacatagaagtagagactagaatactggttagcagagtcaggtgaaaggtggggaggagtggcaggagtaggagaagttggttagtaggtactaggttatagttagatgagaggaataagttctggtacactaacgcagtagtctcaacctttttggcaccaaagacctgttttgtgcaagacaatttttccacggattttgaggggggatggtttcaggatgaaactgttccatctcagatcatccggcattagttaggttcacagaaggagcatgcaacctagatccctcccatgtgcggttcaccatagggtttgtgctcctgtgagaatcgaatgcggctgctgatctgacaggggcagagctcaggtgggaatgctcgctgacactcacctcctacagtgcagctcagttcctaagaggccacaggctggtaccagtttgcagcccggtagttggggacacctgctgtatggcacagcagaatgatatatttaacaataatgtgttgtatatttcaaatcagctagaagagacaattttgaatgttctcaccacaaagaaaagaaaaatgcttgagatgatgagtatgctaattaccctgagttgatcattatgcaatgtatacatgtagtggaatatcacactgtaccccatagataatatgtataactattatgtgtcagttaaaaataaaactaaaaaaaaaagtaagtaaacacaatataaacaccaaaaaaaaaaaaaaaataaaatgcagagaaactactgctaaaatgtaataaagagaatgatagaaaaatacaagtatattgactggttattaactttgcaaagatgcacatctttattcttatagctctttcaaaggtatattagaaaatggacagtctgaccagggcctacttgagggtggagggcgggaggagggtraggatcaaaaaactatgtatcaggtgctatggttattacctgggtgatgaaataatctgtacacctaacccctgcgacatgcaattttcccaaacaaacctgcgtgtgtacccccaaacctcaaataaaagttggaaaggaaaaaaaaagaaaaggaaatggacagtctgagctaaaatatccctttttatgaaaaatctcattattttaataattttatcatttttctgtattcattctcataccagctctagactatccctggactataactatccctgattggtcrccttacgtcaatcttttattattattattattatttgtttgtagggacagggtcttgctctgtcacccaggctggagtgcagtggtgcaattatgactcaatgcagcctcaaacttctggcctcaagcaatctttccagctcagcctccccagtagctaggtctacaggtgccacgctaccacacctggctaagtttttaattttttatagtgatgtggtcttacaatgttacccaggtttggtcttgaattcctggcctcaagtgagcctcctgctttggcctcccgaagtgctggtattacaggtgtgagccatggtgcctagccccatcaaccttaaaagacaattccttgtcattttcacatggaataattttacaaacatttggtcatacatttttacagcatgtcaggttaataatatcttacagttttatagcattttgcaaagaattctcttgcatgttatctcacattcatctcatcatcatatgcagtagagaataaatgggtggctccattttatagatgagaaaattgatgtatattacactgatataattggcttagactcattggctaaagtaacatggattgttacagaaaaatagaggtcctagtccaaagctattccactagacatgtgatatggtttggctctgtgtccccacccaaatctcatgttgaattgtaattcccagtgttgggggagggatctggtgggaggtgattggctcatgggggtggatttctcccatattgttctcgttatagtgagtgagttctcacaagatctgatggtttaaaagtatgtggcactacacccttgctctctctctctcctgctctgccatggtaagacgtgcttgcttcccctttgccttctgccatgattgtaaatttcctgaggcctcccagccttgctttctgtacagcctgcagaactgtgagtcaattaaacctcttttcttcataaattatccaggtctaaggtagttctttataccaatatgagaacagactaatacaacatgtaacagaaatttgaggtttaaaaagaatttttgcctctaaatcctcataatgcaagattaagaataaagccttggacagatgagctgttatttctggataccggtctttgcaaatactatttgggttatcaagtattattttgtattatgttaatgctctccaaagtatcgaagtgtaatcagaccgcacaaagtattatcaaaatatacaaagataataaaatgaattagatttttaaaaactatttactcatcattctgtgccctttataggatgacctatataagtctatgtaggatgttcttgagcacacattcataagattcctgttgtctttcaagcaagttacatttttcactgtgaacttgttggattttacgtttaaactaatagcctttctaagggaagaagatttatctaccatttcccttacatcttccgcagtgtctaggctggaaccaaagttgatgctttttgacttctgtatggcaactactcctgtgacatattttgaagttcctggtaccccccaatctggccctgcacccacactgagcctcatggctaagttttgatatccaagcagtaagatggtctagtggaatcccctaaagcatgggtcatgagccacccacatcacacccatctggtgtctctcagcaggtacaggattctaggtgcttccacagatcttccccacccagtgaagctgcattaaccagctccccaggagagtcttgtgaactctaaagtttgatcatcatcctaatgatagcacttttctgctcctggaaattttaatgatgttgcttgtgaatatggttcctgggcctggtctttgaaaatgaaaataaaagatggtgcttgactttggggaaaagaagtgagatgcagactacaaaaatggctcaaaacaacgccctctcacaattactaagagaaaatgtttacccgtgtgctgagaaacaacaccccccatttctgtaaggcagttgccaagcagatgcctgatttcagggatctctggagctgcaccctccaaggcgctggcgcttagaaacgacatgaagagccagccctgctgagcaggaccagggcgccaagtctgaatgactaatatttttccaacctagaacgtcattaaccgattgataactatttcccctttaaactaggcaaaatcagcattcctctcccctctgtgtgccagaattcgaagatgaacaaaagacgcctgcatcaggaaaactgtgttaagttctcttggattcagggcttcgacccgaattgggctgagtgaatgaagacgctggtgagatgtcagggacctggggaatgaagacacacccagaaaaagcaggaacctacaggagtggacaaagaaccggagcataggcatgtgagaggggttgaaatgaacaacagactcatacaagaaggatttctaatcagaaaagagcgattgctttagtaaagctgcaacctggaacaattacaatctgaccagatgttcttgcaaaactggtaaagcagagaatgtgtaaaaatctctccccctcctcccctgaatgcagttgacgaaaggccgaaaggctggatcctcaaagcccagatctgatcactgcagatccgggccaccctaaaagcaatcgggtgtaatctttccagctccaggccctgggatgagggaggtgggggaaggtggagaaaggtggaggaagatggagggaggtgaggggaggtggagggaggtgaggggaggtggagggagatgagcggaggtggagagaggtgggtggcggctccaaggtttgaaaacacatccaggacacttcccatcctccaagagcacgctggctcacaggctctttcacgcttctgcttgggacaatcgcgtgcatgaaatctggcagggaggagtcaaggagattgttagcccgagggctgggacggtggatctgggaatcaggggcctgggggacacgttctcttcctgccgcgggcttcctgctccagagtccccgcggggcttggcggcggggccgggggctgcacgcgaccatccggcagggggcggcggcgacagcggcggccgcaagggacgcgtccggggcccgcgctcagggggagcggtagcggcttggcagctgctccccgcgcccccgcggcctagccaggggagggggcgcagcgccggggccatggatccgcgtcaggccgctgcttcccgccggcgggcccggggcggggcggacccgtccccgtccccgtccccgtccccgtccccgtccccatccccacgtcccatcccccacgcagccttcgccctccctgctccttcccgcgccgtcttcccttcccgcgttccccgggagaaacatggccgggagcagcgaggaggcgccagactacgggcgaggcgtcgtggtaaatgcaaactccctattttggggctcggcccgctcccctccctccctggcaccctgcttgtagattaaatgcttgccgtgcgtcgggggagagagagggccaccgctttgttctccctcccggcggggatcgcttccatcctcggacccgggcctcctctccccgcccccaatctgacgaaactctgagtcccgtcccttcaccccgagttcccagcgtccccccgtgtcctccggccggtagctcgctcctgcagcgtcccgccggcgcccagccgtccccatccccgcgagccacggggagycgcttctgcgagcccggcagggccccagagacccccgcgtgctgctctggaggcctccttcttcctgggyctcctcttgactcctccagggcgggcttcaagttttgtttttaaaaagcrcactgaggggttttgaaggcagctaggaaataaagtagctcaagtggacagagcttgagatttgaagcctttggtacccaggttgggggctctctggcagtggaggcctctgcaggagctctaggacacgctggcggctcctgagtgacctatggcttgtctgtaaaagggagcaacagcaagctgggctctggagccaattgggaggatgcatgtaaaatatctagcagtgtgtccggatgggagggtgtggggtgctggtttcccagaactgagcctcattaaccctgagaatcctgacggtgtcagccagagggtacccatctctcagtgtgctaggatccaacccgttcttgaccttgtggccacgtcctccctgctccctgagaagtggttttcctagaaggtggtggttataacttgtgtcaggttcagtgtgaaactcaatggtggtgaggatggtgggtggggctaacttgccatctctttccagggatcagcttgtcattcacagataatctgtttatgaatatgaatggcctgaactaaagtaagtgggctggggagggaaacgtgtcacattcagacagaagggtcaggttgaaatgtggggctcagtgcttaatttaacagcaggacctttccttctgaaaggatgaggagttgatttattcattccacacgtttattgtcctgctgggttgtaggaggtgctgtaggctctggggtgcaaaagacaaaggccttgtcttcatgagcttgcgttctagagaagacataggcaagcagtgtgtaaacaaatagagaaaatttcaaatagagatatgtgcaataggaggagggtaacaggatagagggtaattggaggagaaggggggagtgatgcttttgctcaggtggtcagggcagcctctctgcggtgacctttgagccaagatctgaaggrtacacaggagtagccatgtggactgcaggcagagacccgcataccaaatgcaaaagaatcattgtatccgatttatgcttttacaaaaaccattccagttgccccaggaggaggggcaagcctagcggtgtgatggatgggagggggactaaaacgcaaaaagggcaatcattaagttcattctggacaaattgagtttgtagtgcctgtaaggcccacaggttggcctgcactgtaggcaatttgaaattcacatttggaattctggagagtgattggagagatttggaagtcatcagcaaaaagaataatatktaatgttcgggagtgctcagtgaatatggaaaaaacaattaaagcaactgttaaggatggaagcctggaaagtcccaaatataagaggctgcctgtgggggagaagctggttgaaggaaccgagaaagaactttgaagggtgggagggcaggcagcatggtgggtgccttgggaatagagcattgttgagcaggaggggcggggtcaagaggtcatcagaagtgtcagatgttacagggacagcaagtcggataccaagatggaaaacagccactgtatttaacaattacaaagccattagtagggagaatcttttaaacaaccactgcattggtagaatggttaaaatatagtacaagttgagcatccctaatccaaaaatccaaaatccgaaatgctccaaaatctgaaactttctgagcaccaacatgatgctgaaaggagatgcttactggagcattttggatttcggattttcagattagggatgctcaaccaggaagtataatgcaaatattccaaaatccaaaggaaaaaaaatctgaaattggaaacgcatctgatcccaagcattttggataaggggtactcaacttgtactaccgtaacatactacatacttttagaaaagaataaggtgaatctagatgcackgatagagtaggtaaattgttgaagtctaaaaaacaagtgagagaacactgtaaatagcccagtctattggtgtcaacagaggtcctcttggaagcaaggtaattttttgaaagatgcaaagaggtagtgagaggggtatcaagagagtagagggccaggtgaggtggctcatacctgtaatcccaccactttgggaggccgaggtgggtggatctcctgaggtcaggagttcaatagaatcctgaccaacatcgtaaaaccttgctgctactaaaaatacaaaattagcttggcatggtagtgcatgcctgtaatcacagctacttgggaggcagaagcaggagaattgcttgaatccggaaggtggaggttgcagcaatccaagattgcaccattgcactccaggcaacaagagtgaaactccttcttaaaaataaataaataaataaataaataaataaataaataaacaaaaaaaatgagtataaactggaccagctgccaaggggcttggtgcttgcatgagagcccacaaaggtgggaaataatccacatataatggagatagtccctacatttacatccttttctccagtagaacttggaataattagattaacctcaagttggatataagcaggcaacttcagagcgaatcraagctgctggtagaaggcagctcatggcatgtaaggcaggagggaagggagagctggagaggatgagtttactgggagaatagaaagctctcaaggatgggatacaaaaaatcaaattagtaccagttttaaaaaggggcaggtggctgggagtggtggctcacacctgtaatcccagcactttgggaggctgagagagcaaatcacttgagcccaggagttcgagaccagcctgggcagccaaccctctctctacaaaaaatacaaaacttagccaggcatggtggtgcatgcctgtagtcccagctaccggggaggctgaggtgggagaagcacctgagcccaggaagtcaaggctgcagtgagccatgatcgtgccactgcattccagcctgggtgkcagagtgagaccccatctgaaaaaaggggcagagggcaggtaataatagcaagcatttcttgagcacaaatctgtaagggaggtctagtgtgctccccattttacagaagaggaaactgaggcactgagagattaagtaaatcacccaggtcgcataagtagcaaatggcagaagcgggatttgaaccagctttcaatcactatactacatagcaagctgtgattccaggatggaatttcagggttggggccatctgtaggactggtctggctatgtgaatgtattgctaaatggggaataaagatgtgatttgagttaagaatgtagtttgagctaaggctggtgaaggagctacaagatgaagtcgttggaaagatcgttgaggtaggcattggagtaaatcagccaaggaattgtccaggaatgaggtagagaagaaaattccgagttggtagaaatctgttgataaagatggcaagggatgtagagtcagatgatataaatataaaacgagaagtaaagtttgtgcaagagaagggaatattaagagatttaagatggctcttgcctataaattggcttttggttgaactggggaggtaggacatttataccattaacaataaatggtagcaaatgctaattgccacataagagaggtagatcctaaggtcagaaattttgctcagagttggcttgtcacttgatctggagctaatacagtcaccagattcctggttgwtacctctttgttacttctcagggagagataaagatcttctctatccacctggcttttggggatcgggttattagacatgtttttgtttgtttgtttttgtctggtttggttttgccaaakgattatcaactgagctattattartacttacctaagtgagtttggtaggaatcaggagaagagagaaatcagaaatgattgttgtgtttctgttatggctggcttcctgtcaccccccatgaaaatacggcagtatcagagataagtaatcaggtaatatcagagataagtaatccatcgaaagcacagctctactaggtggtaatgagttttccttctgtggggcaaacccaccacagaagaggaaggcatgtggataggaggtggttggcctgtcgagcttccttcattcctctgtgagcagaacctgggaatcttttagcaaaccacttgtccccacttttcaagatgtatggttgtgaggtggggcccttcccagggtacctccttccctggctctagggctaggacaggaatcccagaattcctgtctgggattctttgaattagagtgaagggatgagaccccctttctcttgctggtggaggacagatgagagctatggcctgaaggagagaacagggccaatctgtggagctcagcaggggagaggagcagagattagcttcttgtatgtgttttctcccttagggagaaaaatgatgcaaaaaatagtctaagcacaaaaaaaattatttttaatgacttacaaagttttcagtgcatcttcagtgcgaaaaagagaatcagaattacttctgggatttggatgttgcataaaatgactcacttaatgggtttgtcacttcccccagcttggctatgttttgctgttttgaacagagaaagcattgtactgaatacacttagagcatattatctgtgatactgaaactatctacagactctggttttgattttttaaaaagcaagtgaataacagttatctacagttcatagcaacctccattcctgcaggttttgatttatttacaacacgatttgcatgcaccattgaagttagcaaarcataaaccagtatttccatcgtcktgaatcgactttcatctcaacaatgaaaactcactatttaagattaattgaaaataatggccaatttggattatagaacagttttagagaaatatatttcttctacttttatactttttgttttgttttcttgagacaatctcactttgctacccaggctggagggcagtgatgcgatcatggcttactacagccttgacctcctagactcaagccatcctcctgcctcagcttcccaagtagctgaaactacaggcacacgccatcacaccagaacaatttttttttttattttttgtagagatgggttctcattatattacccaggctggtctcacactcttgggctcaagtgatcctcccacttcagcctcccaaagtgttgggattacaggcatgagccaatgtgccaggcctyaaatgtatagttttaactaagataataacactggcatataggtttgaggcacttctttagatgaattaaaacatataatttgttgttaaatgattgatgtttcagttcatctaaatgattagcatttattgcataagtactgtagaccagaaactgatatgagtcttacattcattatcttatttaatgctcaccatagccatatgaggcaggcactaactccatttcatagatgaatacactaagagaatttaataygcccaaggtctcatggctggcaggcttgtcccaggtgtgtgagatttccatgtccatgctcttaacacactactctgtgtggcctctgggctatggatccatattacagtttataggtttgtttcatttgtgattttcttatcatttttttcctatttttggcattcatttttggcacttttagtctgtttcctttttttggcattatgcgtcaaacatcatgtattatacaccatgcagtgttccaggtattctaagtacattatccttataataaccctatccataggttttactgtgtcttatttaaagcaaggggaaactggatctcagagacagtaagtcatctccctaacatcacagtagtaagtgtcagagccaaactcttgaacatggagtggagagtatgctccaagattcaaccagaacgggggcagtaaaggattgatgtggttggaggaatggattcagaagaccactagttaatggtgccactggtggaggagctccagaaagtggggtagatagtacatgtggtctggaaggtgatccagaaagtgctgtacacctggatgatccccctggggcctggggccagtcagggttctcctggtctggtctttactgtggcctgccagaggctctcctagaatctcctcatgtacagctggtagtctagactctggccagctgctgtagtgttagaggttatagcaggtacaaggagttctcagggtggcagccagaggagcttggtgcaaatccagcagtcccaccggccagtttgatggtagagggagagcaaacgagacacttttcaaatcaaatatgcagattgaccaggcatgatggctcacacttataatcccagtgttttgggaggccaaggtgggaggatcccttcaggccaggagtttgagaccagcctgggcaacatagccagacctcgtctctacaaaagaaattaagaaaataagctgagcgtggttgtccactccttatctccagctacttgggaggctgaggtgggaggatcgcttgagcctaaaagttcgaggctgcagtgagctatgattgtggtactccactcaagcctaggcaacagagggagattctgtctcttaaaaaataacatagatgatatacaccatgtggccatcagtcagccaatggatatgacacattggaatctccagaaccttgaacagtggtgctctttatcacaaggagacaaactgagaattcaggttggagttcaggttttcaggtagccggaagatggaractgtgtcatccattcattcatttaacatttttgagcactataccatattccagatcagcattctgggcactgagggattcaacaatgaatcagaaaaagtctccgccagaaggagctcatgttctgacagaacacacccatgcacacacacatcatccagtggtaaaacaggctatgaaggtcagggaaggcgtctttgcagaggtgacattgaatggagacttgaaagaagtagaggacagccatgtggaaatctggaggaagagtgttgcaggcaagaggaggygccagtgcaaagctcaggaggcaggggtgtgattggcagatcggaggacttgaaagagagcagctgctgaagcagagggaagaggaagagtgccaggaatgagtcagacaaggtaatccctggtgagccacagtgaggactctggtctttacttggagtaaagtgataagcccttgaaaaaaatctaagcagaaggctgccatgataggatgtcctttgttttttatttttatttttcgagagacaaggtcttgctctgtcacccaggccgaagtgcagtggcacagtcatagctcactgcagcctcgaactcccgggctcaagtgatcctcctaccttggcctactgagtagctcggactacaggcagacaccaccttgcctggctaattttttaattttttgcagaaacaggatcttgctgtgttgctcaggctgatctctaactcctcgcctcaagaggtcttcccgcctcagcctctcaagtgctgggattacaggcatgagccactgtacctggctgtgatgtgcatttttaaaggagcatgcccgcttccatgtggrggggctgcaaagtggaagcagggaggcaagtgtagtggctcctgggacagtcctgggagaaatcatggtggcaatggactggcctgggggtgggggaayagcagtggaggtgccgagaggtagtcctggataaatttcgagggagttgaagatagttttctgctgtgttgcctgagggcgatgaaagaaaggagtcagtgacaattccaagggacaggagccttctcaaggatcctgcatgggagccttgggtaagacagagagctacaaggggcaccaggaatttgggaaagaagatcagaggcygggggcagtcagcaaggcctccaggaagaagtggggtgtgacctgggcttctgagttcggaatacagaggtagaggaggaaagggggagagaggatgaaggggtgcacggcaaatgaatgaatgaaacccagagctgggaaggatcctgacttgactgcaaaccattctgaaggcaggaagcaaaggtgtagggagttgtgctggaaaattagggtgggtctgcattgtgaaaggcctcagaagctcaaagctggacagaggagtcaaagtgtgcaggagtgagtaaagaatgggaaactgaggccagttgtgctggctaatgcgtgtaatcccagcactttgggaggctaaggcaggcggatggcttgagtccatgagctcaagaccagcctgggcaacgtggcaaaaccccatctctacaaaaaacacataaaaattagctgggcatggtggcacacacctgtggtcccagctactcaggggactgargctggacaatcagttgaacctgggaggcagggttgcagtgagcagagatcgcaccactgcactccagactgggtgacagtgcggraccctgtctcagagagagaaaaaaaaaaaaaaagaatgggaaactggaatacagctagagtatgatctgagtgtgtaacacttcattgttacatcttttcttgatgttccaaaagtaaaagtaactccaccttcaccttccatttctcccccacctctttactattctaaccgtaaaactagcacatcaagtcctaagcgagagggagacttactatcagtccatccactatgtgaataggccaattttctggatcatcmgtttctaataggacggtttaagtgtctaacatagtacatccttttaaagtctttactatagtgactagacattcaaaagtttgggtctactctgatcccaggagatacgtacttttaataagaaatcttttccaggcagatgaggcacttacaatgaatagaaatgtaatagtatgtataatataataatgatactgcatgtattttagaattacaaatatgttgtttattatgatatatttatatttaaatatattatatattataaatatataatttggagaaaaattatatattacacatatgccctcacaaataatgctatcgggttagctataaaacactgactttatatttttattgtatgataggccaggtgtggtggctcatgcctgtaaacctagcactttaggaagctgaggcaggtggatcacttgaggtcaggagttcaagaccagcctggccaacatggcaaaacctcatctccactgaaaatacagaaattatctgggcgtagtggcacatgcctgtagtcccagctcctcgggaggctgaggcagaagaactgattgaacctgggaagcagaggttgcagtgagctgagatcaccccactgcactccagcctgggtgacagagaaagactctgtctcaaagtctcaaacaaaacaaaacaaatattttatgatgccaatagttgggaatggagtgctctgttcactttagtactgcrccttgtatcaggttgtggaaacaaataaccttgttccactaaacttttcataagttgagggaattctcctctcaagtgatactcttttgttatgttttaaacaaatttctgatgaaaaaataccataaccaaaataatttgatttgcagattatggatgattggccagggtatgacttgaatttattcacgtacccacagcactattatggagacttggagtatgtcctcatccctcatggtatcattgtggacaggtgagtgtgatttcctgtgtcaatcttggtcctgcactgggccggcccacacttgtgtgaatcccacaatatactttaggaccctatycctgagctgcgttttatagtggtagagagaacttttatatagggcagtgaatttggaataaaatgaatgtatgcttaaattgaatggtttacctggacatttgttcaggcggtatggtaatatggtaagaaggatatacatacataagctattataagtaacagcctcaaaataacaatgtcctaagatggcttttccgtggcaaagaagtcccaccctcacagaggggggacgttccgtgatcaaataaactttggaaattttgtgtcttccatatttttgtctctcagttgacaaatcaaaacaaacattagcatattgaaaatatggaaattccagccaaaagaaaagaagaacacagaaaagaaacctgcttgactttaacaattaaagcaacctttttttgtgcaaagggagactttgtactcagtttacctatttacaactctcagaagagatttcccttaataccagtttgggaagctcctaatttaaacaaattcttgcatttcttacctgaattttctaatttaaaattaatttaaaatcagtcagaacatgattgactcctgggtagggggtagggttaccctaagccttttctttgtacaagagaatcatccagtaaacttgttaaaatgcatattcttaagctttatgtctagaaatttcaaatcgatattctagggtggggcccaagaatgtccgttttcacctttgaaataaatttataagccaggggctatggcatgcacctgtaatccaggctactccagaggctgaagtgtggggatcacttgaacccaaaaatttgagactaacctgggctaatctcaaatactgagatcttgtctcaaaaaaaaaaaaaattaagatgtaatttacagggctgggtacagtggctcgttcctgtaatcccagcactttgggaggctgaggcaagaggactgtttgagccaggagtttgagaccagcctgggcaatgtagtgagaacccgtctctacaaaaaaataaaaaacattagtcaggcatagtagcacaggcctgtagtcccagctactagggaggctaaggcgagaggatcacttgagtctgggaggtcaaggctgcagtgagccatgatcacaccactgcactgtagcctggggaacagagcgagaccttgtctcaaacacacaaacacacacacacacacacacacacaagattaatttatatactactgcacaaaattcacccattgcaggtgaacaactaaatgatttttagtaaatttttatggtcaggcaaccatcagcaccatccagttttacatttccatcatccccaaaagtttgtttgcagccaatccctgctcccacttccagcatctttttctataaatttgtcttttctggccattttgcgtaagaaaatcgtacaatagctaattattgattgaccagttgatgtacatttggatgtcccatttttggctattgtggaaatgcttctataaacattcacatataagttttgtgtggacatatcttttcatttctcttggatggatttctcattgtggaattctgggttttctggtaagtgtaagaaactgccaattattttccaaagtggctgcaccttgttacattgccaccagcagcatatgaaggtttcagtttttccacatacttgccaacattgaatattgtctgtccttttgattatagccattcttgtggctgtctaatggtatctcaccgtggttttaatttgtattttcctaatcattagtatacttgttagctattcataagccttctttggagagaggtcttttcaagtcttttgccaatttttaaattcaattgttcatcttcttattgaactataagwgttctttatatattttggataatagtcctttatcagatatatgatttgcaaatatttactcccagcctatggtttgtcttactattttcttactggtatcttttaagaagaatgtgtatcctgctgttgtggggtgaagtattgtatatgtgttaattagatccagtcagttgatggtgcttctcagttcaactatatgcttactgattctctgactgttggacctgtcaattactgatagaggggatgttaaagtctccaaatagtgcatttgcctgtttctccttgcagttctattaggtttttgacactttgtttttaggagcatatatattaggaattgttatgtctctttggataatcgacctccttattattgtgtaatgatgctctttatccctgcrtattcctcactcagaagtctgctctgtctgaaattaaaatagctactccaactttcttttgattaatgttagcatggcatgtcttactccatccatttaatctatctgtttttatatttatatttaaagtgagtttctttttctttttttttttttttttttttgagatagagtctcactctgtcaccctggctggagtgcagtggcacaatctcggctcactgcaacctccaactcccgggttcaagtgaacctcctgcctcagcctcccaagtagctgggattataagcatgcaccaccacacctggctaattttttgtatttttagtagagatggggtttcaccatgttrgccaggatggtcttgatctcctgacctgaagggatctgcctgccttggcctcccaaagtgctgggattataggtgtaagccataaagtgagcttcttgtgggcaatatacagttagatctttttttaatccaccctgacagtctgtcttttaattgctatatttagaccattcatatttaaaatgagtattgatataatgtttagtatctatcgtatttataactattttctattcattgctgttgttgtttccttttttgtcttccactctgtgaaattctactttttttttttttttttttgagtcagagtttcactcttatcacccagactggagtgcaatagcacagtctgggcttactgcaacctccgcctcctgggttcaagtgattctcctgcctcagcttcctgagtagctgggattacaggcgcagaccaccaagcccggctaatttttgtatttttagtagagattgggtttcaccgtgttggccaggctgatcttgaactcctgacctcaagagatctgcccacctcactgtgtracttctgatgtctgtgaggtttatttttctcttgtttttatttttaagcctcacttactagggatcaccctgtgtttgaatagcttagtrtttggcctacaattggttagaagttgtgctcaaatacgtcaagccagtaagtcttccactctctgctgatgggggtgtgtggggacttgaaagtagattcaaatttccaaccattttcaaatctttcgatgtttactttcccctgagctttcttgtgccttctctgcacatgtacacagccttcactgtccagggatgtgtgggtggcttgaactcactctgctgtgcatatgtacagcctctggtcaattgagatgcatgaagaacttattgtgtgcccctgttctatgactgtctaacctcctccctggaacttcctatcaaatccccagccagcctgccagtgcactgctcagcggtgactgcacctcaggatagtggagccctgccaccaaggtgaccattttagcttacagtgttccctatcaggtgagctccctctggcagtgcaccaccttggtggaactgcctgtttgaacaacagagctggggatrggggctggggggtaataagagcatccccacacaagaatgccccagactcatgctgtttccacccagtgttcagggttttcagaattaaatgcttctcagtttgttgtatgcctttggttgatttccaacatgatgagatggttgtttttggcagttttgcccagttttatagttgcttttctggagaggatgtgttcacctccttacttcatcatgttggaaacaaatgttctttttttttttttgagaaggagccttgctctgtcgcgcaggctggagtagtacagtggtgcaatctcagatcattgcaacctctgcctccttggttcaagggattctcctgcctcagcttcccgagtagctgggattacaggcacccgccaccatgcccggctaatttttgtatttttagtagagacggggtttcaccacgttggccaggctggtctcaaactcctgaccttaagtgatctgcccatcttggatttcttaaagtgctgggattacaggtgtgagacaccactcttggcccaaatgttcctttttaaggagcatgccagatattctgatgtacattttttatgatcgtgtgtcttctttagaattcagtaaatactgccaggcatggtggctcatgcctgtaatcccagcactttgggaagccaaggtggccaggtcacctgaagtcaggagttcgagaccagcctggccaacatggcaaaacctcgtctctactaaaaatacaaaaattagctgagcatagtggcaggcgcctgtattcccagctacttgggaggctgaggcaggagaatcacttgaacccaggaggtggaggttgcagtgagccaagatcgtgccactgcactgcagcctgggcaacagagtgagactccatcttaaaaaaaaaaaaaaaaaaaagcagtatgttttgaacaccttatgttcaaccttaacaaagcttttctatcggtgggtttctgtttcccaaggttttccccacattcctctgagtaatcgaatacgtacaatacatcttgcatttcattaaagcaacataaatactcagaagtagttgtgccttaatatatcttttatccttctttcagaattgagcggctggccaaggatattatgaaagacataggatatagtgacatcatggtcctgtgtgtgcttaaaggaggttacaaattctgtgctgatctcgtagaacaccttaagaacatcagccgaaattcagatcgatttgtctcaatgaaggttgatttcatcagactaaaaagttacagggtaagttattacaagttccgctttatgacatttcatttaacaatgctttagrataaaagaatcaataatgttatgaaaatraagagtgcaatttttaaaaatggagatgaaaatgaagggtaattttaatttgcaagaatacggcaacctaacataagaattcaaatgatactatttagggcgtggggtggggacctkctctctattttcacatatatgggaagactcagcagtaatgatttgtgctttcttttatggtgataaagtgagtggttatatcctggtgcccagccccacaactgtgtgtggtcagagtgtgaacactgatttgttttttctactctggatgtcactatgggtcctggggacctatgggagggtgtccagcccagagaggagtcttagtacttgggtggctgcagttgtggcctggaagtaaagaagggaaggctatagggacagcacattgccaagtgtgaggaaacaaggccagggagctccagcagaaggcccctccaccagtttactccattaattctgtctttctgtgggcaccactgggcagaattaatggaattattctccaaagatgtttcctaaccagatgcagtggctcatgcatataatcccaacactttgggaggccaagacagaaggatcccctgaagccaggagttcgagaccagcctgggcaacatagtgagtccctgtctatatacaaaaagaaaatttttaaaattagctgagtgtggtggcatgtgcctatggtcccaggtactcaagaggctgaagtgggaggattgtttgagcccaggagacagaggctgcagtgagctgtatggcaccactgcactccagcctggatgacaatgaaactcttgccaaaaaaaaaaagctgttgtttccttagtctccctcctcctccctctatgatgttaacttctttgatgctttttgatttaatgcatagtaaaacattaaaaataacttactattgggtgaggagctcttggagtcaaaccatgaaaatattctcgttgactaaactaacttgacacattttaattcatgaatcactctttgaattggccttctattgctgtgtggcaaactcaccacaaacgtagtggcttaaaccaacatacacgtgtattatcttaaagtttctgtargtcagaaatctgagcatggtgtagctgagttttcagctcagaaccttacagggatgaaatcagtgtgttagttgggattttgatatcatctgargttttcaagatcactgactgttggcaagctcagttcccatttccttgttgactgtaggctggagttggtagactctccactcctaggggttgtccccaggtgtttgcatcaattaccccacaggtcgttcacaacaccattagctgtttgcttcttcaagtctgacggaataatcttagcccttcttttatagctcacctgattagatcatgttcacccaggtaacctgccttttgatgaactcaaagtcayctgactagtcacctaatctttggtgcgaattcccaccacgtttacaagtcttacccacactcaagtggagaggattatgcagggtgtgtacaccaggggacagcggtcttcagggccaccaatctgtcttccacattcctcatgtgactctcagttgcctcagttctagagcagctggaaattagttctgatttcttaagatactctgtgttttcctgatcacctctcaggccagagtgaagctggtttttgaagacatcttagctctgatttcttggttttatcttctcctgagaattttttctctctttagattatcttccttctgggttaaatccctgtgcttccttcataccagatttctctcattcacttggccctgacccttattatatttgtccctggttaacagcattttaaaaacctgttaacattttttttaattaaagtcaggtttattgagccaccgtttacatgcagtaacatccatcctctttagagttcagtgaatttcaacaaatgcatacaatcatgtaaatcaccacagtcaagatatagaacagtttccttaacaatgcaaagaatgtccttgtgtccttcacagtcaacctcctgaacccctaagccctggaaaccacagatacgttttcttttcctaaagttttgccctttccagaatgtcttacagatataatcatatatcatgtagctttagtaaatccctaaatcataacataatgcattcatccatattgtgtgtattgttgatgaaaagagtcaaactccgtaaaatatttcaacagatttattctgagccaaatatgagtgacaagtaacctgtgacacagccctcaggagatcctgagaacatgcgtccaaggtgatcaggacacaacttggttttatacattttagggagacagaagtcatcaatgaatacatgtacagtgtacrttggttcggtctggaaatgtgggacaactagaagcggcagcttccagatcatgggtagattaaaagaagttctgattggcaattggttgcaagggttattatcaatagaaaggaatgtctgggttatgataaggrgttgtggaggaagccaaggtttaatcatgcagatgaagccttcaggtagcaggcttcagagagaatagattgtaaatgtttcttatcagacctaaggggtctattctatcagcaattcctaaagggaggaggggatcacgaggcatgtctggcttcttcttcccatcgtggcctgaacgagtttttcaggttaactttggaatgcccttggctgagaggaggggttcattccccacagctggggggcttagaattttatttttggtttacagtatcagttcttcttcttcttcgtatcagttcttcttcttcttcttcttcttcttctccttcttcttcttcttcttcttcttcttcttctttgtgtccagtagaatttgattatatagatagagtgcagtttgttactccattcatcagctgaaggatatttgggttgtttctattttgaagcaattagaagtaaagcagctataaatattcacatgcaggtatttgtgtgtacttatgacttcacttcccttgactaaatatttaggggcaagatgggaggtcatatgatgagtgtatataataaattgcctggccaggtgcagtggctcatgcctgtcatcctagcactttggcaggccgagtcgggcagatcatctgaggtcaggagctcaagaccagcttggtcaacatggtgaaacctcatctctactaaaatacaaaaattagccaggcatggtggcagatacctgtaatcccagctactcaagaggctgaggcaggagaatcactcgaacctgggaggcagaggttgcagtgagctgagattgtgccactgcactccagtctgggcaacagaatgagactccatctcaaaaaaaaaaaaaaaaaattgccaaactcttttcccaaaggattgaatcattttgaattcccaccagcatatgtgacagttcctgttactccatgttttcaataacacttagtattatcagtttttccttatttttttcttgattttacctgttctaataggtgatgatatcacattgtggtttaatttgcatttccctaataaatgatgatttgaacatagttacatttgctggtttgctattcatayagcttttttgatgaagtgtttgttcaactatcttacccatttaaaaaattgggttgttttcttattattgtatttgagagttttaaaaaatatattggccatgaattttttattagatatgtgttttgatatattttttagtcagtgaggttttttcattttgtttttcaaagagcattattaaaaaattttttaagttcagttaatctagtgtgtccttttgtggatcatgcttttggtgtacctaagaaatctgcctaacccaagatcacaaagattttctcctttttttaaaaagagaagtttcatagttttagatttaaatttaggtctgtgagacatgtcatgttaattttttactacgatataaggtatggattgcgattccttttcttttcatttttgcatgaagtgttcgattattccaggattatttgccaaaaagatgatccttttccatggagttgcttttgatctttcactgaaaatcagcttactttatatatgtatgttggtctatttctggacactatcagatctgttcatctacattgtcactgctttgattactgtaactttataataactctgtaaattaagtagtatgtgtcctccaactttgttctttttcacactgccttggctattcttgttctttgtctttccatataaatttaatatcatgtagctgatttctacaaaataacacattagaattttatcaagattgccttgaatctatagatcaatttggggggaattgacattgtaacactatttagtcttccattccatgaacacggtatatctcctaatttatttagatcttatttcagtgttttctggttttcaagtgtcagatcttaggcatatttggttagatatatacttatatatttaatgattttgatcctattatattcagtaagtttttctttgaatttcaaattccaattatttatgggtagtatttagaaatactattaattttgtatattgaatcctatgacttatgaaactcacttatgagttctaatagctttttcatagattcttttgggttttctatgaagataataatttcttccttaaatagagatgattttgcttcttcctttatacttacagaccttttatttctttttattgcatgatcatgccagttaggacctcctatacactcctgaatatgaatggtgggagaaaacatccttgccttgttttcagtcagtataatactgactgttggttttttgaagatgttctttatcaggttaaggaagctccttctattcctagttttgcaagaggttttttcatattttcttaaaaaattatgaatgaatatcatcagtgctttttctagagatgttgatatggtaaaatacattgattggtttgctaatgttggactatctttccattaatgtaatataatgacatattatccttttcatgtattggtggattcaacttgctaattttttgaggaattttgcatttaagtgcttggaggatattaaaccatagttttttgttttttttttttcttatagtgcctttttctgattctggtatcaggcttatattggtcttttaaaataaactgggaagtattttctcctcatctttttttcagaagagtttgtgtagaattagtactaattcgtctttggtatttggtagaattcaccagtaaaaccatcttgacatggagctttctttgtcagaagatttttttaattggaattaagtttatttagtagatatgggagtattcaggctaatagttttctcactctttaatagtttgtgtctttcaaggcatttgtccattttatctagtttttacatttctggacataaagttgtttataatattcccttattatctttaatctctgtagtgatattctctctttcagtcctgatagtattaaattgtatcttctgtctctttccttttcttcaccagtatgcctaaaggtttttcaatttttttattctttcaaagaaccaatttgttgctttctcgattttctcttttgtgtttatgttttcagtttcattgatttatgcttttatgttatttccttccttctgtttgttttggggttaattttcttttattttcctagtttcataaaatgaaagttgagttcatagatttgagattttcttattttctaatacaaacatataatgctgtaagttttcctttaagtacttctttagctgcctctatacattttgatatattgtgttcattttcattcaattcaaactattttctaatttcctctttcactcattggttgtctcgtgttgtttaattttcaagtatttgggggattttccatacataattcctgtattgtttctagttgaattctgttgcagaaactgtattttgtatgattccaattcttttaaattttttgaggcttgttctatggcccaggatatattttatattgcggaaactatcaccattgtaatccatgtcaaactaaatactactatttctttctaatttctcataccttttccttgygtatttctctaaacagcacctcttaagggtgaccactgaaaaaataggaatgttatttataatttttcagctagtaaagaggatgaaaaggaataaaggaaactccaaacttgattaattcaatagtagacacaaaataagaaacaggcagccttattatatttgtackacacataatgaaacagacacctgagatgttcagtaacatgcccaaggtcaagcagcatgtaagtggtggatctagtatttaaatcaaagttccacgccagagctcaagactgtgaccactggagtgtacagtctccctagagatgtgttgagataaattaggctaaaaggaagaacatttgaccaaatgaatcagcattattttttcttgagctttattttgacattcacctaacccggctaagccagcttctattattgctggaagaatgacaatatccataaatagacaattacctgcttttttttctgaaatgttttatatgttgaattaataagctatcaagtagtaccttctaagaaaatgaatattaacactgggtttttctgtaaattatggaaaactatgctttgcttttcctctttctgccctgcaccatggagatactccacaagacatgaactttcactctacctgcttgttctctggattcacttaaagcttgcttgctgcttttaggaggccaaatccagaaaaattcggaaagaaccttgagcttcaggcttcatactaactcctgagcatatagagactcgaatcaaagagaaacaggcataattcagcagtcccttgagctacccgattgtgtgtgtgtgtgtgtgtttgtgtgtgtgtacatgtgtttagaggcagggtctcgctccatcacccaggctgcagtacagttgtgtgatcatagctcactgcaacttcaacctccctgggatcaaatgatcctcctgcctcaacttcccaaacagctaggactgcaatcagatttagtgtgttttgagaaagctctatcagggtggaagtgggaggccttttgggatatctattctaagggactttgagtggaaaaacaggaggatttgagggaagtattgttaggtgccagcaagtgactttttagacagcttttttgtatgtggatgcattatttgccaagttttttccctttattctctctcaaatgttgccctggtttaaaagctcattaatttatatgcaatccaatgtgaggataaagtgtaattcagaggtgcaacattctgatctcattgtttcccaccaatttggttagctaacctctgtacaaaatacaatcttcaaactacaacttcaaggctttaaaaattgaggatgaatgttattttaggcaagccacagttgccctagatcctgccccatgttgtttgaatgtgccctgctttgtatgaataattcctgcatgttggcaacaccaagagattttttggagctaaaatacaactcacagtgtaaccacagtagggccgagagatttgccacacaggggatgtgggcccctggggaagctggcgttcgtattaaagaagctcattagagctaagggttagccacaaacctgctcccttgagggaagagaaacgctaaatacattttttctctctcattcccacagttcagaacaaagggtttaaatcagtcagctcttgttatctgtgcttgtgaggaatgggaacagaatggataagccaggttcagtgtctttagttttagtgagtagtctttaccctacaccagggtgaacttttgctgaactgtttccaagtagcaagggtgcctggaattgaaagcctccctttctttctttctttctttctttttttttttttttgagacggagtctgcctctgtcgcctaggctggagtgcagtggctgcgatctcgactcactgcaagctccgcctcctgggttcaccccattctcctgcctcagcctcccgaatagctgggactacaggcgcccgccaccacgcccggctaatttttttgtagttttttagtagagacagggtttcaccgtgttagtcaggatggtctctatctcctgacctcgtgatctgcctgtctcggcctcccaaagtgctgagattacaggcgtgagccactgcgctcagccgaaagcttctttttcttggcacggtggctcacacctgtaatcccagcactttgggaggccgagatgggccaattacctgaggtcaggagttccaggccagcctggccaacatggtgaaaccccatctctactaaaaatacaaaaattagctgggcgtggtggtgggcacgtgtaatcccagctacttgggaggctgaggcaatagaatcacttgaacccgggaggtggaggttgcagtgagttgagattgtgccactgcactccggcctgggcaacagagcgagactctgtcttaagagaaaaaaagaaaaagaaagcctccttttctttctgagacaggaaatctgtgtttagcagagtctcaccttgggctttgggtgaagaaaaaagactccaattctttgaagatagtagaagagttcctcagttgtgggggggtgccagatgggtccaaagtaggtttataggtaagcacatgcacacacacatacatatttttaagtaaaaatggagaggaaaaataaagaaataggaaaatagaagaaaataaaggactagaagagggaagatgagagaccacaaaaattctaaaacttaccatatttcactaaatctaaaggcatcatagattgttactttatgtaccactatgaaagaaaaaatgctctaaattaagccatgatttgacatggattgtatgtaagatgcatcttgatttgggagatattataacaaaaaatgtgtaacttggagttagtgaaaattggtagcgcctcatctttttcagcaattttatttgcaagtgttcaaatagctgaaatataacagaaaacattgtctttactctttggtcatttaaaaatcttgggtcctgtgccrggtgcaatagctcacgcctgtargatcccagcactttgggaggctgaggcaggcagatcacagggtcaagagatagagtccattctggccaacatggtgaaacctcacctctactaaaagcacaaaaattagcwggrcgtggtggtgtacacctgtagtcccagctactcgggaggctgaggcaggagaatctcttgaacccaggaggtggaggttgcagtgagccaagactgcgccactgcactccagcctggtgacagagcaagactctgtctcaaaaaaaaaaaaaaaaaaattgggtcccgcaatatcacttcaatactcttttgcaaacagttgggtatttcctttgaagctacagattttttccatgttagtgtctaaaatattttttaacatcctcaaaacatttttgcagacttcaaagggagagttattaactaaagagtacatcaggaataggcctgggtggtttgaatcagttcatataaatcattaaaaattaatcagaagtatttatgaaaaccagaacataatttctctgtgacctctggatagaaacgctgaaacatctgtcttattcctatgtgtactgaaacaaagagtattgacagtcctgttttctctttgacttttggtttttaagaggtatttaygatgggctttcagcagggcatggatgaagaaacttggcatgaaacaaatatctagtttggcctaaaaagagatcatctagcattgctctaggcaagtttactctgagatagttaattctatgaagtgaaatttttttttaaagtgaaaccaaagcccatttatgtaataaggttaatctcagtattttttgttatcactccttacagcctttttattttataaatatccatgcattttcttgacatacattcttcatattcaaatttattcctctagagagattctcattagagtttgtttttccttgtgaaaagcaaacactgagagggaaaataagagaatgatgcagaaggaattattaaattatagtatcaatccagtgttgagagatcactctggggacagagctgtgctcaacttagctgactgcaacaggctggggttgaatccaggaccaggaacaggacccggccctggagcagacatctcggggaatggactcactctgctacagatgtgagttgaagtccagtgcagcaggggtcataagtagttgaaagatggatgaaatggccggacgcagtggctcatgcctgtaatcccggcactttgggaggccgagacaggcagatcacttcagctccggagttcgagaccagcctgggcaacatggtgaaatgccagctctactgaaaatacaaaaattagccaggtatggtggcgggcgcctgtagtcccagctactcaggaggctgggaaggttgcagtgagctgagattgtgccactgcactccaaccagggtaacagaatgagactccgtctcaaaaaaagatggatgaaagatcacagccttcagaactccaagtattaggtagccagtatcagcccacttgtgtatgttggtaccactgctaataaaacataatattcactgagtacttagggccaactattgtcctaagtgctttatatctattagcttattaagcccttgcaagatccttataaagtttcacaggtaagagcatggaggccagaggggttagctgggttcccaagaacacacagctagaagtgacatccaaactaggtcctttaacaccatgtctgtctcctggatctgtggaagaggaaaaggactccagtccctaggaggtggactggcaggagaagaaagccctctagttctgcaggagtactgggcaagttcccaggaagagacgtgggcacaggacaagggacaaatccagagcacacagtggatactggaacttgggaacagagcagaaagaccaaaaccattgtgagaggcataacattcagttgctgggcatcagactccagttggctgcctagcagttccacagagttccaaccccacctaaggtcggatttcttcctagcgatttgatgaggtcgagccagtagatgaagtggggataggatagggagcaagtgacttaacagttaggagggaggaagctggaaactaggaagggtcagacccacaagaaagtgtatgtgttattagtattaatcacaacagatgcctgaagatttcagttgtatttcacgttgtctgcatttcctccgtttatcatttgaaagcttgctggtcccatgaaacttaagcatgctatgtatatatacaaaaaatatgcttgtattaatctgttctcatgctgctaataaatacataactgaaactgggtaatttataaaggaaagaggtttatttatttttttaattatattttaagttctagggtacatgtgcacaatgtgcaggtttgttacataggtatacatgtgccatgttggtttgctgcacccattgactcgacatttacattagttatttctcctaatgctatccctccgccagcccccgacaccccctccacaggcctcaatgtgtgatgttccccgccctgtgtccatgtgttctcattgttcaactcccacctatgagtgagaacatgcagtgtttggttttctgtccttgtgatagtttgctaaaaatgatggtttccagcctcatccatgtccctgcaaaggacatgaactcatccttttttatggctgcatagtattccatagtgtatatgtgccacattttcttaatccagtctatcattgatggacatttgagttggttccaagtctttgctattgtgaagagtgccacaataaacatatgtgtgcatgtgtctttatagtagcatgatttataatcctttgggtatatacccagtaatgggatccctgggtcaaaggtatttctagttctagatccttgaggaatcaccacactgtcttccacaatagttgaactaatttacactcccaccaacaatgtaaaagtgttcctatttctccatatcctctccagcatctgttgtttcctgactttttaatgatagccattctaactggagtgagatgttatctcattgtggttttgatttgcatttctctgatgaccagtgatgatgagcatttttttttcatgtgtctgttggctgcataaatgtcttcttttgagaagtgtctgttcatgtcttttgcccactttttgatggggttgttttttcttgtaaatttgtttaagttctttgtagattctggatattagccctttgtcagatgggtagattgcaaaatttttctcccattctgtaggttgtctgttcactctgatgatagtttcttttgctgtgcagaagctctttagtttaattagatcccatttgtctattttggcttttgttgctgttagtctgatgggcttccctttgtgggtaacccaacctttctctctggstgcccttaacattttttccttcatttcaaccttgatgaatctgacaattatgtgtcttggggttgctcttctcgaggagtatctttgtggtgttctctgtatttcctgaatttgaatgttggcctgccttgctaggttggggaagttctcctgggtaatatcctgaagagtgttttctaacttggtttcattctcyccatcactttcaggtacaccaatcaaacatagatttggtcttttcacatagtcctatatttcttggagactgtgttcrtttcttttcactcttttttctctaatcttgtcttctcactttatttcattaatttgatcttcaatcactgatatcgtttcttctacttgatcgaatcagctattgaagcttgtgcatgcgtcacgaagttctcgtactgtggttttcagctccatcaggtcatttaagttcttctctacactgtttattctagttagccatttatctaaccttttttcaaggtttttagcttccttgcgatgagttagaacatgttcctttagctcagagaagtttgttattaccgaccttctgaaacctacttctgtcaactcctcaaactcattctctgtccagttttgttccattgctggtgaggagctgcgatcctttggaggagaagaagaactctggtttttggaattttcagcttttctgctctggtttctccccgtctttgtggttttatctacctttggtctttgatgttggtgacctacagatggggttttggtgtggatgtcctttttgttgatgttgttgctattcctttctgtttgctagttttccttctaacaggcccctcagctgcgggtctgtttagtttgctggaggtccactccagaccccgtttacctgggtatcaccagcggaggctgcagaacagcaaatattgctgcctgatccttcctctggaagcttcattccagaagggcacccacctgtatgaggtgtctgtcggccccttttgggagtgtctcccagtcaggctaaatgggggtcagggacccaattgaggaggcagtctgtccgttctcagagctcgaatgctgtgctgggagaaccactgctctcttcagagctatcagacggggatgtttaagtctgcagaagttgactgctgccttttgttcagctataccctgcccacagaggtggagtctagagaggcggtaggccttgctgagctgtggtgggctctgcccagtttgagcttcccagccactttgtttacatactgaagcctcagcaatggtggacgaccctcccactgcccagctacagcatcacaggttgatttccgactgctgtgctagcagtgagcaaggctccatgggcatgggactgctgagccaggcacagacaggatggaatctctttgtctgccagttgctaagactgtgggaaaagtgcagtatttggacagaagtgtacggttcctccaggtacagtctgtcacagcttcccttggctaggaaagggaaatcacccaactccttgtgcttccaggtgaggcaatgccccaccccacttcggcttgccccctatgggccgcacccactgtccaaccmgtcccaataagatgaaccagctacctcagttggaaatgcagaaatcacccatcttctgcatcaatcatgctgggagctgcagactggagctgttcctattcagccatcttggaagcgacccaggaaagaggtttaatggactcacagttccatatggctggggaggcctcacaatcatggcagaaggcaaattaggggcaaaatcatatcttacatggtggcaggcaagagggcatatgcaggggaactctcctttataaaaccatcagatctcatgagacytattcactatcatgagaacagcatgggaaaaccccacccctgtgattcaattacttcccacagggtccctcccatgacacatggagattattacaattcaaggtgagacttgtgtaagcgcacagagccaaaccatatcaatgcrgtaatcagtttaactgatatatacctgatcttttccaaaaaggatctaatgatgtattttattaattatgcccagataatttctcattttctgcaggaaaataattgcaggcagcaaaatattaacaattatccttattttatgttaggttatttttatcaacattttgtaactgatatagaatgtaaaatttagcatcaagaccaggaaaatctttttgagattacatattccatttgtattttataaaacacatgaactttaaagtctaggaaagttaccaggaaataatttggatttggtgggaaaaagcaacacagttggatatataataaaatggtttggggaaaatatttatggaaaaataatgcctttgacaattgtttatgatgctcattgtactataataaagtttgagtttaatggttttattgtcgttttaacccatagtgtatattcctttcttgcatgagtttgccattattaaacacagcattattgttaatcactcaggtaattcaacatgcttacaatctgtagctttcaaggacaagaattatttaattttctacttattaatttgggattcatttggaggaggacagttttgacatttttttgtttgcctagctttttttttttttttttcctagagaacagaaatgaactcaaacagacattgacaaataggagaataatgtcattaaaaacaggatgactcttggtgaggaaaagggcacaacagtacgtcaagggcccccacagcccacgccacagagaggaatgactaggcaggagtggaaaggaaaaggccagcagttggtgatgagtcagcagtacttttgctaaaaatgctaatctaatacagcagtgggaagtgttggttagcatgtgatcatcgaggcctggaatgactccttcctctctgcagctctcaggagtccctgttgaaggaccgggatgggggctttggtgccctatagacctctgtgtgttgttttggggtgtggatcctcctctaattaggaaagatagctagaaggcaggctcagaagtctgccccaactcacacttccaaaattcacattggcgtgtgtaagagatctgagaaatgaaaatgtgtgatattctccctcatcttcatattaagataatttcttaggacaaaaatgatttttaaacataccccttactccagcgatatctgagccctgatcactcaggaagtgataatgacacctttgttttttgtttttttgttttttttttaatcacttgtaaccgctgtgttgtaggcagggaaatacttaaccatgaaagtgacatattcttgttttattcctatacttaaagcaaaagctacttactttcagtgtaggtcaatttagatctgcaaaacagaataccattttagatgctttgaggcagtgttcctgtaacagaattgttagtaattttagaagattagtgaaatattttattttgaaaaccattatggaattccatgtttgtttcttttaatggataaatttaaatatatatcaaatgratagattattgtagactttttcagggatagttatttttccatcagcagtactgttagactactctatgcagaatacatctactagaatgacttatttccttttttgaaaaaaaaattgaattttattttaagttccaggatacatgtgcaggacgtgcaggtttgttacataggtaaatgtgtgccatggtgatttgctgcatctatcaacccatcacctaggtattaagccccacatgtgttagctatttatcctgatgctgtcgccgcatcttccatccccaacaggacctagtgtgtgttgttcccctccttgtgtccatgtgttctcattgttcagctcccacttgtaaatgagaacatgtggtgcttggttttctgttcctgcattagtttgctgactataatggcttcaagctccacctatgttcctgcaaaggacatgatctccttccttttgatggctgcatagtattccatggtatatatatatatacacacacatatatatatacacacacactcatatatatatacacatatatatataacattttatttatccagtctatcattgatgggcatttgggttgattccatgtctttgctattgtgaatagtgcttcagtgaacataagtgtgcatgtatctttataatagaatgatttattatattcctttgagtatatacccagccatgggattactgggtcaaatggtatttctgattctaagtctctgagggattgccgcactgtcttccataatggttgaactaatttacattcccaccaacagggtaaaagctttcctatttctccatagcctcaccagcatctatcgtttcttgactttttgataatcaccattctgactggcatgagatggtatctcattgtggtcttgatttgcatttctctaatgatttgtgatgttgagttttttttcatgtttgttggccacttaaatgtcttcttttgagaagtgtctgttcatgtcctttgcccatttttaatggtttttttttaatgtaaatttgtttaagtcccttgtagattctggatattagccctttgtcagatgcatagattgcaaaaattttctcccatctataagttgtctgttcactctgacaatagtttcttttgctgtgtggaagctcttcagtttaattagatcccatttgtcaatttgtgcttttgttgcaattgcttttgatgtttttgtcatgaaatyttggcccatgcctatgtcctgactggtattgcctagattttctcctagagtttttatagttttgggttttccatttaagtctttaatccatctggagttaatttttgtataagatataaggaaggggtgcagtttcaattttctgcacatggctaaccagttctcccagcaccatttattaaacagggagtcctttccctattgcttgtttttgtctggtttgtcaaagatcagatggttgtagatgtgtggtcttatttctgaaatctctattctgttccattggtctatgtgtctgtttttgtacttgtaccatgctgttttggttactatagccttatagtatatttttaagagaaagacttatttctaatatatcctaagatatctttctagtttattagtaccaggtataggattttaaaagttgaatttgatttacttaaactaataataatatattgattgattactattgaaagtactattttaagtgccttataaatattatttcattagtgcccaccacaacctgataagtaaagtaatttattatccccattttacatgtaaggaaagtgatccacagacagtttaagatagagctggccgagaatggggctaagatgtaaaactacacaggctgattcragagcatggaggccacagtctttccacactgcttcccagaaggagggccccattaccaccgttcactttggcaaggaactcatttttatgggttttcctttgttcatttgtaaaatgatgaggtwggatttcaagatctgtaaggtccctgacagatttgaagttatattatctttaatgtcttggaacgtctattgaaaaaggacagattggaccaggcatagtggctcacacctgtaaccctagagctttgggaggctgagtggggaggattgcttgagcccaggaattcaagaccagcctgggcaacatagtgagacctagtctctacaaaaatctaaaaattagccaggcatggtggtatgcatctgtagtcacagcccttgggaggctgaggcaggaggatcccatgagcccaggaattcaagactgcggtgagctataatccttackgtactgtagcctgagcaacaatgtgaaaccccatttcttaaaataaaaataaaataaaataaaaaagatattaaccacacatatttgatttgcattctccactaaaatgacatggatatatataatatgatatgatatgatatgatatagttaaaagtgacctcatatgacaaactggacaagagagaagacagcaggtccagagaacatgaatgtaatggcatggagataagttggacccaagtgcctgcaatgaatgacaccaaagaagaacccagttaaatgaggccttgagagacttagtgctccagcaatgtcagggacagcaggcaatgagatgatgtcattgtgaagatcattgggactccctggtcctccaccccacttccattgttggaagtcaggtgacagctctcctcccctcccacccagcctcatccccttctaccactattgcaggaaactgaagattaatttttcagaaaaaaatgaaccaaaaaagtaccaaaaacacggacaccaggtaaaacagaggcctggggagatccagctaaactttttatatgagattctgagaccatcagctctcttccttagcagccgggcatgtgaccactcgtagcccccaccaatgaggcactgaggtttgacagtgaatgttctttgaggaaactgaatggttgtaaagaaaagacctccatctattgcatttgggactcccccactgaaaaggacatctgtctccatgggaatccactagtaaatccatctgtcatcaatctctgccccctgatggacacataactctttcccatcagctcttttggtgtctcacttagaagcaaggagcacagtgtctagcatgaaacaccagatgaaacagaacaaaataaaactaaaaaaccctaaaaaaggaaccccaagaaaatagagcgagaacagagaacagaagaaaacatcaaaatattatgtttaacattcccatggagaaagaataaaatcttggtatctctaaagtaagaacaagagtctgtaacagaataagagaagacaaataagaggagaagaaaaatttctcggaagttaaaaaaatgtgtactgcaacagacacacttgctttttctatccaacaaccatccctacccccaccacactttctgcatcccattgcagaggctgctcacaccagcggcttgctttcccagcctcccttgcagttaaaaaatggggcatttgacacagtaaagggaagactgctgagagtcctcccagagggaatggtttacttccctgatgaaaagtagattatgggaggaaatctcgctctctttagcaaaatgttattttgtctttaagtgactcctggaactatggcaatctccttgggtcattgaaaagacaagcatatgaatgcagctaattactgaggatggcaaasgggaaggggacagagcctggatcctcgaatacaccattgagctgaggatctacatacagggtaatgagaagatacacatatatggtaattggactgtaagggaaaatctaaagtttaggtggaagagatagccttgttgggaaagaggtgatgttattgagggttccaacaagccctaaattgcatagcccattcactcgccaaatagttacactcgtatgtcaggattttacattctaggtaaaacagacaggaaattgaaaataaaacaaaacgagaaaagaagaaatatgccaaaaagtggaaaatgctgtggagaaaaagagacagagtaggctggaggggttgtggggagtggtcagagaaggtgtaagtagcgccattgaagcagagacttgaaagaaacaaaggctccccatgcagacaggggaagtcagtcccaggaagaggaagcagcaagtgcaatggcccttaggtggcaatgtgcttgacacatttgaagaaaagcaaaggaggccagagaagagtgagaagaaattagtcagaggtgacttggagaaataatgagaggtgaaatcttgtagattctgtcaggccactgtatggagttagcctttttctctgagtaagtaggaagatttcactgggttttgagcagaatgtcattatctgacttatattttaaagaataagtctgtgtgtggtgctgagaatagaatgaaaggggtaaaggttgagcagggagatggctgaaaagatattgcagtaattgcagtgagagataacgatagctggaacctggatggtcacagaggagctggtgagcagtatttggatttctgtatatatcttataggtaaagacaaagccatcacccatacgtgctgatgaattttacattagtggacattgacatggctgtaaggtttctggcctgagcaagtgtataaactgagttgccatttactaaaatggggaagattgtgaaaagaggagctttggaaaggaaaccaggggtgtggttttggaatatttttcctcctaaacatccaagataagcaggcagttggatataccagtctggagttcagggaagagaggcagaggattaagatgtttgtttaaacgtggtcaatgtatagaagggatttaaagccgtgctgaagaatgggtcatccagggagtgaaggtggatagagaagagctctaaggactgatacctggagcttcccactatttggaagctgggaggacaagaagaaactagtaaagcagtctgaggaggagcaaccagggaatcatgtcctggaagctgagtgaagcaagggctaatcagccactgaatgcagttaatagaacaagtaagaagactgaatgttgaccaccatagttagcaagatggatactgttgttgaccttgataagggctcaagtgtctttaagaacaaagaaccagtcaggttcagccaaggatgatgtgtcagcagtagcagcctctctggacacccagttatgggaagtggagtgaaacagtgaaatgaccccttgcctagggagtgggcacaattccaacattgcctatagggatatggaagccaaatgtgagaaatggtcatgaaaaggaacataagaagctctgattttaccatttaagtcaagcagttatgccttttggagctgttatttatttggaagcacattaaaggaagctagaggacccatttccctgtccaaatgtcaggagtctttgaaaaggcaagcataatgaagagaatatggaaaccataaacacaaactttagaataaagacgcatctggtgcaaattccaatatcacatgctaatttttgataccaagttactgaacctttctgaatcttagtgttctcttctataaaataaggctagccatgtgtgtctcatgagattgtttttttcaactttcatattaaatgcaaggggtgcatgtgtaggtttgttacatgggtatattgcatgaggctgaggtttagggttcgattgcacccatcacccaggtagttagcatagtacccagtaggtagtttttcaacccttgacccctatgagaagatttttttatgagtaataattggatggcatatggaaggcccctagaactgtatcatccaaacaggtgaccagcaagtgacaactttgattattcttacatcttagctaggcctgaggtagaagctacttgttttaatgtgagaaagatgaagcatttgttgacatgaacctagtcagagaaggagttggctagagctgtagttttaataaagttctttaaaaggcatttattatggcctagaccttggaagaaacagagcagaggtctcaaggccttattttcttgatatattccaaaataaatctcactgacttctcttaaactctgcccttcaaaccagatcgtagcatgtataaggttaagataatatcacacccatgggatgctgagggcaaaaaagttcaccttgctgcctgagagtgtgccagatgccaagaagtacatctttgtgaggcacaaaatggccttaagctcacctttcttctgtgtttttcttctcaaccttacgtatttttacattagagctctcagtacacatgggtgttggctttattctccctagttcacaaaatagaaagcagatagcaaatgcctaagaaataattttttgagagtacactatgactctctttttattttcatagtaactcagaccaaattggaatacttctagtagaaatagtcacattcctcactcttgaataaaatatttagatatttagcaaatggattctgtgtcctaaaacaatgtttacttgtggctatgattaactacattttcttatttaaatatatgattttgagtcttggttctatgatttattatttattttctatctgatttgactgtgaaacttgatggcatgaaagcactttggccaagaaattcatagggcagtgttagttttggatttcacttttcctactagagttcatggtcattcagtttatcaatgtacaaaaaattagacaaagtggatatttcccagaagtcaagcaatttccccagagggaaaataaaatttcatcagtccctgaatttaaaaatctccaaaccccatttaaaaataaccatacaaatcctgtttctccacataagactcaaagatttgtttgtgcatcttgaatctacaactgctttgtgtgtttcctgacctttacttatataagttctagtccccattagaggtaaatggattctaaagtttgctttaaaatcattgccaaagtggccttatctttattagtttctgactatataatctgagtgagaatacattgtaataggggcattgaaaaatcactgagattaacttgaaaggattatttctggcagagatgacaatttctaaatactgagataagagatattaagcttaacttgattctaacctctttgttgtcatgatcatggtggaaatttacttaaccaattctctgggacaaagaaattgtcagtttgggcctgaaataggttacagtgttaggaattacagtaagaagcatgtcactaatacccaatagagaactttcttgcaatttaaaactgtgcaatgaatcatcttataaacctaataaatacagatgcagttacccaaagggtcagctaaaagaacagtaagaacctcaagactgcctgacgttattccttgacaatattacaccttccaaaatgatagctaacctaagtgaaccaacatggggaagctaattacaaggttatctcagctttggcattgaattattctgctcagtgactttgctgtgaaagctgggcagccctagtgaagttcgtgttttctccataaagtggctgccatttcaatggctgatgggcttaaaacttttagttgccatacttgaaatccattgtattttatttggtgaaaagatttcattaaactggattgtcaaatctgatttcgaaaaattgtaagtggaattttctctatttctgtaagtgtctgtagtttttgacttagtaaagggacggctttggaagtttttgagtggaaaggcgacatgatatgatttaagggttaaaaggctcactcaggatgccatgtttaggatgggaggtagaagcaaggccagttcagaggtgactgcagtaatccaggtgagagctgatggatcacggtgggtgagtggagatggtgagaaatgtcagattctggatacattttaagctacagccacgaggattggatatgaggtaaaagagaatgagtggtgttaaggatgacttcaaagtttgggagactgattgggagaaaatatttgcaaaacgtatgtctgataaagatcttatatccagatatataaagagttcttacagtacatctgtaagaacacagcccaatattttcaaaacaggcaaaggatttgaatgacactctaccaaaaatgacatataaatggcctgtgagaacatgggaagattttcaatatcattagtcatcagggaaatacaaatcaaaccacaaagagataccgcctcacacccagaggatgcctataaccaggaagtcagataggaacagttgttggttgaggaagtaaagttggaactcccctacactgctgatgggaatggaagacgctgcagcctctctgaaaaaaaaaaaaaactcttcagcaatttctttcttttttttttttttttttttttttttttgagatgaagtcttgctctgttgcccaggctgaaatgcaatggcctgatctctgctcactgcaacctctgcctcctgggttcaagcaattctcctgcctcagcctcctcagtagctgggattgcaagcatgcaccaccgtatctggccaatttttgtatttttagcagagacagggtttcgccttgttggccaagctggtcttgaactcctgacctcaagtgatccacccgcctcagcctcccaaagtgctgggattacaggcatgagccacagcacccagcaggcaatttcttataaagtaaacccacacttatcaatgtgatctacaatcatactctcctatgtatttatccaaatgaaatgaaaacaggtttttgtttgtttgtttgttttgttttttttgagatggagtcttgctctgtcacccaggctggagtgcggtgacgtgatcttggctcactgcaaactccgcctcctgggttcaagtgattctcctgcctcagcctcctgaatagctgggaccacaagcatgtgccaccatacccggctaattttttgtatttttagtagagacagggtttcaccatgttagccaggatggtctcartctcctgacctcgtgatccacctgcctgggcctcccaaagtgctgggattacaggtatgagccaccatgcctggcccatgaaaacactttttatacaaaggctggtatgcaaatattcatagcaactttatttgtaataactcaaactaaaaacaattcaaatgtccacaaactgatgaaggaatgaaaaaactgtggtacgtccatgaatggtgtactactcagcaatacaaagcaacggactgcatgcaaggaatgccagcagcaacacaggagaatctcaagtgcactgtgttcagtaaaagagccacacttgaaaggatatatgctgtatgattccatttaaatgaacttcataacagttcaaaaactttcataacagaaagcagaactgtgtttgccagaggctataagtggagaggaagaaagcaattaaaaaggggctcaagggagcttttgggggtgatggaattattctacatcatgactgtaatgatagatgactgtgcattcatcataactcattgaattatattctcaaaaatggcatatgtaaattatacctcgaaagagctgatttttttaaacaagtaattctaactatcactgtttttatttttgaggtcagcacattttaattggaattcgataaagaaataggtgtacagtccttaagcagtcttgaaaaaaagtacttagctgctggggatgctaaggtgggaagatcacttgagcctgggaggtggaggttgyaaaaaaaaaaaaaaaattacctaactctctaggcatctgtctccttagcaggaagatggagatcagggtgcctgatttggtaattttttttaaattttctttttgatttgttttaatctgaaaagtcatgagtaatcactatttttgtaaattgtattgagttttaattgcctcaagttcagcttttatttaatgaaatccagtggtggtccattttattaagtatctttttatagtgaaataagtgggcttgcattattttgtaggcttgtatttttgtatgctgggttttattaaagctagatggatctataattacatattcctgaagggagaagaatgcttgctcttatagtgacagcctaaaattctgggtttttagtgattcactcacactcaacattgattatgatgtttactaagatcatacactgtattttcatgtgcattatcttaattgtccagcagcagtttgaagtaagtctccttacctccattatacatgaaatgagacaaaaatctatcagttgttagatgacttacttgtggttggccagcttttaaaacgagaattcaatcttaggtttcctggttttcaatgcaatgttctttcctcaaccaaagctgtcttcttcccctagttcttaaaatatgtgtgagctgtcaagattctgattgttcttaatttgctgaatcttcagcttccaccattgttcaggttattggaaaaatttatttatttatttttgagatagagtctcactctgtcacctaggctggagtgcagtggcacgatttcggctcgcagcaacctctgcctcctgggttcaagcgattctcctgcctcagcctcccgagaagctggggttacaggcatgtaccaccatgcctggctattttttttttttttttgtatttttaatagagacagggtttcctcacgttggccaggcttgtctcaaactcccgacctcaagcgatccacccgccttggcctcccaaagtgctgggattataggcatgagccaacacgcctggccaaaatttatgtatttcgttggaatgtttcagtaaggtcaggttatgggcattgagaaaggctctacactgctagattagacccccacctaattactgaggtgctaagggcrtcatgaaatttcagtaggaggtgagataaagctaaatggcctttctcaatgtagagggtaaaatctggaatgagaacatttgaaatctaaacttattgccaggtatagcatatttgtctttaactattcgaacaaggggatttttttcctatacaaagctatacaaattaaaaatatatatgcaatattttaaaattcatccattcagctagcatttgctgatactctctgcatcagtgattctgctagatcctgtgaattagggggacaaaaaaggctatatacaattctcatccttaaaaggatccatagcctagtaaaggaagctgacttgcaaacaactaaatgaaagctggaccatgagataaggggtaatggatattttttaaataaaaagatagcttatagccacatatgtattaaaagttctacaatatctctttcttacctttgagttagatagtycccttttttttgagatgaaagtctcactgtgttgctcaggctggagtgcaatgacacaatcatgactcactgcagccttgaattgctgtactcaggcaatcctcctatctcagtctcccaagtaactgggaatatagacacacaccaccacgcctgggtgttttttggctttttgttgagatgggagtcttactgtgttgcccaggaaggttttgagctcctggcctcaatcaatctcccaaaatgctaggattgctggcatgagccactgcacctggcctgaggtaattattcttatctccacttaacacagaaggtaacggaggctcagaaaggttggatgccttgtttagagctgatcttcctaggatgagactttacatttagaacaactgacctccatcctgcattctcaccccagccagaggtcttctggttttcttgaggtggctggaatcaaatgggctatttggaaaagggggatgtgagggctatctggctgtggcatcagtcaccccattgatcgctagggttgatcaggctgatcgggctggctaggtaggtgtctccttcctccctcactgctccatgtgtgtctctcccaaagctgcgtgctcggttgaagaggacaaccatctgtgatagaggaggactggccttcagtcaagggtatatgagtagctgtgctcccctgcaagaatctccaaataccctctggagaggttacctccaagtgctcattccctgtttccacatccggtttcagttaccaagatcagagcagaattaggtctgagatccagtgaggtgtacagtagcacctggaccattctagggctcactgtcttcaagccctggctgtgcccacagtcttcatgaagaaactggacactgtgtctgctggatgatgtatttcttcttgcttgaggttatgaaaaatatcaaaatatgtaaagaaacatgctggataaaaatattgccttgaaatacaatgtggtagtcttctagttctttattccgtaaaagacagagggcatgacatgttcaattcaacgcaacgcaacgcaacaaaaatgtatctgctgcartggtggggatacgagagtatgatgtagccccaggccctgggggactttggtgtggatctcgcagtactcagtgaaacttactataaaaggccttattcaacattcattttaaatgtcttggaccatatcctagaaagcagtgttgccctcaagtaaaattttcccacattttaatgttccaaacacttggttgctagaaaactttataaagaaattttactgaaaatcaaactcttaggacaaaggtcatgccattttgttgcctagccctagaatgaaatagtcttttattctgtgttctctatttatatgagttagaatacttcactttgaaatgaacttgtagttttaaaataaaaaaggacagaaagtaaaagaaagaaaacaattattccaatttttttattctaacaataaatgtataacacattacatttaaaagaatgtaacttctttaatagtgttagtgaagctacccaggatattcagaactcaaatgaagtgtacaaatgccaaaaacgattatgttgctatttccacagatgttttctgaggaatttgccttgaagtgatttaagatgaatacttgattttgatttttatttttttgagacagagtctcactctgttgcccaggccagaatgcagtggcgtgatctcagcttactgcaacctccatctcccgggttcaagtgattctcccacctcagcctcccgagtaatggggactacaggcgtgcgccaccacacccagctaatttttatattttttagtagagatggggtttcaccatgttgaccatgctggtctcgaactcctgacctcaagtgatccacccgcctcagcctccgaaagtgctgggattacaggcatgagccaccacacccagcctaaggtgaatacttttattctacagaaattctaattcatacaagtcactgttagtcctcatttcctgagtaattttccatttttacttcattttttttttagagacagggtctagctcccttgcccaagttggagtgcagaggtgcgatcatagctcagtgcagtgtctgactcctgggctcaagcgaatctctagccacagcttcctaaattgctaggattacaggtgtgagccaccgcacctggccccatttttatacttatctatactatctcatttttctgtaacgtgttcatatgacttttatattcaggaaagtaaaacataagttgctttatatgctaaatgtatataatgatatgcctatattccaaacatataaagaaagacgaactaacagtaaagccaataacagtgccacagcctcctgacagcttgtccatttctcccctctttggccctgtgccttttagaaccaaagattgtgatgctcacacgggagcaggtagctcagagccctcaagccagctctcgagagcaggtgaggaaaacctacacatgggcttcgtggccacagttgctcctgtgaaatgaggtcttatagcaatctcctttttatttccttgataagtaaaaacgttccagttaactggtcccttagcagaaatgccacagatatcaagcaattaaagacagcttttgtgtgatctacattctgtccatttttcaagggagtgctctttgttccacatggtaaggcacatccattcattcattcatacaagtcatttgttcatatatcagcatactccctctgtgtctgggactgtgtgtgtgtgggtgtgtgtgatgtaagcattcaaatgacaccatgtttttgtaattcttactatttcttcatattccatatatcagagtcctcgtaagctgggggtccaggggtatcttgacctcagagagtagctggcgcttgcagtgtgatcagaaccatagtgaagcacaagcacaaagcatggagacagaggcagaggctttttcagctgagttaggaacgtggagtggggctctctacacagccaagaggagatggggagtcagagaaagcaatgagaaagcattgagaaagcaatgtctatagttgcccaagattacaggaggaagcctgatctgggatggaaggagcacgccatgcatgggaggtgacaggaccagatctacaaagaacagcctggacatcctatcatttgcaacatggatggcactggaggacactctgtgaagtgaaacaagccaggcacagaaagacaaactttgcatgttctcacttattggtgggagctaaaaattaaaacaattgaactcatggagatagagagtagawggatggttaccagaggctgggaaggggagtggtgagaggagggagcggggattgcaaatgggtacaaaaaataattagaaagaatgaatgagacctcaaaatattattaaataagtaatcaataactactagttcctctaggtgattaaattaatagataactgatggaatacagttgataaaaggaagagacttgtggtttccagcttgggcatatgatggataatgtgccatcactgagataaggaagagaagagaaagaaaccatccagcaggaaagataaagatggcagacaagacacttttaaaaaatttcttggcttggcaaggtggctcacccttgtaatcccaacactttgggaggccgaggcaggtggatcaaaaggtcaggagaccttttggccaacatggcaaaaccctgtctctactaaaaatacaaaaattagctggaagtggtggcacgtgcctgcaatcccagctactcgggagactgaggcagaagaattgcttgaaccagggagtcggaggttgcagtgagccgagatcgtgtcactgcactccatcctggcgacagagtgagactgtctaaaaaaaaaaaaaaaaaaaaaaaaattcttgagacagggtttcactatgttgcccaggctaaagggcagtggcatggtctcgactcactgtagtctcaatctcccaggctcaagcaatccgcccacctctgactcctaagtagctgggactacaggtgcacaccactgtgcctggctaattttttttttttttgtacttctagacacaaagggtcttcatgttgtccaggctggtttaaaactcctgygctcaagtgatccacccacctcggccttccaaagtgctgggattacaggcatgtgacaccacacctggctagcatagacttttgtacataatgacttgaaggacccatggcacacccatgtggagacttccagcaggacattaggaagatgaaccttggtactgtagagatatcttgataagagataaaagtgaaaggaggagtcgttggcataaggtggaaattgacactatggaagggattgactagggaatatgaaatggggttgaaggtggaggatagaatttgggatgaaatccacanaaggtgtcaggctggtgaagaggggcacatggacaggatcagtagcataggtaaaggaacaaataagagtggtctctctaaaccatggcttagtctcttttccaggattcttagagatccctagaagttcagatgtattcttaaggtgtttctagaagagaaggctctggaaccttaagtcagggagccaggtgatccaagaggtggcattgaaggtgacaagttcacggggctgaagtgtccccaggcttccatgtagcagacttgcctgcctccctgacatgctgtcccaaagactagcacacctactcgaagacttgcaggagccctttcgtactttacacctgatggaaatgcatgattgtgcagatgtctttgaggggggacatctcaataaagatawacattaatgtgacctgctcctcacaagtgggtcattcccacagactagcttttgtcagcttcataataagaatatttgcaagtctgagattccytgtgtgtgtgtgtgtgtgtgtgtgtgtgtgtattacattttagatgaaagagaatcttastggtataaatgtgcagcccactcagggccggtactgaaacaactccctttgttcccatcagataaatttcatccacacaagctacctctgttaaattttagtgctttacagtttagttagcccaaagaaagactaaaattttcagtttacagtttagaaagaatagaacaaggccaagaaggaataaagtgatactttttttctcagtgaccctcttcaaatacagttyttagaatagaactccagctcggtgcagtagctcacagctgtaatcccagccctttgcgaggctgaggcaggagaatcacttgagcccagaagtttgagaccagcctggggaggttagcaagacccagccctataaattaataataataataataataataaattagctgggtgtgtggttgtgttcgcttgtagtcccagctacttgggaggctgaagagaagatcactggagcccaggagcactgcactacagcctagatgacagagcaagaccctgtctcaaaaaaaaaaaaaagaatacaacttcatcctgagaaggagtggatacacaaaatgaagagaatatcaaaccagaagaccagctcctactcctggctctgcccaagccagctgtgagacctctctagacttcagtactctctgggacttcgttttccataaatagtgtaggatgattgtattaaaatagaagcttcttaggaactagggctgtgcctattaatttcttcctatacttggcaccttttaaaaactttgaattgaagtgcaatatacattcagaaaagtgtccacatcatgaatgttcagcttaatgaattttccaccaagcgaacaaccttgtgtataatcattaccagttaacaaatagaacattaccaatcgttggctttattagtcttcactttataggggatgcctaataaataatttacttagtaaatgcaccttagtaaaaggtgcaaacatgttttctcacaacaatccctatattttcttttttcttactttttttcttgagatgcagtttcactcctgtcacccaggctggagcgctcacgatctcaggcacgatctcagctcactgcaacctctgcctcccaggttcaagtgattctcctgtctcagcctcctgaatagctgggattacaggtgcctgccaccacacccagctaattttttgtatctttagtagagatggggtttcactatgttggccaggctagtctcgaactcgtgacctcaggtgatccacccgccttggcctcccaaagtgctgggattacaggcatgagccactgcatctggcccctatattttcttattaaattcacaggagaaaacttgagccaaataatctaactcagtctttcacgaccttcttaaaatcagcagatatttgacaaaagaataaatgaataaatatccaaaccaataattatgtcagagtatcaaggcaatgaggaagaaggaaatctaactgtaatcttgttagagtccattttactttccttcttgttaccttgtcactgggtgatgagaaaagacagttctctgaatttgtcattctctttgctctaagtttgaagaaaaatataaaagtcaactttctctggagcacctagaaaaatcgcctttcctaagacagtttgcactgcaatggaatttatgaggaggagattctagtcttggttctgatgtactccaccaaaccaccagatcttggacagaagttgactgggtctttcctttgcaaaaggcctgaactacacatttcctagaaytcattcctgctcaaggttccaatgacatgcaccttttcaagatgatcaactgtactgaaggttacagtctgtggccctggagcagataaaaataaagtggggccctgtaatagtgagtcattggcatccgtccacagctctatgagttggccaaactaaccaggcagagattaatgcctaactagaatgtggattgctgctttgcaaaagagcagttggaagattaaggagaaaaaaaaaaaatcctggataatcacctccctcctccatccagcaatgaggcagctttgatgagtaatccattgattgctatgagccatcagtttccttctttccctccctttgctgcagcagttttcactgccagtaaccactgcagctgtgcagggatcgtcaccaggacacaccccttcactctgttctccaccacctcctaacaaccaaccacgccttagataaagggtgcaggaattgcagcaaggggctttggcccttgtgggtggatacctgtggcagtcaccgtgcatttagaccatctgtggttggggagttggctgttcatgcatgttctggaagagaaattcactgcaaatgcagagtgagccaacacaacagtaagagattctctgcatgactagtataaaatcatgtgaaagattagaaatgaagtcgctttgtttcagcctctatttatctatttacttacttatttgagactgggtctttctttgtcacccaggatggagtgcagtggcgaaatcacagctcactgcagcctcctcctaccaggctcaagcgatcctttcgcctcagcctcctgagtagctgggactacagacatgtaccactatgcctggccaattttttttttaactttctgtagagacagagtcttgctatgttgcccaggctggtttcacactgctggactcaagcaattctctcgctttggcctcccaaagtgctgggattacattcctgtttcagcctttaaaataaaaaacattttagggtatgttagtaagtgaggtggtggtggtcatttctctttaaatgagactttccatctataatttctatttttattacactctctcaggcctgctgggttccttcacccttaattgctgacattctgccaacaaagaaacacccacttagtttctttcttacatagttgcaagttccttttttcttattgacttgatgttaccctgctctgccattcaaaaaacaagaaacaagagcatgatctggccatgtgagaaacagaggaattataattgtggcttgtgatacacatacatataggaaccaagacacaattttctgttagatttgtaatgatgtctgaagcatatgattctgaaaaattcgagaaaactagacacatttccgatgctataatatgattctgagttgtacttgctttgtactttgacagtttcaggttccatattcagacccacaaatttcaaaatctaattgcaaacacctgttagcgacaagttaccacaaaatagtctcctttcgtagggtcatgcctgggaaacagagctcttcctttttaggtacaagctttatgcatagatttttatttatataaaatgttcggcccaagtctttgtaaacagtacttacccaggttatttattttttaattctaaatataaacatgtacaaaatgtaggaactaaaatttccaaactaactggcttgcaaacaatattatatagatttgttgatttggtttgtagaatgttttttattcaatgaatttttttcattcagtgaatcactttgatgagaatatttaaaagaataaagagctgtatatcaaaaagatcatatttttcagcaagttatcctttcacaaaattattccacacattccttctccctctgtttccactcaagattctagaaggatctgaggtgttgcctttctgttaataagaggataactttatggagctgcaaaagttgataggaaaaattcagatgcaaaagttctaagttacctaagggtaaaatatcacccacagagcttccgagttcctggcttgttagtttctctgcctctttgagcctagacatggaacagtgcgtaagctacacacccagagctaagacactgggaatcaagaccagggcaatgttccgtttctcacatctgctcagtattggcttaggttttctcaagaatttacatttgggaggaaattctgtaggggcaaagttacttaagttctcccaatccaacagtgtgggaaatggtatcaaataagtaggccacttttcaaaagggagaggctgcatcagtaaattaggagaactgtggaattctgcccattgatggaatagcttaagtttttttaaattgatttttaaactgtcaccagctagcagtctccacatatctaccactttcttcataaataaaatgtgtgagttctataaaatttctgagttcttttccaatccattttccaccaatgccctaaatcccccaataccagtagatgagagtccacagatacccatatctgtaaaataaagaaatccacaaaagcagcattattgttcaactcggaatacttcccgcaacattgttggctgttctctaactgaattagagcattttattgttgtgggaacatgtttaaaatgaccatcattcatcattgtcatctgtctctattatcttgaaaacttggatttttaaagagccatgttgtattttttctttgtctctaaagtatatggttcagatgtcagatgtggcatctctgatgatagcatggtagagtccactttctggttagttaaaaatcagtatgctctagaaatgctctgcttgatttccatataatgggtaaattgttatttcccaaaatcaattcccaccccctaagttttgtggaggatgcggtcgttggtcagaggtggcaggtcattctgtttggtcccactcaaacagtatagccgggaatagttatacagagctccaagcgtataaccccaatccagttgatctcagagcatttcccaaccacacagtcacaaaggaatgccttcacttgcaataaaataagacaaagttgtgctttaacctcacaagaagaagaggtccaactactgtggaaagaaagcattgaccaataatattatcaactgatgttgtgggagacacaaattggggggtggctccctggttccagcaatttcctcagttgccccaacggtggtattccattcactccactgctctcataggagatccacatggccccttggtcacagcacttgatggaagggtaggtattttagtccgtttgggctgctgtaacaaagtgccatagactggttgacttataaacaataaaaatttatttctcacagttctggaggctggaagtccaagattaaggtgctggcatggctgggttctggtgagggcttccgggttgcatgtggccagcttcttgtatccagaaagacaagcattctggggactcttttataagggaaagaatcccatgacttaattacctctctgaggctccccctccttatagcatcatattgggggtgaggattttaatgtgtgaatttgggggagacataaacattcagttcttagcaatttctcatacacctaggctgatccttgtggtacacgtatacttggccacaatgactggtccaagggtagatgtgtcatccaagccagaccaatcaagtctttcttggaatttttcacactggagtttggagggggaaatcctttcttcttgggtaatgaggcaagaatgtgagcctaaagatggaggagaagcagagacaagaaggagaaaaggagagggagacccgaagccatctgtgttcctggttctattatagagtgccactgtcacttgaactgccttcctaagcctgctggtccaactcttcattccttttttttttttttttttgagacagggtctcattctgtcacccgggccggagtacagtggcacaatcatggctcactgcagcctcgacctcccaggctcaattgattctcccatctcagcctcccgagtagctgacactccaggtgtgcgccaccaggcccagctaatttttgtgttttttttttttttttttttgtagagacgggatttccccatgtttcccaggctggtctcaaactctggttttaagagaactgcccacctcagcctcccagagtgctgagattacaggtgtgagccactgcgcacagcctcrgctcttcttttcmatcagtcacctttctgtttaaattagttcaaatggagttcttgtcacttgcagctgagaaaatcctgaattggacacttatcaaaaaaaagtactttacaagatcactgttaatggctggtaagcatcccgtgatatgcacacctttacatacttttcaagtcttcctctattataggacacttagattctttaaagacgccctgcaccataaataatgctgtgataaacatccttattcataaaatattgtgcacctctctgactgtcccattagacttgctgctaagaccacatgcactttgaaagcttttgagaccttatgatcaaatttccctgccaaacagttgcatttcatgtatatatctgacagtcattcatgaaagaaagcgtctattttttcacgttgttgccacatattagatattatcactatatttctttaacatgtttctcgatgttataggccaaaagggccacctcattgtgtttttagtttgcacttcttgggaaaaacagttatgcttacaaagaagccccggatttccatcaagttgtggagtgtcatgctggggacactcttatcactcccctgaaggcctcaatggctgactcactctatcaaaatgctaacagggtttcctgccatcaaagggttttgccaaaacatcacattgcctcattttttatcctaaataccacaaccttcttaattctgagaggaggggaagagaagccatcagtgaacatcctaaaagaggacagcaggtagtaggagtacctttttattttgtttggtttttgttaaatttagacttagggatagggatagacttagagatagacttaggaataggaatgccttttaactgactccaaggaggggacttctactggttcagaatgctctccatctgggggatggttcatttatttatttatttttttgaaacagattcttgctctgtcaggctggagtatagtggcttcataattgctcactgcagcctcaaactcctgggctcaagcgatcctcccacctcagcctcctgagtggcagggactacaggcacatgccaccatgcccagcaaatttttgtattttttgtagagatgggtttttgccatgtttcccaggctagtcttgaactcctggacttaagcaattctcccacctcagtcttctgagtaactgggaccacggactcgcaccaccacacctgattaatttttaaattgtttgtagaaacagggtcttgctatgttgtccaggctggtcttaaactcctggccttaagggatcctccctccttggcctcccaaagttctaggattacaggcgaaaggtacacacggccttttcaactttttagaagaacacgctaagtggtatgcacttttgtttggtattggaaagaccttgaatttcacagaggacatttcaggatttttccagagtgtttagtgcttgaccacccagtgctcctcacaacagaccgagtgacatactttctgactttcctctgaagtgcctccaaataagatgcatttgctttcatctttttctccctttccattaagaaaagactaaaactagcatggcactgtcagcagttgagctagtgaactctgggattctcatgaggaggcccagtgaagaaatggcctttcttcctaattaaagacttggggaagcaccctctagaagagcagtccccgacctttttgtcaccggggaccagttttgtggaagacagcttttccatggactrgggaagggttgggggatggtttcsagatgaaactcttccacctcagatcatcaggcattagttagattctcgtaaggaacatgcaacctagatccctcgcatgcacagttcgccatagggttgtgatcctatgagaatctcatgcccccgctgatctgacaggaggcagagctcaggcagtaatgctgcctctcctgccactcacctcctgctgtgtggccctgttcccaacgaccacagaccagtaccaatccacagcctggggtttggggacccctgttctagaacacctactgttgacttctgtgccctagtttcccaggaccaaaagcccttctctgtacatgtgtggtgggagcaccatgtggccaaagagttagctgaggccagagatgtttcactgtgtcagtgcagtgaaagaaagaagggggggaactagttttattttgtttttagattaaatatgcgttgacataacttccaggtgtctgaaaattatgtgaaaacatttttatatggaaggtctgtactcatattattgttgtaatgggttaaaaattgcatcaagggatattgatttccattttttaatcagtctccctctctagatatatggatagagaatgtgtgtatgcatgtgtatgtatttacagatatatatatatatatatatatatatatatatatatatatatatccaccccagctcttgccctcctaggtttttaggttttctttctcttctgttccagtgctgttccttttccctaagccaggccgttcatgcaccaccccccacattctctaaggcgtagaaaactactaataaagtgaagactgggcgtggtggctcacacctgtaatctcagcactttgggaggccaaggcaggtggatcacctgaggtcaggagttcaagaccagcctgagcaacatggagaaaccccatctctactaaaaacacaaaactagccaggtgtggtggtgcatgcctgtaacctcagctactcaggaggctgaggcaggagaatctcttgaacccagggggcagaggttgcagtgagccaagatcatgccattgcactccagcctgggcaacaagagcgactccatctcaaaaaaaaaaaaaaaaaaaaaagaaagtggagatttccagaagaaggacaaatcctactcggatataaaaatagaatgttttgcaggatatagctttctaatttaaatctggtacaaagcacaacttcctcaggcctcagttttcagtttataacaagacaaggattgccttttctctaaggtggcatccagttttgtgatcttaggagacattgactggtacgacgtaggcaaacccctctctgcttcaaacctgtctgggaagccaagcccagggttttctttcatgaaccactcggcttctctgtctctctttgagtttaacctggtttccttctatctcaccacccacgggtggggccagacagtggtgtgtgtcgccactacttcctgatgcccactctgagccaggctgcatttggggctcaaaagggttcatttgcccaaggcatacacaatccacaggagcggagcctcgatttgaacccatgttgtcaaactccaaagccacgatcttaaccactatcctatgctgtctcccaggaggagggtggttttcaaactttttttcagcactgaaacattttaagtgatgtcttccataaaacctcaaaaatggagctgccctggggatcgcagagcaggaacctggttgtgagccactttgcctcatccacaaaccgagattggctcccgggtgccttcacagaactctgagctgcatgaagtggaaaaagaaaccactcttctccactgactacacatgactgtgacagacaaaacccaccttgcctgtccagagcctgctggtgatggtcagtggtcagcatccacagaggccgaagcctaagagcatgactcacagctcatgcagcacttcccacggccaaagggccagcagtgccctcctattttcttttctctctctttttttttttttttttttgagattgagtctagctctgtcgccagtctggagttcagcagcatgatcttggctcactgcaacctctggttcccaggttcaagcgagtctcctgcctcagtctcccgagtagctgggattacaggcacatgctgccacgcccagctaatttttgtattttttagtagagacagggtttcaccttgttggccaggctggtctccatctcctgacctcgtggtcccccacctcggcctcccaaagtgctgggattacaggcgtgagccaccgcgcccggccaatgaagtcctattttcacacttcctttgaggactacagtaatgttaycaggagacaagcagtttctgcacctcctctgccttgacccaagtacattccaatagacgtcatgaggtgacaaactgtgggtgcccatgttgagcactgctaccgccagcattgccaagttgatttgtatggatttgtgtcatttccctgaagttcaacataatgctcaaacaggagggctctgctgtggggcaggcctgggttcacattcaggctctgccaaytactgagtgagcttggaccaacgatttaattaagattccattttctcatctagaaaatgagatcaagtaagtacgaccctgcacagtatccatcactataaaggttagactagctattattattactattataagctaatgaaacatattcttctagttacaagaaaatgaagctgggcacagtggccctcctgttgttgcagcactgtaggaggctaaggcaggaggatcacttgaggccaggagtttgagaccagcctgggcaacctattgagacctgtctctacaaaacaaaccaacaaacaaaacaaaacaaaaaaacactaactggttgtggtggcactcgcctgtagtcccagctacttgggaggcctaaacagaaggattgyttgagtgcaggagctcaaggctgcaatgtgctatgattgcgtcactgcactcctgcccaggcaacagaacaagaccctgccaagagaaagaaagagagaaagagagagagagagagaaagagagagagagagagaacaaaagaatcagtgttttcagaaactttctgactatacatgcctatctaattattaagagatggactcatgaaaattttttcaagtttggataccttcctcttaaattgtgtttgaatttcaagtgagttttcattctcaaatatataacattatgtaacataggatgtgctacttctatttttctttcagtcaggtgtgctattacaaagactgatactgtatgagcaaaatttgggtggattgtcttatctacggatagctagatcccagggttttaagagatcttagaaactctttctccccatactcctcagccaaatataaactggagtgataaaaatcaaacattttatgtggcgggtttaaaaatcactcgtgtatccttaatatgtacccatgcttgccagtggtaccaacactggcttttaggtctttaatgccccagaaataagaatctaaaatgccagttttctactgaagaatactgacttcattgccacttgccttgtgaaataccccagtctctttctgcttgtggaccagtggatttatcatacgcacaatttgttactaaatttgaattgttgagttaggagtgcttgagaaatatgtgactgcagaccaggactgtgtcacctacttggcctcggtgtcattttcccgtaagaatcaggaaaagattattttttctgtttctatgaagaatgtcactcgtatacgaatggtcaataggtacatgaaaaaatgcccaatgtcatcaatcttcagggaaatgcaartcaaaaccagatgggataccacttcacacccgctagaagggctattatgaaaaagacaaaaaaaaaatcacaaatgctgatgaggatggagagaagggagacccttatacactgtttttgggaatgtagcatagctactatggcgaacagtatgggggttcctcaaaaaattaaaaatacaactactaggtcagttgcaatggctcatgcctataatcccaggactttgggaggccaaagtgggtggattgcttgagcccaggagttcaagatcagcctgggcaacataatgagatcctgtttcttaaaaaaaaaatagaactaccatatgatccagcaatcccactrctgggcatttatccaaaggaaacaaaatcagtatgtcaaagggatacctgctctcccatgtttattgcagcatgactcactataatagccaaactaagtgtgcatcaacagatgaatgaagatgatgtggtagatatacactcagccattaaaaataatgaaatcttgtcatttgtgacaacacagacaaacctgggggaggttatgttaagtggcctgagaactctagcaggacagtaagctgaggcaatcgtagggcccaccttatttatctctgtcttgcaaggatttctgtcctttattgcttgatgtctagtatcttgaaactgttgtttcatatattttgtcttttttgttgttgttaatgagacaagttctcactctgttgcccatgctggaatgcagtggcacgattacagctcactgcagcctcctgggctcaagcaatcctcacacctcagcctcccgagtagctgggacaacagctaatttttttttttttaagagactgggtttcatgttgccttggctggtcttgaagtcctgagctcaagccatcatcctgcctcagctccccaaagtgttgggattatggacaggagccactgcacccagcctgagcctgtcttttttatttttaaggaaagaggataaatctggtctttgttactccatctaggcaagaagcagaagtcacaggggcttatccaaagtataatgacatttttaaactacagcaataaaagtcattcccttcaaatcatttaaaattaaaaagcaaggttttgttatattaggaaacagttttataaactgcattatgttaagggtatatatcctgtatatgtaaggatatatacccatactcagtggagtttcatgatatatcatgaattttacagcaaatkaaatttacatgatcacaagaagaataaatcgattctgaataagttactgaaatttctaacaccaattgtcattttctatgtagcttcaacccttggcataactggtcagtaaatacaaaattgggtccttttatgactatgcccraagtacattggatttgggtttaactcttcccaccttcctgagaatttctcagggttcccaaatgggtcctcccttgcatccacaaatgagcctgtcagctgcagttaccacagagcatctgccacctcctccgccaatccctgctgcagttcctgcttttcctggttctccctgagaagcctcttctaggatccttagtgaagcctttgctgatggygccttttgagggagtgcccatataagtgccaagggctgcccaaagctgccaggcagggctagstttctcacagaggcaggcgaccctgaacagttctgaatataacctgcttctggcctttaactcctcccaggatcttacagtctctgatgaaagcagttcaatcaatttatgggcaaaggagccagacagggaacagagttcatatagccctccctcctgttccctcttccctgccaccctgaytcagtcaaacttcttctcctccctcccttacaaaacagaagctctcatgctcatcagccaatgaccagaaatatttgatggggacagagggagagaagagtagatgttttatgtactagcaatatctgaatgcaaaaactggacaacccacgtgccttgttccatagccactggcccttgctaggccatgtagtgtggatgtgcctgacatttggagctcagcagttgcccagtatgcagcctcagtggaatgtctcattgaagagctgttcctagatcctcccacaaaaacctaagagcagaggtcaccttccccaggtgattttgcattgctcatcggcagcctagactatggtactcaatagtagcttctgatatcgaacctcacatttctcatgctcaaagaaggcacaacctaagtcagacacagctgtggtcggcttccttctcccactcctcttccaggcttccgccaacaaattggtacagcagagtctcatttccttaggggtcctggaacttccttttcactgtgatttcaaaaacatttattagaggatacatttattcctcagcacattaatggagtccagattctgcttggataatatggacagacagatgtgcagtgttttgtgctacttttagatgagcaacgctgtttacacagaatttgcccaagaccacccaactcatttcacatgtagcctccagctttccaagcccttagcctccagaggaaaagaaaaaatttaataactcagcaccccacccagttttgaagacatgacttaatactgaaggaatttgcaagcctgcactgccaatcaacatgcctacatcaaataagccatcttttcttattctgaaaaatggaaggtggttctagaaacattctgctctctgactttcttccacagtgttcrtgtctcatttgagacctggagaagtctgaacaaagaccttaagcctaaaaagtaataacaatgcataaaacacttgatatttgcccttcaagtcttccactttctatttcacatcaattgccttttccccttagctctatattatgcctaatgatattgttaataattttttgcttaargtttcttacatttttcctagcatttgcatatatcagtaatttgttggctccttatgtaactttgagaagtgggtaaggtgctgtcttagtccgtatgggctgctgtaacaaaataccatagactgggtggcttataaacaacagaaatttctttctcatggttctagagtctgggaattcccagatcaaggcgctggcagattcagtgtgtggtgagggcccacttgcagacgagatcrggcgtgttctaggtggtatggccatagacgaggtcccactttcatgtccatagatggtgccttcttgctgtgtcctcacttggtggaaggggcaagcaagctctttggggtctcttttctaaaggcactaatccyaattcacaagggctcagccttcatgacctaatcaccccccaaagtccccacctcctagtatcatggtgattcgatttcaacatctgaatttkgggcagggtcggrgaggggggtaacaaacattcagaccataacaggcaggtggtagcagcatttccattttccagatgaagtaaatgagaaatcaaatgagtttgccacagtttcccagaaagtaactggttaagtcaattattccagctgatcataataatttctttttccacattgcatctggaaaccattgcctgcttttaagttttgctgtgttgagttatrtagagataccaccacattattgatgtatrttatatattatgttactttatggcttaccaagacctaagggtacattgataccttttctttctaagccctatctgactttggtcagtgatttgtatagaaaatgtgaacccagtaaataacattctagtgtttttctgtaaacactaacaaattttagctacatgaatgacagctactcatagaattaaaaggcagcaaagcttgggagagtggaaaacgtattggaataaaagctaagacactcggtgccaggtctggttttgtccttaattcactcccatgtccgctcccttcccttttacagataatacaagaggcaaattcaatccaatagacattttatcaagggcctattgggtaaagcactttacatatgacatttaaattaaacctcacaacaacccaaacgggtaggtgtcactgaactcattttctagaagagaagactagcatcagggagcttaagacaggggcagggcagggtctgagccactctttgagtcctacaccatgttcctttctatgtccaaggccctgttcagtactaaggaatctttaaggagataggtgtaaagtccctatcctcgagctgctttcaaaacagcagaagtgggcctggtgcagaggctcatgcctgtaatcccagcattttgggaggccaaggcatgaggaccacttgagcccagragtttgtgaccaacctggatgacacagcaagrccctgtctctatagagatacaaaaattagtcattcccagtaactcaggaggctgaagcaggaggattgcttgagcccgagagtttgagaccagcctaagcaatatagtgagaccytgtctctacaaaaactacaaaaatttaaaatttaaaaacacagaagtgaacagatgcatatgcagtgaacaaggggtagctaatataacaaggaagtaaccagtgctgcctgaacgggtgctacatgcaaaggaagtgggttggctggagagatcacttctggcctacagttgtggtggggtgaggttcaggtgatagtttataatgaaagtggaacttaatttggatatctaagcatgattatgattttgacaggcagagatgtgacagagagccatgctggatagagggtatattagtccgttctcattctgctataaggacacaccgagactgggtaattcataaaggaaagaggtttgactcacagttctgcagggctggggaggcctcaggaaacttgcagtcatggcagaaggggaagcgaacacatccttcttcacatggtggcagcaaggagaagtgcagagcgaagggagwggggggaagcccttataaaaccatcagatctcgtgagaactcactatgatgagaacaacatggaggttgttctccatgataattgaatcaccatgattctccaccaggtccctcccatgacacgtggggattatgagaactacagtttaagatgagatttgagtggggacatggccaaaccctattagaaggagtattaacggccgggcgcggtggctcacgcctgtaatcccagcactttgggaggccgaggcgggtggatcatgaggtcaggagatcgagaccatcctggctaacaaggtgaaaccccgtctctactaaaaatacaaaaaattagccgggcgcggtggcgggcgcctgtagtcccagctactcgggaggctgaggcaggagaatggcgtgaacccgggaagcggagcttgcagtgagccgagattgcgccactgcagtccgcagtccgacctgggcgacagagcgagactccgtctcaaaaaaaaaaaaaaaaaaaaaaaaagaaggagtattaacaagatacaaagatgtaaaatacaaagatggtaaaatgcaggatacgcactagatttagcccacaagttgatgtgtgtggaacatagaccctggctactcaaagggtggcctgtggacctgcagcacccccatcacctgggagctggttagaaatgtgtaaaaaattagctgggcatggtggcacgcacctgcaatcccagttactctggagactgaggcaggaggatctcttgagcccaggaattcgaagctgcagtgagctatgatagcaccgttgcactccagcttgggcaacataatgagaccccgaatgtaagggggtaaaaaaagaaagaaacacagactcttaggccccaccccacacatacagaatcacaatctgcacaagtgatccatgcacagtggaacacactagagtgcaggtcacactgaaaggcagattgtgatcaggccaatacggaagctgccgaacctgttggtcaggtggaggctttggagcaagatggggtcgtatgtgaaatctccagcctggctccagcaacatcacttcccagctgtgggaacttgggcaaagttacttaaccaggttacttaaattggggtgataacagtacctgttccttgtctcataatatttaaaatagacttcattttttcagagtagttttagcttcacagcaaagctgtctgggaggtacaggatttctcatatagccccacatagactccccgcttatcaacatcccctgccagagttgaacatttgttacaataaaacctacattaacacatcattatcacccaaagttcgtagtttgcattagggttcactcttggtgatgtatattctatgagtttagatctgtatgatgatatcaatccactggagtagtatcatacaagatagtttcactgccctgaaaatcctgtgtttttcctctttctccctgcctcccacctaacccctgttgaccactgatctttttactgtctccacagttttgccttttctagaacgtcatttagttggaatcttacagtgtgtggcctttcagaatggcttctttcacttagtaatatgcatttaagttttcttcatgtctttttatggcttgatagctcttatttgcactgaatagtaatacrttgcatagatgcatcatagctcatwcatccattcacctactgaaggacctctgggttgtttccatagtttagcaattacaaataaarctgctggccaggtgcggtggctcatgcctgtaatcccagcacttgggaagccgaggcaggcagatcacttgaggtcaggagtttgagaccagcttggccaatgtggtgaaacctcatctctaccaaaagtaaaaaaattagcctggcatgatggcgcacatctgtaatcccagctattcaggaggctgaggcaggagaatcacttgaacctgggaggcggaggttgctgtgagccaaggtcatgccactgcactccatcctgggcaacagagcaagactctgcctcaaaataaatcaagctgctagaaacatctaggtaactttttgcagacataagttttcaactcatttggataaatattaaggagtgtgattgctggatcctgcctcataggactgtgttaggattcatgtaagtaatgtgcttactaatgtgccaggcacttggtaaatttaaatgctcagtaaatgattctgagagtcaggcttgcccctaacatttatgggtcccaggacgagaatacaaaggcagatccacataccctttgctgaaatagttaaggttttgaaacttgatagctttgttcatggccaagctcaggttttcacttgacctggagattgactaaaggagccaggctcatccctccaggctgcaagcccaggcagacatggtatctgctgggcaaggctgggcatgagttgaagacagggcccccaggtggggacaggaccctcctgcaccctggatgggactgatccaggaagctcttaatagcactgagagtcctgggtccttctcctccatgtccctcttttccaactcagatgcctccaagactataccttctgagccaggggctgaagggagcatcattatctggggaggccgtcctgctgagacccctaccctggttgatttaggatggccaatatccctttctctttgcctgtttccccaggtaggctgttcttttctccaccactgcccctaactctaccctgcaaagaggagggsaggcctacttcagcatacatgtcctcttgaataattccattagctcaatctgttacagaactttctaaagaaaatcttcttcataagaccaaaaagaaaaacagcaacaataaatgtcttagtgttttggtatttgtgatatgcagggctcctcttgcctggctctgcgggtggctctgcccattgttatgacaaaaccagacttttgcaggcatgggaatcttcagaaatattttgagctgagaagtgacacacagagctcaactttttgggcccaaatacggtagcatggacatgaagatagattcagtcaaatgctggaaggtgggtgagtattctagaagtttccatggctccatggcacagaatctgctgccacttctctccctgggcccttcctcaacaccatgtcatcctcctggcaatcttaaaacagtttcatgagagctggtttaagatgttgttacttttgaaaaatcattttcatttaattatttaagtgataattctaaatcttccttttttttttttaaacaattgtgtggagaaaatcgtctcttggccgggcactgtggctcacacctgaaatcccagcactttgggaggccgaggcaggtggatcacctgaggtcaggagttctaaagtagcctggccaatatggcaaaccctgtctctactaaaatataaaaatatacaaaaattatccaggcatgatggtgcatgactgtagtcccagctactcaggaggctgaggctgagaatcgcttgaacccagatgacaaaggttgcagtgagccaagatcacgccactgcactccagcctgggtaacacagtgagattctgtcttataaaaaaaaaaaaaaaaaaaaaaggtctcttaagaaatgatcaccgctaggatatcatcaactacattttaaaacataaactttgctggagtctttggggagtctttggggtcattcagatgtgtcaagaggctccatgtgtttgtccctctgcctcatgatttaaaaacataatttaaatcaaaacaagaagtccataccaaggttcaaaacagaaggatatcctgcttcaaggtttcaaacaaagttcatgtaaagcaatgcggctgaatctgtttttaaactgagtttcctcttttcctggggtcatctataactaaactgaaataaagatccattcccttctcccctcccctttttcctttttcgtggtggcctttctttcttcccactagcctgtagcttcttcccattattgtgtccctccttctgacccaccctccctttatttctcataaagaaaagcgcctttctctgtgcagtggggattagctaaccaggaccccttttggaaactgggtggagtagaataccaatcmcaatacagtgattaatcattgtcattaaacagaaagccattttgtcttagaagaaagtcacatcatgtttggagagttaagcacaccaaagtcaggaaatgcaagatggatgtgtactttcaaatgagctaaattgtatagatgaacatatatatataatatttatgttatattatattatttataattataatacatttatatttatattctatgtgtttatatataaatattggtatatataaattatgtatatatgtttatatataaacatatttgtatatatgtaattacatatatatagatacaatttttttcctggctaaaattgctagtttcacttgaaaactgtatcctttactcattatccaatgaactactggtattaaaatatcaagaattcatatttttatattttcggtgttcagaattcacatggccttttgcatttagatttttttttactttttttatttgtttttttaacattttgaggatgtggggcatggtggcacacrcctgtagtcccagctacttgggaggctgaggtgggaggatcacttgagcccaggagtccaagaccagcctggaaaacataatgagaccccatctctaaaaaaataaataaaaataaaaagtatatattaaggaggcttttcaggaactgagataataaaataatagtaataagaataaagaaatgtagtttgggtgggaatcactcagacataacaggaagtgttgcttgccaacattttgtggctaaagtgggtggggaagaagcattaaaaatgcagctaacatgcgcgcttacaagtttcagtctggctcaacaaacgctgaatgctacaacgtgccagccactgggggtacaattaggatgaaagtcggctgctgtgctgaaagagttttcattccatcggcaattgctacattcacagaaaatttcagttggatgtgctttgttgacatccagatatgcatactgtcattggggcacccatgcagaggaagccagggggagtccaggaaaatctcctagaagagatgatgcctgagtctttctctttttcttttcttttctttttttttttttttgaggcagatccgctctgtcacccaggctggagtgaagtggcaagatctcgactcactgcaacctctgcctcccggattcaagcgattctcctgcctcaccctccctaatagctgggattacaagtgcgtgccaccacacctggctaatttttgtatttttagtagagacagggttttaccgtgttggccaggctggtctcgaactcctgacctctggtgatccgcctgactcagcctcccaaagttctgggattacagatatgagccaccgtgccccgcaaactgagccttgaagaaagaataagaattatccactcgaagagagatggaaaggtgtggtatgagctatgcccagccaagaccaagaaccaaattgcatttcctgtacccagaactccagggccctcagtgcaaaacggtggtcggtgttcattggccatggtgagaggggttgcaaggaattggtaattaacaatgtttatcaaaatttgtggaatattgacttttcctgtaaactagagtgattgttgaggttcttttgtttacaagtagtgaattctttattaaattcccacaagctaaaatggtggwtttatagaaaggagttgacctgatccccaagataaaaatgcagccagacctggaaaaatatcaggaactccatgctcatgttctaccacagatcttctacctccatcctgcaaagcagtttcaggatcactccatgccctgctgactgtaaatagctctctagaaaaaccaacatgggtccagggagagccaataagtacaaacgtgggtcagagcatgatctccaggtgactgctgtccattgagagaaaggatgaaaacagcaaagtggggccaggtgctttgggaggccaaggcaggaggatcacttgaggccaggaattcaagaccagcctggtcaacatagtaagaccccatctctaaaaataaaaataaaaaaatcagctgggtgtagtggtgcacatctgtagtcccagctacttggggggctgaagtgggagatcgcttgaggccaggagtttgaggctgcagtaagctatgattgcaccactgctttcccatgtggatgacagagtcaggctctgagaaagaaagaaagaaagaaggaaggaaggaaagaaaagaaagaaagaaagaaagagatagagagagagaaagaaagagagaaaggaaggaaggagggagggaggragggaggaagaaaggaaagaaagaaagaagaaggaaggaaagaaagaaaggggaaagaaagagggaagaaagaaagatggaaagaaagaaaggaaggaaagagggraagaaagaaagaaagaaagaaagaaagaaagaaagaaagaaagaaagaaagaaagaaagaaagagaaaramagtaaagtggaatgatggaaattttgcccacgcaatggctcagtgtaaacatcagacactgcagcatgggaactgggggttcactgagaaaccccaaaggaacacacagatgagtgcatttccaaggtgatagccaatcaatagattggcaccagagggacagcagtccttcttaaccatatgcctcatggggtcagtccacctcagtaaaccctaaccacagagcacatggcttacatgtatgtgttatctgctgtgtgaatgaacaaagaataaatcacaaaaccaatgtcaggagactcacacagatgtgtatgtttcttaagattaaaggcaagactaaagacatggtgaaaccccatctctactaaaaatacaacaacaacaaaaaatttagctgggcctggtagcctgtaatcccagctacctgggaggctaaggcaggagaatcacttgagcccaggaggcagaggttgcagtgagctgagttcacgctactgcactccagcctgggcaatagtgcaagactctgtctcaacaaaaaaaaaaagaaaaaaaagaaaaaaaaatactaaagacagatgtcaagaagacagaacawactttatgtactatttattataaaataccaggcacttttctaagtgcttaatgcgtactaattcatttagtcctccctatgctcctatgaagtaggaaccctgaatgtactctttttattcataaggaaactgaagcgctgaaaggttaggtaacttcctcaaggtcagtgcacaaaaagtggagctgtggccggaacccaggcagcctggtccctgaattcgtgagatgccagctgcctgttcgcttggtctccacattctcccttctccccactcaccccacagagattgcaagcatgagtttctccacaaaaacaatctaagcaccaaatgggtatttaaatgaaccggaaactgaaaagaaggtaagttgatttcaagggataaaagcattaacatgatattaggttggtgcaaaagtaattgcagtccttgccatttgataaaaggcaaaaackacagttacttttgcacccacttaatagttttcaaacttttgggttttttggtagcagaacatttcctccccagtgtcttctttagaattcagtaaatacagctgggcatggtggctcattcctgtaatcccaacactttgggaggccgaggcgggcagatcatctgaggtcaggagttccagaccagcctagccgacatggtgaaaccctatctctctactaaaaatacaaaaaaatcagccgggcatggtggcacgcacctgtaatcccagttacttgggaggctgaggcaggagaatcgcttgatcccgggaggcggaggttgcagtgagccaaggtcgcaccactgcactgcagcctgggtaacaagagcgaaaccccatctcaaaaaaaaaaaaaatcagcaaatacaacagagacaggtagaacagctctggtggaagcaagggacagtgygagagcttcactgaccctggctctgcatcaacttccactttggctccatgcagcttaaaagactgagggactcaattacaagtcacatctcacatcaacsagtgattggaaaacgaggaatactggaatcaattcacctgtccttattatctgagctggtatcaaatgctcagagttttgaaaaaaatcaattcgagccagttgcaacattttaattaggagctctccagcttgatcattaaatattcttataatgaaatgtttctgactctgttttgcatctctgtccatttgatagagtatcagcgacctctttgagaacaggagaatagctgagaggaaggattaggatgaaaaaaggggaaaagcaaagttaaggcctctgtgggggcggagaatattgagacagcctttgtgtagagattttgaagcaagttgcgctctgactcttgaaatgaatggcttagagggtggttctcttgtttatttgttttctttacttttcctcttctggttcctcaaaaggacaggatatttaggatatgtattcttcctcggtttgtttttttcctgaatgttctcaaagcagtccaaattgtctgtttggtgaggaatcgtctcccctgctgcgctatctggcgtgctctatgtagtacctagagcccaggtcacctaatatttccaaaatggtttttccaaagatgcatgactaaaggtcagaggtttccttttgtatttaagtaaatccacacatcctctgccaccagcattcctacggagatgttgatttctcctgtccatttcaacttatgcctctgacttcactgatgcagccagatcctgcaccccttggtgttcctctccagggaggacccactatgtgcttcttccctccaggaatactggtgagggtcaggtgctacacaagaatgttgtgcagtcaggcgaatctaggattgaaytgggctcattcgcttaccagcagcacctctttgggaaagtttctttctttttttttttaatacagtcttgctctgttgcccaggctggagtgcagtggtgcaatcttggctcaccacaacctccacctcccaggttcaagcgattctcccacctcagcctcctgagtagctggaattgcaggcactcgccaccacgccaggctactttttgtatttttagtagagatggggtttcaccaggttggccaggctggtcttaacctcaagtaatccacctgcctcggcctcccaaagtgctgggattacaggcgtgagccaccacacccagctctctttgggaaagtttcttaaactcttattgtctctgtttcttcatttgcaaattggagatcaaataatacctattctggccaggcacagtggctcatgcatgtaatcccagcactttgggaggctgaggcaggcagactgcttgaggccaggagttcaagaccagcctgaccaacatggcgaaacgccatctctactaaaaatacaaaaattagcccgtcatggtggcacatacctgtaatcccagctactcaggagggtgaagtgggagaatcgcttgaactggggaggtggaggttgcagtgagctgaaattgtaccactgcactccagcctgtgcaacagagcaagactctgtctcaaaaataaaataaaatgaaactatttctgagctctactgaacattagtgaaacagctaaatccatttatatacagaatcttctagtgcatagaaaaaccaacttattacatgaagctagcataactttgctttaaaaatacacaaaggtagcaaaagaaaataaaacaatggaccaatctgacttataatattttatttgggattgttcatctatcttcaaaccagcgacgttcattaaaaacacacaaacatcaatccaagaaatataggatgattttgaaccattagaaaaatatcatggttaggcctggtgggatggctcacggccataatcccaacgattgggaggctgaggcaggaggatcactgtagcccagttgtttgagaccagcttgaccaaaatagtgagacccaatctctactggaaaaaaaaaattagtcgggcatggtggtatgtgcctgattaaggaagagcactgactcagcctaatagagaaagtgaacatcaaaatgcctgtggaggggactatcactgagaagtaggggggtcgtgccacaaattcctgaaaggttcaggagtaggtttttagaaggtggagtaaggaaggaatggaataaaaacaacaaggttggttgaaagcctttgaatggagaagctgaacctctaagtttccttcaccatcccagtgggaaataaaaggcttatttttctggagtgtttaaaccaggggagccctagactccagtgtaccagtggaggactgagtagccatttcctcaggggctgagtcggggggcggggggttgggggaaagaagaaaaagaaattgggagactgaggtgggaggtttgcttggggccaggagttcgagaccagcctgggcaatacagtgagacttcatctctataaaaaartaaaataaataataataaattttttttttgagatggagtctcgctctgtcacacaggctggagtacagtgacatgacctcggctcactgcaacctccaccttccaggttcaagcgattctcctgcctcagcctcccgagtagctgggactataggtgtgcaccaacatacctggctaatttttgtatttttagtagacatggggtttcaccatattggtcaggctgggcttgaactcctgacctcgtgatccgcctgcctcggcctcccaaagtgctgggattacagttgtgagccaccgcccttggccataaaattttttaaaaagaaattaatcctgtctagcatttactgaatgctaaacatgtgccaggttctgttctaaatgttccacatgcattaattcagttaatctttgtacaatctaccagacaggaaaaaaaaaatgtacaaaagtaaccaagacagttttgggtttgttgggttttttgttttgttttgttttggtagaaacgttggtctcactatgttgctcaggctggtctcaaactcctgggctcaagcaatcctcctgcctcagcctcccaaagtgcctgcctctgcaggcatgagccaccaccctcagcctcaaggcaatttttaaaaagaacaaaaagtagacttgccctatcaartattaaaacatactaaaaagctctgataagtccaggcgtggtggcttacacctataatcctagcactttgggaagccaaggcaggaggattgctggcagccaggagttcgagggtgcaatgagctatgattacatcactgcgctccagcctggatgacagaacaagaccctgtctcttaaaaaaaaaaaaaaaaaaaaaaaaactatgagaattataacaatatgatttgggtgttggaaatagacaagttagattaattaattggacatgttagattaattaatgttgaagtagacatgttagattagaaaaatatagaaactgacccttacatatgagaatgaaagacaagatcaaaatgatgtttcaaaccagtagggaaaaataataattccataaattatattggaacaattgacaatatacccacttggaagatataaattccagatgaattaagggcaaatctagtattaaaaacatgtatatacatgaaaggactgagaacattatgctgagtgaaataagccaggcacagagtgatacataccatataattgcatttatatgtgtaatataaaaaagctgaactcatagaagtagagaatagaatggtgcttaccagaggctgggggcagcaggggagaatggggagaggttggtcagtgggtgcaaagttacaggcagataggaggaataagttctggtgttctattgcacagcacaaagactacaattaataataatgtatatttcaaaacagctaaaagaggatttaaatgttctcaacacaagaaatgataaatatctgaagtgttggatatgctaattagccttatctgatcattccataatgtagaaacgtatcataacatcrcattgtacctcataaatattgtattagtccattctcatgttgctaataccaacacatacctgagactgggtaatttatagaggaaagaggcttaattgattcacagttccacagggctaggaaagcctccggaaacctacaatcatggtggaaggagaaacaaacatgcccttcttcacatgatggcaggaaggagaagtgcagaatgaagcagggggaaaagacccttaataaaaccatcatatttcgtgagaactcactcatcatcatgagaacagcatgaaggtaactgcctccatgattcatttacctcccactgggtccctccccatgacacatgggaattatgagaactacagttcaagatgagatttggtggggacacagcctaaccatatcaaatatatatagtaattgttggtcaattaaaaatttwaaaaaaacacgtttgtacacttggaagaagtaggactttcttaagtaacacttgcttggtaacataatctatgacttttagcacattatttagttatctgatttttgtggtttttggttttaatcaatagaatgaagatgaaaatagtagaattattgtgaaatttactctgatctgacagactataaatctcactggttacattaaactttgtagtttagtagttgtattcaattctgtataacccagtccctggaagtactgaaattttatttttcctgctgctattaacaacatatttaagtctaatgtgcagaaattcttcctgtgttaattcctctatttcagcatctctagcagtgacaagaaaattttctcctttgacatttttgacaagtccttaaccactgtcatgactacttgtgaatatctggtgatatatgaacaaaaacagcaaaacatctgtaaattcagaatatcctttgatttttctccttttgacatcaattcccataagaagaraatcactggttttatctaacttagtggaccactttcaggatgagctagtgtgtgaagcctctctccttgtctgcctgtgccccctccaaccatccatggtaaggagtgaatgctttaccaagcagaagtaaaaatatatttggccaggcatagtggtgagcacctgcagtcccagctacttgagaggttgaggcaggaggatcgcttgagcccaggagtttgaggcagcagtgaactatgattgcaccactgctctccaggctaggtgacagagtgagaccatgtctcttaaaaaaaaaaaaaaaggtaaaaaattataaggtcttttttttttttcgtttgagcagcaaggtaaaaagacaaaaggtgtttcattggcaaaactgtcctactggtggtttggctgttttttcccttcccagatgaccaactccataacaaagtaactgtacttctagatagagacacagttacaagtgagagaatccaattcaaaccagcccaagaaaattcctaagggaattggcttgagtagctgggaagtctgagactgggtatagcttcaggcccagctggttggcctgcactgcaaaggcctggccctacctgaaccatgtggaatggactccccccaggaagagggagggcctctttaggaggaaaggtgctgagctagcaaaagtgacagctgtccacagcagtaactaaagacgtttcctggttcagcatgtagcacatatggtgcgtatattgtttttttctccccaaggttattgttagaatcaagggattgcaacatcacagcattcttgcttggtcatgaagcagactgccggaatgtatcggctttggttcctttaatgtgggtctgyaatgaggctgggagacaagtggctggttctgtttcttgttttgcctctgtgtcattctatcatgatggtcactatgtaacaatccattttgtttgtttgtttgttttgtgaggtttcattaggacaggataatataccatacataaacatgatgaaagtaaatgatcataaactctaacaggatttgaatgaaaagtcttctaaatatggctctgaggccaggcatggtggcgcctatctgtaatcccagcactttgggaggccaagacaggagaatcacttgggctcgggagttcaagaccagtctggacaacatagcaagactttttctgtactaaaaataaaaataaattaagaaaaaaattagccaggcactgtggtatgtgcctgtctgtagtctcagctacttgggaagccgagacagaaggattgcttgagcctgggagattgaggctgcaatgagctaggatcaccccactgcacttcagcctggccaaaagtgagaccctgtctcaaaaaaaaaaaaaaaaaaaaatatatatatatatatayacacacacacacayatatatatacacacacacgtgtgcacatatatttgtatatatatatatattttgtgtattatatatattttgtgtatatatatatatmcacacacacacgtatagttctgagtgtcatattcttaggactgcagaaattggctgagacctcatcattcatgtcagaaggtctaagtgcaatacttcttgattcatggcctgttagaattgccctggatgtcagatgaggggctggatctccaatggcggggagtagaggaggcctccggtctctcagggaatcagaatctgactgttctccactgcagatctttaatcagagcttggtggcaaagctgacacatactcagtccacccccagctaggcaaarcacagaagcatgactgtcttctccaattttctctgctccaggataggctcagacaccttccagagtgttttgtttcatgttagatttgtctgtcctctctcctctctcccactccccctgcacacccagcctctccctgccagccattagaaagctttgtctcaagggcagtagcaggagcatggctcttggtaaccataggcaaccatgaatccctattagctatttgtgctatatttgtaaggcacattccggccactaactgggtagacaggaaaatgtgctttaaaggttttcttgtgyggtaaaattgtctcccttttttttcttcttttttgcagaatgaccagtccatgggtgagatgcagataatcggaggcgatgatctttcaacgctggctggaaaggtttgttcatgtaactgtgctcagaccgcattgaggtctgggggcatcggtgacctgcatttcaggtcagcactcacaggacatttcagacatgctcccgggttttccaattcatacaaatggctgcgtgaatccttttaatgatctcccctttctaaaacattctttttagaatgcttccaagacaccatgcagaccaaatctttcttctccgagcttccttccaatcttgtttcagacagcaaaacccctttgcccaccttgttctaatccttttctactcatctttccaggcaccttctgaaaaggaagctttccctttatttattcgtctgccttttttttttttttcatccatcctctgcacccaggcacgtcagtaagacatttacacaggttcattgacaagtacaaaatctggggarggaagagaaaaggaactcttaagagtgcgttttcagcactttgcctttttttctattaaaaacaatgtaaactattagataataggaagaacacctccagttttaacttggagttccaaatctgccagtgcttaataattaagtgaaaagactgtttagatctgacagaaatacataaactggaaagaagagttgtttcctaacgaagatgatgttcgtggaatgttacttgaaatgcacatttgctgtgaataaaagcaatccggaatttgtttttgttcagccgtactgacctagcttgtattccttatccctgaactgcttggctttctaagttaaatggattagtctattacacaagcttaatctctcatacttgtgcttgttatcgttatgcaatgcccgggtagggaaaaaaatagcagccacatttcataaaaatatgtgtaataatcataggatggctatagagccacaaggactttttttttttttttttttttagacagagtcttgctctgtccccaggttggagtgcactggcgtgatctcagctcactgcaacctccacctcctggtttcaaatgattcccctgcctcagcctcccaagtagctgggattacaggcacctgccaccatgcccgggtaatttttgtatttttagtagagacggggtttcaccatgttggccaggcgggtctcaaactcctgacctcaagtgatccacctgtttcggctgcccaaagtggagccacaaggactctgactacaaaacagtgcacttccctctactctgaagacagcatagtagatctatgtgttaaatggctatctagcagtaaattgtgttccataaaaatcagaattaacttgttgctgttaatgcatcactaagccaccatttgatgttactgttacattggtgcataaaacaacatcctagaaagctaaaatactcaaagtaatttccagaaattcataagttttaacgaccctggagtggtctttagctaatacgtcattttagcattttattgtaggacactgccttacaggtttattacacaaaagaaatagtttaccttgtgcttttgctatggagtctgtcaaagtgacaactctaaaattcccaaatgaatgccaagaagaaatttgcacatagacggctgggcatggtggctcatgcctgcaatcccagcactttcagaggccgagatgggcagatcatttgaggtcggaagttggagacctgccaggccaacatagcaaaaccctgtctctactaaaaatacgaaaattagccaggcatggtggtgcacacctgtaatcccagctacttgggaggctgaggaagaggatcacttaagctcaagagttaaggctgcagtgagctatgatggcaccagtgcactccagcctgggcgacagaacaagactctgtcccttaaaaaaataataataataatctgtatatccataccttgtttccactagagccctttccacaagttgcaatgtttaccttagggcttattttttatttgcctgtctccccaaccaggaagtcagcatgaagtgggcagagaccatacctggtccataacaaattggaataaatatttggtgactgaacaagtggatggtcctcttatatagaaattagaaagaagtctttgattagtttggggtaagagaggacagggcagagggaaatggtaaataagcccacatggtcacacccaaggacacacccaccagctggttagttgagaggtggagagaaaggtgctgagtgagggaggagcaccctctttgttgaggcagaaaggcttcctcataggagattcaacggggactgaggaagtgaatgcaacacagctgaggtggaacagtgaaaaaaatttcacttagcttttaaaatttccttttccttaaaaaagataaaggccttccaatatgccttggcataacaccaaataaccaccagaagtagccagagcccagtttgagcatcacagttgtaaatgttttagaagctatttctggcatgagtcaacggatcatgtaggtagaggcaatgtattgtttgtggagtttttcagctgtaggggaactattaaaatccatttgtttccatttgataggtaataaaaatcattagttgtcactgggtttgggaaacttaaatgcccattacagccctggggaagggtttttggtcttatggagtgagtttgttagcatttacattatagttgctgccttaggatagtaggctgmtacaatgacttctttgggtagccattttcataagaaataaaatacaagatatgagtaaggttaaaaaaaaaaaagataaaggccttcatatgacccacgctgttcactcattcttcattcagcctctccgtgaaaggttatcaattaagttagatagaacaaataagccccactattcaatggcaatgtagagcgaygatggttaacagcaatgtgttgtatatttcaaagtagctagaagacttgaaatgttcccaacacatagcaataatagacagtcaaggcaatggctaccccaaataccctgacctgctcattacgcattccatgcatgtaacaaacactcatgtactccgtaaatacataaaacattgtgtatcaacgaaaaaataaaatttaaaaaataaggattggcaagattttagaaataagttttagaggctctccaaaatcttcccatcatgcagaatatacactagctggaaaaaaaaaaaatgtaaaaggaaaaggcacccaacagttagtgggtacttgttttaatgggtgtagaagaaagtctgaaactgcaataaatatctgcagtggatgaaaggattgttgaggccaggagtttgagaccagcctgggcaacatagtgagactgtgtctctacaaaagaaatttaaaatttaatttatttaataatttaaaatggtggtgcacacctgtagactcagctactcaggaggctaaggtgggtgatcacttgggctcaggaggttgagrctgcagtgacttctcctttctcctgtagtgataatacaatttgtcagtcattcagtaaacttacatttaaagtacatttatcatcatgttattactctgccaggaatttgttcccaggaaacacaccttctcttatttcatgcttggcactctaagaagagccccataggtctttccatgcaagactctttccttggatttaaagaaatccaaagaatgaaggattccttaggattcagatagtcttagagaggggagggtgagcttttacctggaatagaagggtttgtgactaacacagaaaagagagcaagggccccccaagggcaacagttgacccccaagcctcaaggtactcctccatagctatcactgtcatgtacccaaaaccaacgatcattccctccaaataaatttaaaaaaccattaagccagccagccacggtagctcatgcctgtaatcccagcgctttgggagactgaggcgagtggatcacttgaggtcaggagtttgagaccagcctggccaacatggcaagatcccggtctctactaaaaatacaaaaattagccagacgtgatggcacacacctctaatccaagctgaggcaagagaattgcttgagccctggaggcagaggttgcagtgagccaagatcatgccactgcactctagcctgggtgacagagcaagaccctgtctaaaaaaaaaaaaaaaaaaattaaacctacaaaaaccccaccaaaatttaatacaataccgcaacctatcccccactaataattagccctaatccttcataaataggtgayggctttgaagaaaattccacaaagcctacaacaagaataaaacttaataaaaataaaaatatggaatggggtaatcgagaaaagagtaggatcactggacataagtggaccagcatgactgaaggaaattaatcaaaaacagggaagtagtaggaaaaaaaaaatgaaaacacggggtttgatgtgtagaatacattgaaagtctcaatgaagagctgaacttgctcagcaaagcaaacaggagacacaaaagtatttgagcagagatgacatcatggagctgtgttttaggaaaatgaaactgacaagagggaagaatggctgaaagagaggagagagcagtttggaggcggggtaggcggagcctgcaggagcacttgaactacaggagccaagttagggtggaagagaaggaatcgtggtatcaaaaggagccgtgacagagttaaatgaaggagggagggctagaaaggattttttaaaattaaatttgtgtatgaaagaactctataaaacatggggaaatagctcacctacataatcttgtcatgctgtgagttagaggcattatgaacccataactgtataatacttctggagcccttgaagacatgggattaaaatatttagaaaaaaaggagactctacacagccctctctctctctctctccctccctccatctctctttttctttctttcttccatttctttctccctttcttttttttaaataaaacattttttactttgaaccccgagaaactacctttctttctcatctcttccttgctttttttgttctctttctttctctcttcctttctctctttttctttctttttgtatttttttgctttttttaaaattcctttctctctcttcctttctctctcttcttttctctctctctctctctctttctttcttttcttccaaggaaaggaagctcacaagggaagctgtctgagtcatggttctaaataggtcattgctgttgaataaagtgagccctcaatgattaagttaaatggcctcttcagttcatgatgttaaaagcattttattcggtgtgtttaagctgtctacacaatgtactctctggctgattttttttccaaagttgatttaatattggcacttcataaaatgtgtgtatctattaaagtaagattttattcatattcacgaggaacctctgaaagggtggaataaaacaaaatgcatggaaacagrctcaaatctggcaccatgaaaacacagatgtgcaggttaagcccaagattttgggagacatgccccccaaacctgccctcaaataagttttyttttcttttytttttttttttttttgaggcagaatctcgctctatcgcccaggctggagtgcagtggtacgatctcagctcactgcaacctgcacctcccasgttcaagcgattctcctgcctcagcctcctgagtggctgggattasaggagcccaccaccatacccagctaatttttgtagttttagaagagatggggtttcaccaagttggtcaagctggtctcaaacttctgacctcaagtgatccaccctcctcagcctcccaaagtgctgagattacaggaatgaaccactgtgcccagcctaagattctaattaaatgccagagtgaagcatcggaaactgccaaaagttcccccttggctgccttaactgtttaaatcattctttttttatttcatctgactaagctgagaacaataatggaaagacccactgactgatgattctggaaattttgtgaattatcacataaaacgaaatgctaaactacattcccttttccatggggtttatattcacattcctactcattctccatatccccaatacagctcattgtcactgctgccattgctcttgattagtgtgatcacggccaccaaactacactgctgcagatgagacggtgtggtgtgcaaatcactgtgtgctctaaaatactagaagtaggaataacctatttaagaatatcatgtaggtttgtgcaattctttcctcccttcttttcttctttcttcctttctttttcttttttgttaggaaaccccttgtgattagttttgatcagaatcatgcaacagcaaagaaagcacaccccagagattcctcatagagtttttgcctgcagctcctaggctgcagattttactggctttctgggaggaaatgagctaggtgtgatgagatgactaagacagtaactggcaaacatctcagatgcagtgatcagagttatcagattggaagtgtttaggaggcatggtgtgtactgaaaagagaagttgcccactcaaaaaacctgaattttaggaaattgcttagtgcaaaattaaaagcaatagacattgataatagcttggttaaggaggaattgcagattgttaaggaaaaatggaggggatgaatcagaaatacaatgaaccagagaaagtgaaagaaatgaggtcaaaattgttgattcactacacaggtatttcttgagtacctactagatgccagtctccatgttatgtatttttgttcgtttgttttgttttgttttgttgagacagagtctcactctgtcacccaggctggagtgcagtggcacgatctcagctcactgcaacctctgcctctccggtttaagcaattcttgtgcctcagcctctcgagtagctgggactacaggcgtgcrccaccatgcctggctaatttttatatttttagtagagacagaggttcaccatgttggctaggatgttctcaaactcctggcctcaagcaatctgcctgtcttggcttcccaaagtgctgggattacaggtgtgagccatcgcacccagcctccatgttatatattgattatataaagataaatagttttggctccttagctctttgagctaatcttaggcacagccatatctcagagttattgtggatttggtttcagatcaccacgataaagagagccacacaaattttttgatttttcagtgcatataaaacttatgtttatactgtatggtagtctactaagtgtgtgataacattatgtctaaaaaataaggcacataacttaatgaaaaactacttcattgctaaaaaacaatgctaatgatcatctgagccttcagtgagtcatcatctttttgctggtggagggtcttgccacgatgttgatggctgctgactgatcaggctggtgggtgcttcagaaggttggggtggctgtagcaatttcttaaaacaagacaacagtgaagttcactgcttagattgactcttcctttcatgaaagatttctctgtagattgtgatgctgtttgatagcattttacccacagtagaacttctttcaaaattgaagttaatcctctccagccatgctactgctttatcaactaagtatatataatattttaaaccctttgttgtcatttcaacaatgttcacagcatcttcaccaggagtaaattccatctcaagaaatcacttcctttgctcatccataagaagcaactccttatctgttcaagtttgatcatcaggttacagcaattcagtcacatcttcaggctccacttctaattcagtttctcttgctattgccaccacatctgcaggtacttcctccactaaagtctttttttttttttttttttgagacgagttgttgctctgtcgctggtgtgcagtggcatagtcatggctcaccacagcctctacctccccaggctcaggtgatcctcccacctcattttttgtagagacagggttttgccacgttgcccaggctggtctcaaactactgggctcaagcaatccgcccacctcagcctcccaaagtgctaggattacctgtagcagccaccgcccttggcctctccactgaaaccttgggcccctcaaagttatgcatgagggtcggaatcaacttcttccaaactcctactcatgttaatattttgatctccactcatggatgatgaatgctctgaatggcatctagaatggtggatcttcaggttttcaatttactttacccagatccatcagaggaatcactatctatgggcagctatcaccttacaaaatctatttcttaaataataagacttgaaagtttaaatgactctatgggctgcaaaatggatgttgtgttagcaggcatgaaaataatctccttgtaaacatctccatcagagctcttaggtgaccaggtagattgttaatgagcataatattttgaaaggaatcttgttttctgcrcagtaggtctcaagaatggccataaaatattcatttcaataaaccatgctgtaagcatgttgtaagcagatgtgcctatataaacaggctttgctgctccatttatagaacacaggcaaagtygatttagcatcattttaagcaccctagcatttttggaatggtaagtgagcattgacttcaacttaaagtcaccarctgcattagtccctaaaaagagtcagtctagggggsgtcacagtgactcacacctctaatcccagcactttgggaggccaagccagcggatcacctgaggtcaggagttcaagaccagcctggccaacagggtgaaaccccttctctactaaaaatacaaaaaaattagctgggcatccggcgtgcacctgtaatcccagctacttgggaggctgaggcaggagaattgcttgaacccaggaggcagaggttgctgtgagccgagattgtgccactgcactccagcctgggcaacagagcaagactctgtctcaaaagaaataaaataaaaacaaatagtacattaaagatcgctgatcccagatcaccataaccacaatgacaatgaaagtatttgaaatattgcaagaatttccagaatatgacacagagacacaaagtgagtacacactgtcagaaaaatgacaccaatacacgtgctcaacacagggttgccataaaccttcaatttgtaaaacagaaacaaaaacaaaaaaaaaccacagtctctgtaaggtgcaataaagagaaatttgggaggccaagaggggcagatcacctgaggtcagaaattcaagaccagcctggccaacatggtgaaaccccatctctactaaaaatacaaaaattatgcatgcgtgatggtgcacacttgtaatcccagctactcgggaggctgaggcagtagaatcacttgaacccaagaggcagaggttgcagtgagccaagatcgcgccattgcactccagcctgggcaatagagtgagacttcatcacaaaaaaaaagagaaatgtaaaaaacaaggtatgcctatactgcaaaagagactgttctaaattaaaagagaagggaagatccaatccatggtataggttggataaaccagctacaaaggccattttaaggacaactggggaaatttgaatatatagtaggctttatatgatgttaagaaattatcatcatttttgttggatgttataatagtttggctatacataataaagaattcatgatacctttaatctattttaaagcacataaaaattttatatactttaaacagttaagcatgtatcaaaaatttagaaagtctttagacttttctggttttcaagcattttataatgttttatatttatatattatagaaagtacaaactttctttgacaggtatatatttatatgtaaggaaatatrtgcactttctataataagaatgaatacacggctgggcgcagtggctcatgcctgtaatcctagcactctgggaggctgaggagggaggatcacttgaggccagaagttcaaggttacagggagctatgatcgagatcctgtctctaaaaaataaaaataaaatttaaaaatacgcatttgtacttaaaccctttttaagaaacaagcaacctaaaagtcaataaatgatttaaatatgtttttaagtacagaaatagctatgtgaaacatgactaagtctattttttagaaataaaaaagtaacaagcagaaaaacagctaaaagagttaaaagtgactgtctctgggaaacaaaattgggagcaaacagaggtgaagtgatggaggggtgtttttcttttaaaaacctttcaatctatttgatttggttttttgtttgtttgtttgtttgtttttgttttttgttttgagatagagtcttactctgttgcccaggctggagtgcagtggcaccatctcagctcactrcaacctccacttcccaggtgcaggcacttctcctgcctcaatctcccaagtggctaggactgcaggctggccaccaagcccagctaatttttatattttttggtacagaaggggtttcaatatactggccaggctgctctcgaactcctgacctcaggtgatttgcccgcctcagcctcccagagtgctgggattacaggtgtgagccacggcgcctggcctcaatctattttaaacatgtgtatgcattaccttgatttgaagatgtatttgaataattttgacagtgtctttcaatatctctcaatatcagtatacatccaaatcctacttcccacttaccactatatcttagaattgaagctaatcttttcaaagatgactctattgttttgcaaggttctgtactgtcaaaaaaatatttaattacattcaacacatacactctacttaattaggcaggaatgcagactaacacattttagaaaggtttttctttttaaagttgaaacaaaaagagattgtgagccagaaaattaaattaaccacaacattctccaagtattctggttggtttataggtctgattggtaagcgtcaatcaaactaaaaatgcacatatcaagtaactactgcaaattggttgttaggatcatagaaattcttgttgaaaataccaagaggactcccctggcagtatgactcttgtattttttgttagagaaggggtttcaatacactgaaatatactgaaagagtggagggtaacgtggcatgccctgcttcaaaaatggacaaaataatcttatacatttccatgataaaattaagattttcaatggatttaatgaataaaaatgtcataactgacagaaaaacacttccaagaagttattttaacataagaatgtgtttgatatacggtgcaaagttaacagagttgttggtcggctggtttggtggttgggtggttaacatttttattaattaaatcttgcattaaacataagtaagttatcgaatgtgtagtatttgatctgatttttctttttttcttttgagatggagtctcaccctgtcatccaggctggagtgcagtggtgcaatcttggttcactgcaacctccgcctcccggtttcaagtgattctcccgcctcagcctcctgagtagctgggattacagtcacctaccaccacacccagctaatttttgtatattttagtagagacggggtttcaccaaattggtcaggctggtcttgaactcctgacctcaggtgatccacccacctcggcctcctaaagtgctgggattacagacgtgagccactgtgccaggccatgattcttaaagtattgtataaatcatagagataaatgaaacatcatctraagaaagagaaacaccattacgttgaaaggatagtctcaccatttagtaaactgggatggcatattaacagtcatattttaatttggtggggcagcattaacatgtcactgctaatccaattaatcagtcagttttaactcagtaataagtttaatcagttattattgctttattcaacaaataattattgagcatttatatgcaggcattatgctagtttctggcaatgcggtaggaatcaagacaaacatgatcccaacctcatggagattagaatatagtggggaagacagatatcaaacaagaaattaaaatgcagtacaatcatcgtgtattagtccttcctcacactgacataaagaaatacctgagactgggtaatttataaagagaaaaggtgtaattggctcacagttcygcaggctgtataggaagcatggtgctggcatctgttctgcttctagggaggcttcaggaaacttaaaactgtgacagaaggtggctgggtgtggcggctcgtgcctgtaattccagcactttggaaggccaaggagggcagatcacttgagctcagcctggccaacatggtaaaactccatctctactaaaaatacaaaaattagccaggcgtggtggtgcatacctataatcccagccacgtgggaaggtgaggtgggagaatcgattgaacccgggaagcggaggttacagtgaacggagatagcactactgcactccagcctgggtgacagagtgggaccctgtttcaaaaaaaaattatggcagaggcaaagggagagcagcacttcagatgtctggagacagatatggagmaagagaaagagggggaggtgtcatacacctttaaacaaccagatacaacaccaccaaggggcatgatgatgctaaaccattcatgagacccacccccgtgatccagtcacctcccaccaggccccgcctckagcactgagaattacacttcaacatgagatttgtgcagggacacagatccaaaccatatcacagtgttcttaggggagaggtagaggaatgccttgagagcttgttgcaaagaatctaaccagctcgctaaaaatacagaccaggcacctcccagccctttctctagcctaccctcttcatctaggttgacaatccaagaggaaatcctgagtccccagggattttcgtggctgtgcaagagtaaggctgtcacagctgaacccatgatgcatttaccgagcacggtctccattagcaatgcagttcatgttgcattgttttcctggtaaactctcaacaggctttgcctcccaagggaatgctgggggtgggaggcccttggcagaattactgaaatgggatgactttatggagagctcgtcagacaggtctaagataagcttgcttctaacctaaatatagatactaatattgcaccaccaactaattccagaggacctgttaaaatgaatctggaaaacctagatcacctctagtcctttgaattagatggatggggaaggaccgtctaagtaaattgtgaaattctaactataagcaaaaaaatgtgtatgtatcctgtgagtcagattggcatcacattctaaaatatgggttttgtttatttcagaatgttctcattgttgaggtaagctggcatttccttttccatacttggagkttgaaagaatctaatggtgagttttaaacggtaaaccttgttatcaaattgaccaaggatttcttgagctcccactgggtgcatgctctccaaatttaatgaataggggccagatagcgtccctgatttcaaataatgtagaataaaagctttgcaacagtatttgtgggcgactttatcctttttgtgtatccagttccacatatctctgtgttgattcttatacttctttgtgaatcagacaactttaaagaagaggaaactagctcactgaaccaaattcatttcacagtaaaaccaaggttagaactctgtttaccctgaattcagtgtctttgctaaggacctctgatgatttcaagaattctcaaatactttcagcatcaaaatcataaacacaatcaattaaaaatgacgagctatggggaaagctatgtttttttgtttttcgtttttcgttttttttaacttttgtttttctgttaaaaaaaagagagaaaagagaacgtgggatccctatggcagtagtggactaatacagcaaatggccacgtttccttcaggagcacgcttgtctcatcaaacagcaaaaaattcaggggagctgttttcaaccttttgttacacaattgcctgtgtgcgccatgtgcatctggagttcttgctcagtataacccatggagtagaccctctaaccaaatgaattgcccaaccctggctacattcagacctgttgttttgataatcagctcatgacagctgattcctgtccttaggacaataaatcgccrctgcccattctcctctaattgtgcagcagctcatcagcagagatgagcccgagctcactgcagccgtggaccctcagaattcacaggctgtcaccagctgctgtccagacacctctcacttcccagccatagaatcccccattgagtgggggaggacaagggggaggtttttatccattcagtgtattcagatgtacatatccatgaaaattcatgtgccttgtattgtgttacataaactcagggccaaatttagtccttgaatgtgcagacacaagtccaagtgtactcaacgaggagtcctacatgctgtccaaagactaaatttggcccttcaacacagctaaaggattcaaggaggaaagagtctccagtagattccccaaaactcagcttccagaaagaagcgcctgtctaaataaaacataaccaactcttcctcctactgtggctccaaattggatggcatttttaattacgatgcattattaatcaggagtatctccctgggtgaaaagtctattgtgctgctcaaatgcattttgttgaatktatctgtcctttttgcaaaggatgttgtcggaactgggaggaccatgaaagcactactcagcaatatagagaaatacaagcccaacatgattaaggtagccaggtgagttggacattcatagcatggtgatttctagttttccaagcaagcccaaaagggatgctaacacaggatgctctttccaaagagtgtaatatattccaaactagtgaccttttcccctggggtattacagcttgaccacactgaaaaacagcccttgactgctagcctgagagaagtaagggaagaagacgtgctttgccgtgtttctgagttcctctttactgtgcctccattagctgtttccaggagcagctggatgagcccccgtgcaattgctccgctcccttcattttttttgttctttgtttgtttgttttgagacagagtcttgctctgttgcccaggctgggctggagtgcagtagcacaatctcggctcactgcaacctccaccccctgggttcaaacaattctgatgcctcagcttcccgagtagctgggactacaggcgcctgccactgcacccagctaattttttgtatttttagcagagatggggtttcaccatgttggccaggctggtctggaactcctgacctcaagtgatctgcctgcctcagcctcccaaagtgctaggattacaggcacgagccactgcacccggccctttttttttttcttttttattctttaatatgagacagggtcttgctctgtcgcccagcccaagctggagggcagtagtgtgatcataactcactgcagcctcaaacttctgggctcaagtgatcctcccacctcagcctcctgagtagctaggacagctaccttttttttttttttttttttttttttttgagacggagtcttgctctgtcacccaggctggagtgcagtggtacaatctcagctcactgcaacttcaccctcccgggttcgagcaattctcttgcttcagactcccatgtagctgagactgcagacacgtaccaccatgcccagccaatttttgtatttttagtaaagatgggttttcaccatgttggccaggctggtctcaaacttatgagctcaagtgatttggcctcccaaagtgctggaattacaagcatgagctactgtgcctggctgacagctacctttttaaaaagtttttttatattttatctrctttttgagacagggtctctttctgtcacctaggytggagtgcaatagtgcaatcaaggctcactgcagccttcaactcctgggctacaacaatcctcccacctcagcctcccaagtagctgggactacaggcaggtgccaccacacccagctaaattttttaattttttgtagagacaggggtctcgctatgttgcccagactggtcttgaactctgggctcaagtgatcctcccaccttgtcctcccaaagcactgggattacagatgtaagcactgtgcctgacctgctgtcttctttttatccagaaccatctatatagtgccacagtagcaaaayatgtatttcaagtacatcttttaatgatgcttgattctatttacaattcatagagatttgattgggttcactaaagcatgtcttttttaatggtagtttgttggtgaagagaacatccagaagtgacggctttagacctgactgtaagtgtttttcagttttttgtttgtttgtttgtttgttttgtgcttatggtgtttcattttatgtttaagaatctttggtttcctatttgacagcattgcatgtggatttgaaactgtgtagggctgatagtcccacggattcctcatgatctccccmaccttgatagggaaaacagaacccttcaaaatgagggtcttcaatgttctaatttgcatctttcacaggaactctgttccgtgcattgggtatttttatttgtatgtttcacacagcaccttaactacagagaagtcagctgaaaagtttcagggagtagaggaagacctgatcccgctggactgactcagacacrtaggatccccgccttggcctctattctcaccagtcagacaaggagaggtgctatggaggtttagagggattsttatgccatcatccggaactattaccagacaacgcacaatggtgacctttagcaagcctgaattgtaacgcacagaaggggaaatctaagacagctccccttcacctccaaaccaaagctccgtaacacagagaattagcagagcaggtatctctagataccatcttcacacttgacttcagatgtgtgttctctagggcttcctcatctaggacactctcctcccttctccccataataagcctagttctaacaccaagaaggataaacacgcagcctaattatttattattctaacactagaggcgattttttttcacttgcataggcagacttcagcttgatttttataacttacatttgctccaaagctcctgggataatttggctacagttctcttcagcaagctgaacaaacattagcgaaagagaagtgcagtatggatgggtgacatgccagcgacatttagccagtgactctacattctgaaaacaagtttcatgcctgtgctggatgtgttaactctggaccatgtcagttctgggcagagagacccaatcgcatgttctcatctattactattatcaaaggtataatctggatgtagtcaaggttgcatgcggttactaagcagaaattgtctaaggaaatagtacaggatactcagtgtataaataagattttaactgaagttgaaaaacattcacttcaatgacaaatttcttatatcacttataataacagcaataaaataatagcagctaacactaggaagaggtcgtgatgtgccatgcactattctaagagctatacagagattagctcatttcatccacacaatagctctctaaaggtaggagctgttgttgtacctattttacagatgaggaaattgagcacagcaagcttaaatagcttgccaaagtcatgtagccatgagtgtcaggccaatattaagcccaggcaatctggtttcagtcactgccctgactcttccactacatctgcaagtaacatctgctattgcaaatgtaagtgtaggagctgcctgcatttaccagctaaggataggtcactctgattcatgattgtcctgctgatccatcatccttttattctatgacatctcaagttttggccttctaaataggctttgggctctcattttcmcagtgtgagttgccctgcctaatggaaggattgcattgctccctataaagtcattattataaccctggttacaaacagggtttcttgggatttgctcatattattattattattatttgagacggaatctgactctgtcgcccagtgcagtggcgtgatcttggctcactgcaacttctgcctcccaggttcaagtgattctcctgcctcagcctcccaagtagctgggactacaggtaccaccacacctggctaatttttgtatttttagtagagatggggtttcaccatgttggccaggctggtcttggactcctgacctcaggtgatccacccacctaagcctctcaaagtgctgggattacaggcgtgagccactgcaccttaccttttttttttctttttgagatgggatctcactttgttgcctaggctggtctcaaactcctggcctcgaatgatcttcctgcctcagcctcttgaatagctgggactgcaggtgcgcacccggcttcatattcttttagctagctcagaatctctgttccttctttctctctggatttatgaggctttgtactttgcgttcctttctcctgattgattctttcttttctcctcaatgtaacttctgacctcttctgctcttgcttctcctctcttactctttttttcaagaaactctgcagtttggaggaatcaagcaggcttcctagcaagggactccataatgcaaccccctagaaaataagtccctcacctctagtacttattttcctagcaagggactccataatgtaaccccctagaaaataagtacctccagtactttctatgagcatgaaccagtcgttttcttcttgtgaaagcatcgttggtcatagtcactgtggagatgactttgcccaggctataagcccactggctgtacccaagtacacttccattaaaagtaagcaaataaatctctcatctataatactgtaataaacaaacctgtaagattccaaaacactgaaacaagtttgaaaatcactggaccagtgcacctttattctgtttcaagacttctgaagaaggagagctattgtctgttccttaagaattctctccaataagtattagccaggcgtagttttgcatgcctgtagtcccagctactcaggaggctgaggtgagaggatctcctgagcctgtggaggtagaggctgccgtgagccatgatcacacgcctggacaacagagtgagaycctttctcaaaaaatagccaggttcagtggcccatgcctgtaatcccagcactttgggagactgaggcggatggatcacttgaggtcaagagttcgagactggcctggccaacatggtgaaaccccatctctactaaaactacaaaaattagcctggcatggtggcacacgtctgtcttcccagctactcgggaaactgaggcaggagaatggcttgaaccctggtggtggaggctgcagtaagccaagatcgcgagactcggtctcagaaaaaaaaaaagaatcctttctgacaaaaaatcatcatcttttcaatgaatcttcttttgcttttcataagtaccttgcactgtgcttaaatccatttcctctcattctgccctcagtagggagctcattaatatcctctgcatcatgaacccaaagaccagcattaatgcaacctccacattctcttcctcaagttgaacaatcccgttgcctttcatcttgtgtcctggcttttgctttccagccctttaaacagccaagacactgagtacagcgggagaattgctttctagttgctgtggcccgcgcacctgttcacataatgcagcgtcgtaacgccttctgcttgaactttcctttgtgttgttgagagtgtttcctttggcatcgtatcactgcatactgcttgctttagaacaccagggccacgtgactcaattatgcatatttcttgttatgcaccaggcttcctgagccctttctcaactctgtatgctagatcagtcattcttcattgtaggttggcttgtttgccttgcctccttcctcccgagtagtccttcgggtccaggtccctcttgggctcatcgtgtgcatttctcaccatttctcactccctcctgcctcaatgaaaggtcctcaagtttgagtggcgacagcagcatatggtgacttgcatttatataatctaaattttgttcctttttttttttctstttctctgtctgctaagatgctggatttgagattccaaacttatttgtggtgggatatgccttagattacaatgaatacttcagagatctgaatgtaagtcttgcatgcaaatccctaaccgccctttttataagaacttaacaatttaaaaaagtattgaatgcgtgttagtgatgtctgctattgattgagtatcttctatgtcaggagtatggtgagcacattgcatccatactcccaattaactcccactactattctgcagggtaggtatcaggatgatagaggcaaattatgattatctctattttgtactaaagaaataggaagctaaaagcagaactatggtttgacactgattcttctccatagtcattgactgtgcccaaccaaccataacaatagccaatattctatacactggtttgtgtcagtgcttgaactctagcaggtttcaattacagtggcatgcagctcataactcttccctctttgggggaaatgatctcaccacacagacgtggacccccagtgtggaccccagctgtgtgaccctgaccaacactgcatgatctagaggtagacaacttacccatagtggaccaatcagtctctctgtcctgggaattagaaatttaaaccaaaagtcacagagactgagtgtgttcagacttcaaccactaggatagcagtgcccccagagagtatccatagcaccatgggtgaaagtctctggagctgcccttgttcctgccttctagttgcttcattgcccagctcatccttggattctgagagctaccccagtattccaccaataaattccccctcccccctctttaaagacacagggtctcactccacagtctcacctaggctagagtgcagtgacgcaatcatagctcactgcagccttgaactcccaggctcaagcgatcctcccgcctcagcctcctgagtagctgggactacaggcacacgccactatgcctagctaatatttttacttgctgtagagatggggtcttcgtatgctgtccaggctggtcttgaactcctggcttcaaatcatgctcccacctcagcctcccaaagtactgggattacagacaggggccactgagcccatccaaatcctccttttttgcttacattagcctggccccatttctgttgctttcaatcaaaatattcctaaccctttgcttgttgcccaaaaagggttgaataagagcccatgttgtgcttgccactgttatttctccattcacccaagcagttgtcatcttaccagtaggagacttctgtttctagcagggctaaacatacagctccctcagcatttctgggttttagggacctggggagccggattcagaataggaatctccaaactaaaccacaaaggaccttttgtcaagcacttgaatgggtctctttagattttacccacacatataaatacacacatttctatttaaatgatcaatagccaattacaggatggcattcggttattactgcatcaccttttctgtgtctcatattttgttaagaaactgatgcgtttaaatcctttattgtttcagcacatatgygtcatcaatgagcacggtaaagaaaaatatcgagtctaaagacatgaattctcaccactaaagtcccagatagcatcatatttacgcctgtacttgggaagccagctrtcaagtttgtccccccaggcatcttcactcagcaggatataaaagaaaaaaatgttcaaatgagagagctttcttttctgaggttaatataaagagtatcaaaggttcctaaggaaaagaaagcagtgcttttatttgacttgttccaaattaaacactccgccttgtgactcagcaatgctatctaccttcacactcctgagctccgccttcctttgttttgatacagtcattatatttgattagtattcccaggaatacccccacctagttactcaaatatttttcacttaactttttatactcttattttggtaataagcttacaatattaagaagctggggacttttttttaactgaagacttgagtcccctataccgggaatgcagctattaatagattcccatattttaaaaggagggaaaggacaatttaatataaatttctgtttgtgcatttctgacaggccattattatctgctttgacaaagcctttctgaaacgcagtgtacaatgaatcttaatgatgttatgaaacgagctttgctcggggctcttgattggagcttccggtatgtgatgacggtatgtcatgtatgcatggatgtactcaactgtgtttaatactctgaattttaattagaaaaaaatacaatagcagcaaggccctggtttctaagctgtatccttttattcatgtgggacatgagcaaatggcagaattaggggcgagtgctttcaatgctcgaaactaagcaagtataawtttttcctcttatttgcatgaaaggacaagacactgttatgccctgtcctaaatgtgaagacagaggttgaattttttaaaaaatatctttaaaagactgatcacaaaatccaaggtgctacaggaaacaagcacactcaagaaagtttttttctgaataacakttttttccaatttctccgttttataagacatttcctaatttatggggattttaattgaaaataaacttgagtcccaatagagctgtttttttctcacttcctacaaaatgcaaatgcaaaataaataactaagcagcttttgtttggttctgaaccgtatgtggcgtattgttattaggttctagcttcctttaaactaataaagaataagaaaacttgttatgttttatcacttcttactgtttttcttccgcctccatattttttaaatactttcagacattaacatgtatgtgagtcagtagcttaaatatacgactgcatgtatctatcctgcggctttatttttgttaacttggattaaatccaatatatgcactagtagaagcaaatgattaagctgggctagatctgctgcttttttttttcctcaagctcgtttgtgagaacaaggaattttagttgtaaaagaagattttcctgcatatctttgtttcggtcagagaagaaaacaagccacacccaaatatcccaagggataagtctgcaaaaggaatctcttctagctttgtttcacagaagcattggtacccaagcttagatttataattgtgtctgactgacgaatttcttgaaataccaaaattaacactctgaatatagcttttttttcacaatgccatgtttatgtcagaggacctagaaaaatccaggcacacatttggttttaagtgtaaaattatccataagtatgcaatatgaaaatgttttcttaaaaacgttgaattttagtaagcatcagtatcctttctgaggacagtctgtttattcaaattagaaaggagattgatctacctcacaagattgtgaggacttgtatagttaatgctgaaaattcactaaatatgcaagaagtttaatcatgcttgcagttttttcctaccagacaatattttgacagtgatagccaagaaagtcatcttgggaaaaatagtatttccttttctcttgcaaaactcatgtctagttaatatcactgagtttattcactctaaaccaaaaatgcaaaacttattacttgattaataacaaatccattattaatttagtgttccaaagctgatttgtaagggggaaaatgtgtatgtgtgtgtgtgtgtatgtgtgtgtgcgtgtgcgtgtgtgtatgtgtgtgtgtgtgcgtgtgcgcgcgtgtgtgtgtatttcactgggaagtttggaatcagttataatcaacataattagtaatattttgggattttccaaacaaattagaacccctcattataaattggtcctttcttacagggactggaatgtactcatttttgacccacggaccccctagatgtaaatggcaaatagtcaaatcccgacataccttgtttaatctttgcgtataagatggcttgccatgtttcaggccttctgagactgtgaaaacagcctttcagagcacagtcaggcatttgctcagccttctgtgaaatcaacttgtgtcttcccaatggagagaaaaagcaggctattccacatccagagaccgggtgtcatggaaatatgccctcccttttgtcatagaggtagtgtgttctaggaagttgaaaccccaaaccacgctctccacccagttatctgactaatttgggcaaacttagcatttgggagttttactgactttgcaatcgtgaagctcctttggatcccaagatgacaattgagagctaacaacaagccagtttcaggaagggaagaaggggatctcaagaggggcctttgcacgctgctgaggggaggtgtgcagaaataggaagagggtgtgcatggagagggctgcattatttcttggccagtcatacacccatgatggcttctgagcccggtgcaaagaggaagactaagacaccagcctaaagagctgcattcatggttatctttgtgctgcatagtggagctgacaggccagctgttcttcacatttcattgaggagcacggggaagctttggggtgggaagaagcaggaaagtagctccgtgctagcaccccaagggctctgcaatttgggaagcactgtggactggaatgggcgcttcccaagatgccaccctccagaagcgtcatgagccacagacatccgcaaggagaccagagcccacatgagaggaatgttgatggacaagttccagaaagctcagagcaccccaggaacccagctacagcatcaggttgtgcagcccgcactgctggtgccctcacaaagacatcaaaccaaggagagcccacacttcacttgccaacccgtggaccctggctcacgactgcatcagccctgaggaagaggtgccttttcctaaaaagagagtctctttctagtcctctcagaagagataggtttttgcaatttctcagccaggagggagtggctttttaagatagggtggggcactgaagccctacactgcccaagagggagaaagaagcctgaactaatgttactgtgaccttctttgtgtccagagcctagtgagggttgagtagaaagtaagctgtgagtgaggaaggtgtgaaggtcactcaagaagcctggctgtgaagagaagaagacatatacaatcatagccagaaggctttttaaagatgggagattcctgtgaactcacctcgggggtgtggggggaaagatgcaagagacttgcgagtttttatttgctgtagagaacagccacataaaccagagaaagtgtattccttgttgatgggggtgggggttggggtggctcacgcctgtctttgggaagctgaggtgggataatcacttgaggccaggagtttaagaccaacctgggcaacatagcaagaccctatatctacaaaaatataaaaatatatatatatagttatccaggggtggtggcacgtacctgtagtctcagcttcagggggctgaggtgggaggattgcttgaccccaggagtttgaggctgcagtgagctatgatcacaccattgcactacagcctgggcaacagagcaagaccttgtctctaaaaaatagtaaataaataaataaattttgttgattgttttgttaacagatcattccaaaactgagtagtttaaatcaacaataattagttactctctttaatggtttacaagagttaggaggctagatgtggtggctcacgcctgtaatcccaacactttgggaggccaaggcgggtggatcacgaggtcaggagatcgagaccatcctggccaacgtggtgaaaccccatctctactaaaaatacaagaatgagctgggcatggtggcccatgcctgtattcccagctactcaggaggctgaggcaggagaaycacttgaaccaggaggcagaggctgcagggagctgagattgtgccactgcactccagcctgggtgacagagcaagactccgtctcaaaaaaaaaaaaaaaaaaaaaagaggaatacagagaagacatactggaggtagtttgtttttgctcagtgatgtctggtacttcagatggaagactccaaggctgatggctgcaaccaagagaagctgaactgcacaatgtggcagcaattatgtggttatttaaattaattaaagtcaaataaaatttaaaatttacttcctcgttcacactagctatgttggaactgctcgatggcctcatgtggtagtaagttaccaaccatattggacagtgaagacatagaacgtttccattatggaaagcttttatggaaagctctagtctgaaggcttgtttttgtctagtggttaatgttagctgttagctggaaccttagctgaggctgtcagttggaaccctaacatgtggcctctccatgtggtctgggcttccccacaacgtggtggttgggttctaaagtggagggagacagagagaagaaggagatggaagccatattgccttttacatagcaggctcacttctgccatattctgttagtcaaagcagttacaaagatttgcctgggttcaaagggagagaacacagactgtcatcatttgatggaagaacagcagcatcatattgtaagaagatcaagtgggataagatgtatattggtggtgatctatagaaaatacaatctgccacggaaaagttatgtgccctgcacattttcttttttaaaaaattattattatttttattttgcatagagatggggtctcactaagttgccaaggctggtctccaacttctggcctgaagtgatcctcccaccctggcctcccaaagccctgcacattttctattaataagattactaaatgagttgattattcagtggtcataaaacaagtctgcttttatagatgttaaagaattccagaatactatctagaagatgacaaaaagaacaccagacagtgtgtgcacatacatatttgcttactgatagcgtttggaatagattatgaagacattgaaagagcagatttaggccaggcgtggtggctcatgcctgtaatcccagcactttggaaggccaagaaggacagatcacctgaggtcaggagttcgagaccagcctggccaacatgtcaaaacccccatctctactaaaaattagccatgtgaggtggcatgtgcctgtaatcccagccactcaggaggctgaggcaggagaattgcttgaacctaggaggtggaggttgcagtgagccaagatcgtgccactgcactccagcctgggtgacagagtagaactttgtctcaaagaaaagaaagagcagatttatttctaaatggcttaagtttgcagtataaaaaagtttagaaaaatagattttgctcatcaaggattctattagtgtgaactcatactaaaattttagtaagagttctatatttatagaaagaaattacataataatttggccaagaaactaatccagggtggagattccttaaatacaataaatataactgggtgaactgaaccctatataatatatatataaaatatatatataatatattatatatgttatgtatataaataatgttatacctggaaacagtaatccagtaatcctcaaatcaattaataaatatttttaaaacaaaagattgacaactaacagcatggttttacaatgaaaattgctctgatttatctaatcttctaatattgagtggtagaattggttgactgaaaaaagaaatgtatgtaatctgtcttatctttattttaacaaggttgtgccctgtgaagaatattcatcattgcctgataaagtaactgacactacatagctactgggtgactgcacaaatcttcatagttgtactcaaaagagatctgtcctgagcatagcaaagcatattgtgaaagattcaagcctaggccctcaagcttgttgacatttcatgagcaatttggttgcaacttctgtggatcatgcactgtacaaaaacttaacaataacccttttttttcttttgagacagggtctcactctgtcacccaggctggagtgcagtggcgtgatcatagctcactgcattctcaacctcctagccattctcaagccatcctcccaccttagcctctcgagtagccaggaccacaggtgtacaccaccaccctggctaatttttagaaaaaaaattagtggagatgagatctccctatgttgcccaatctggtctcaaacccctgagctcaggaaatcctcccgcctcagcctccaaaaatgctgggattacaggcatgagccaccatgcccagcctgaaaacttaataactcttaatctaatacttagcacaaaatgttgagataggaattggcatctccattttagagataagtaagtgtcagagagattgaatcacttactcagggtcacacagcttttttcaaagccagaaattgaactaatgctattgggctgctgagttagtactcacttcaccacacaggactaagcgtcatgtgcagctggttttgctctgtgtccccacccaaatctcatgttgagttgtaattcctaatgttggaggtggggctcagtgggaggtgattggatcatgggggtgatttctaatggtttagcactatccccctcgtgctgtctcgcaatagggttctcacgagatctggttgcttgaaaatgcatagcacctctcccctctccttctctctcggccacctgaagacgtgct

SEQ ID NO: 95197 - DNA, 80958 bp, Homo sapiens
  misc_feature (1)...(80958): n = A,T,C or G
aggttttatggaaaatatatcttaacttgataagaaactgccaaactgttttccacagtggttacagcatctgcattcccatcagcaatgtatgcgagttccagttgtactatacccttgtcagcacttgataaggttgtaaccataattggtccagtgcccaatgcattcagcaagtcaacatgtggagacaccaggctgcagcagagaggtttagtcgtagtgtcacagaacagggagacaggagggaacctcaaatccatctccttaaggagtttggggtagggttttttagggttttggagtgggcngaagggcagagatcattcattggttgaacagtgcaggttgaagtcatagggcaggagatgaggaagctgtcttctcatgctgattctgygcttcaaaatgcttatggaattcagggtctgtaaacatcttaactgatccttaagcaaaaaccttatggttttaatgtcagagattctatctataggaacaatagagatgaaaatcaactgttaaatagtcatgatcctaaagttggaaattctattgataggaacaactgcggatgcaactggtcagtatctagagtgctgtgtgactttcagcaactgataaatgggtcaaagtgcagcctgattaatgctgatttttttttttgtcatgagtaagacgatatctactagattcctcttttgtaaagttcctgtttttttaaataagaatttcatggggagatgctttgaacctatgtaagtaactcattccttattcaacttttccccactagatttagcaaacattgatatttcttgtctgatgattgccaaatggtgattttctaattctgtttactgagtacccccatttttctaagagaaagataactgtgttttaaaacattttttttttcttttctccttttctcctttctcccacttcccacttagttccttagaaatgcaattataatctttaccttcccttcaccagacactccttacagggcaagcttatttaaccatgtgcttttagaaggttctaagccagaaatctctcccaccaggagactgcctggagagacaacagtcaatttacaatctaaactatgcctgctaggaaactctgtcccacttggagagcatctcagacaatggccactttacaatctagtcctgcctgccatggtgccagctcaaacacccggtagataaaagcgctaaggagagtcatgtagatcctcacctgcttgctccctcccctgcatgccattcatgccaagtcccactttaaaagcccctgctttctgccccaaaagcaaatcagtaccttaaggcaggaacctgcacttttccccctacgttaagctttggaataaaaagtcactttctttacggcagacctcactcttgttaattgtgctctgtaagcagtgggctgctgaacctatgactgggttacaattccattcttttttctaaatatattattgaattctattctaaagagctctttattgccatttattttttttttttgaaagtgtggactcatagattccattttaacccatgggatataatctcctgctactgtgatttattttgatgttcaaattgtcccagatttggccaacaggagccctttcaagctgattgctttgtccttttgaactgtctccaccatttcttgagcatttccacactttctagcacaagatgttccagtctcatactatactttctctggcccaaccctaaaatcagccatttctctaaagcgccctggttccttttcatggagaaaggtgtttagagctaggtgttaggtgttctcttggctaatgtggtgttgctgcaccaagaccttctcactggttaggcctaggaaatatatgtaaatacatttatagacatgtgtgtgtatataactgactgtggaaaaattacacaccctattccctcaccctcaacaattaacaaagaagacttcagtgaccaaatgtcggggggcgtttccccacacaccaagcaagcaatcgattctgcagcagacaccaactgggtgtcctccaattcccttctaacctggagatagcatcagatcccacaggttgaggctcactccccaacacatcccaacaactgccccactctgtccctggccactgaccagtcccaagtctgggcctccagaacttccgacaggcttcaagttgtggttgccatgaccccctcttgggttagattaatttgctagagcagctcactgaactcaagcaaacacttatgtttacaaaagatattacaaacaatacagatgaaaagataaataggatgaggtgtgggagaaggggctcagacctttcatgccttccctgggtgcaccaccctcccaggaacctcctggtgttcagctatctagaagctctccaaccctgtcctcatgggtttttatgcaggcttcattacataagggatgactgattaaactattggccactggtgataacctgaccttcaacccttctcttctccaagaagttggtgataggctgaaggtccaaccctctgatcctgccttcgtctttctgatgaccaaccccatcctaaagctacctaggggctcccagccacgagccaactcattagcatacaaaagacatcacttcggtgtttgtaagaaatttaggagttgtacaccagaaaatgaggtcaaagaccaaatatatatttcagaatctcacaaaatatatagatacacacttttacatttatatttatttttatatctacatgtattaagaaccatgactttacatgaatatctccaattccaatccaatcacacaaacttcttgcttttcttatttctgtacttgtaactcccttctccaacagggaaaaatctggctcccattagcctcaatatagtttttctttgtgtagttctcctgtatgtaatcagctgtctggccttgcagggctgctgccccaccttccttctttgggctcagactcctcactgaactgacagcccagtccaatatgggagtgactatattctcccatgtagatggaaaagcagagagaacaagttagcagagatacatagaaaacaatcacaaggggcacagagagtaccttttgggttcctggaagcttttcaatgactggttctagtttttgctaagatgtggctgtattcctgttctgggcttttgtgagaagcacctatatcattatggtaaattctccctttttggttgcgctagttcagcttggtttctgttacttgcaaacagagagtcttaaaggtatatttaaatcctggcttgttctacaaaaaataaaccaaattgtggaaataataggggctaagggaaaataaaaattagcccatagaaaatgcatgccacatggtactataccgttgcttaacacgggctgaaatataggctttaagatttctagtgatccaaacaaagtgtgaaacaatatcccttacaagattttatgtctctggatttaaaacaaaccagcaagtggagcatgaatagatagaccattagaacggatacagagtccagaagtgaactgctcaataaatgactgtgtagccacctggacaaaaaaattaatttggatctatacctcaccctatatattaaatcgattccaaatggatcaacttttaattccaaaagacttaaagtctaaatgtccatcaatagagaattggtaaattatggtatggatatacctgcaataatatgttaagggggttgaaaaaacagcaaggagctctctatgtgttactataaacatgccccccggatacattaagtaaaaaacacaaggtggagtaaatatgtatggcatgccggcatttttctaaacaaggaacacaaagggcatatcttggctcatatatacataaacattttgaagaatgagcaggaaacagtggtcacctatttgtgacactaggacaggtgtgagggacatctttttccactgtgtatcttttataggctttctgataaatgaataatatggatatactatttattttaaaaataaaaactgaaattgataaaaatcagacaaaccggccaggcgcagtggctcatgcctgtaatcccaccactttgggaagccgaggcaggtcaggagttcgagaccagcctggccaacatggtgaaaccccgtctctactgaaaatacaaaaattagccgggcgtggtggcacatgcctgtaacccagctacttgggaggctgaggcagaagaatcgcttgaacctaggaggcagaggttgcagtgagacgagattgcgccattgcactccagcctgggcgacaagagtgaaactctgcctcaaaaaagaaaaaaacaaatacataaaattaaaaaaataaaaaaatcaggtatacctgctgatggaacaagcagcctggctagtcttgacagattgcaagagggcaaccagaggggctgaagttgtaccagcccacaaatttccactgccaatagagtccagtgcctacccccatactgagatgctgtccttctcataaaggcttatcagggagtccaccgaagagatatctacatttggggataagttaagacgatgttctttaagccagacacttatttaacgcccaccgatattttaattcctagctacaaagaaaaccttatatgtatgactggggtcttaaaggtatgacatgctcaccgtgcttgacatataagaaactacttttttaaatacatgggtctgccaggagcatcctacttcctaattttgcccataaatatgctactttcaagtgaaaccttaagccaattcatagtaaatatattatcaaaattttagcacagtaatgactgagcacaccagcctcaaagccagactacgtgggttcaaatctcagttgttcacttactggctacttacttgttggaagttattccatttcttcgtctgttaaaacaggaagcaggctgggtacggtggctcacgcccgtaatcccagcactttgggaggccaaggcggacggatgacaaggtcagaaatcgagaccatcatggccaacatggtgaaaccccgtctcttctaaaaatacaaaaattagctgggtgtggtggcgtgcccctgtaatcccagctactcgggaggctgaggcaggagaatcacttgaacctgggaggcggagattgcagtaagcccaggtcgcaccactgcactccagcctggagacagagtgagactccgtctcaaaagaaaaaaaaaaaaaaaacaggaagcagtttcagcacctacctcacaatgtgcacacagttaaagcacctacctcacagggtgcacacagttaaagcacctacctcacagggtgcacctaaggatcacaggcatgcaagccctagatcagcctgcccaatggcaatataatgcaggccacaggtgacatttaaaattctgtagaacccacactaaaaaataaacaaataaaacttttatcccaatatatggaaaaagtttatcacttcaacatgtaacaattttttgaacattatttggtaaagaatgcatatatctcgattccgactagccatactttaagtgctcaggagccatgtggggctggtggccccaaactgaacagcacagcccaggcagcaggggcgcatagtaggttctgctcacgcccatggtctgaaagaaacacggttgcagttgctgtgagcacacctcacctggagcaaaccggcctatcagggggtccactgaagagatgtctacatttggggataaattaagaagatgttctttaagccagccacttatttaattcccaccgatattttaattcctagcttcaagctgtggtgcgcggttccgacctatgcaaatgaacagcttacaaacagagggccaccatctatttctcattatctggggatcccggttggggtggggggcggaagtgggtgtttgttatttccccaaatgcggaggcccctgcaccactaacgcgaggaaacgcaggcgagtgggaaggtactttaaaaaggggagggaggtgctcagagggaagctaagctctccgggaaacaattacggccacgttacggtctgtgggtgccagaaggagcaacaatggaggcagtcgaattccgagagctcagagagtctgccaaacttagccggcctcggcgcgcgggttcccgggggccccaaaaactccgggcaactgcggcccaacgccaaggtccagtccaggcgctgggccgcaaacgcctctccggcctccgcgcgcgcgcccgctgtctccctgctcctgagtggctggggggccgggattaacctttcaccgccaggccctgtccaatcacaggctcgctctcatgccgccacggggcgagcggagcgtgggggcgcggaggggcggtgcgggagccagtgggattctccaagcggctgtgcgccgttgccgcgggccgtgcgctggctgccggccagccgggcgctgcgcagtctccgcaggcgccggcgggaggggtcgaggcggaggcgcggcgcaggctgctgcaggcccaggtgaatggagtaacctgacagcggggacgaggcgacggcgagcgcgaggaaatggcggcgggggcggcggcgccgggcggctccgggaggcctgggctgtgacgcgcgcgccggagcggggtccgatggttctcgaaggcccgcggcgccccgtgctgcaggtgaggcgggctcccgcggagcagctttgtgtccggggcggggagcgggtcgcctggccgcgctcccgcctccgcgcggaggcccgcgtgccggccatggccccgagccgcgcgtccgggcctggcgggcgctgacgaagggcgcggcctcgcctgcctcgtcgtcccgcacagcgcggcctgtggacccggcgtctgcccgcctcggctctgctcctgggcccggaccccggcgcctccccgcgaggcagccctgggagactttccgggccgccgtggcgtggtgggggatgccggcgcctgtccactccccggcctggcgaggcctggggctcttgacaggtcccgtcacgcgcgctaaggtggcgcgggagcagcggaggtggagacgcgcgcctgacctgccggagcaccctggggccctcctctgatggggccgctgtgccgcgcccggaggggacgaagctgggctctcggtccctcccgggagggtcctgtgtgattactgtcaggggaccagattggggccctggggggcgggcaggggccgaggccattcttttgcctctcccctcagatgtttttgtgccaaaatgcctagaccctgcggaggaccctttcttcagggtttttgattttggggaaatcagtgtatgttttaagttagcacatcagatttctgtagattgtccagaaaagctgagttgccctgatggctctgcctggaggtcagagccagcaaaccactgagtgtgtccttaggaacctgaagatccgcggaaacgtggagatgagttggagggtcctatttgtgtagtgttaactccgtgcttttgtggagagagttgtggttaaagggacacgttactggtctacacgataagtaagtgttcttaggactttcaggttttaaaaacattcatctgatgaaagaggatcacttggacgcctatgcttctgtcttcgaatattctgaatctttacaatcctgattgtcaggtgtcttcgtggtgcttgttttcaaacagtggaaaaggactcaggttaggatttaagcaactcggaaaatattgttaaaaatgtgctgttaaaacaggttagctatattgaatatgtattggtgtaaacgttaagttttctaaataaaaatatacatcctcaccaaaaaactcagtttattaaaagatgggttcgggataagccaggtcctagagaatagtaattttcaatattattgatatctttggaaattaggttctggaatagccagtttattttgcaaagtctactttaaagctacctgtggcacgtgtgtattatatgtaatatgtgctrtgtacatgcacatacatacacaattatttcaraacttcattttagggcatattccataaaactcaatagataaaaaaacaaaaaactaaagattgcttttaacatggtcactataaacattgatcatggtaacataggtttatagatttactcacggcaccaaaatgctgttttaagaagagaacagttagtccattttaatttggggagaaaagacattttcctacaatcctttttagtaagggcctgctttactttttatgcttccatctcatgtttgaagggtaagccctgactgctctgctgtattttgcccgtggctcaatgtgtgagttgggtagctaggttgttttgctattattgagctttattgtcttggttttagaagacattgtcttttgatgtggctcatgattcttatttgacagtgattttgtcatatagtgggttgtacagtacttgtagtgctatcttctagagagggtgacttttatggcgttgggatgttttattctctaccactatctgacatgtgaggtgcttgtttcatttgagaaagtagatatttcgtagacagtctctcacttgcgaccctaccatgtcatggtcacgtttccacttgctcatggcaaaggagataagggaaacgtgttattgagtgcctccttgttatgcgccaagatgtttcaggttctacgtacattctcttctaatcctcactgtgaccctgcgatcaactcgatattgtccttgttttataggcaaggaaactaagagtcagtgattattaccccaagttaggaatctcgaagtggcagagccgagatcgaattgtggtttggtttcagaatctttggaggcatgctttttgtattgcattactgttccaaatggatttcagggctgcatcacgtgtagtgactcctcagttaagacttgtggaatgaatgaagctgtgtctaaccttaaatgttcaggtgaatgaatggttatttgaatatttcagatagttgtttttttttttttttggcatggtaaaatatacataacacaacgttgaaccattttaagtgtacaactagctggcatacagtacattyacattgtttttagtcattaccagcatccatctccataytttttcatctttcccaactcaaactgtcctcattaacactaactcctgattccatcctaccttcaatgccagagaaccaccattctacttcctgtcactgactactggagaaacctcaaaataagtagagtcatacagtatttgttcttttgtgtctggcttattttacccagcatagtgtctccacggctcatctgtgatgatttagatgtcagaattcccttccttggaaaagctgaatggtatttcattgtatgaatatactgcattttgtttatccattcatctgtccatggccacttgggtagcttctatcttttggctactgtgaataatggtgctgtgaacgtaggtatacaaataattcattggagtccatgctttcccttcttttagacatatacctcaaagtggtcacattgtttcttgatcttcaaaacactagactagactcagaatttattgcagtatgagttttctcagggttcctccaagcagtgataatttcctacaaacaactcctctgtcagtaaaatctgtaatctctctgaagcccagggtcgactcctttttacgatcttggttccaatcatagtgtctggcaggtattcaaaaaactgatcaaacatggagtgatgtgctttattgaatgccagaggaagatattggtgaggtctttaatttgtataaagagaaagttggagccaagtgacttattttgtttaccttttgctgtgctttttggacattcaagagcttagttcatcctgaaagcccagtgtatgtattatactcgctcttattcacaggtttctttgcaatttacgacttgccaaatgactagtcttctgaggcagcattattttcttggtattccacctccttagcctgtggggcttggaccttttgattttttgatggctagttttcacttcttccaaatttctgctaagactctagtattagtacatttatttaatagtttatgatgtctattttgagaaaggatttgaaatggtcttataataggaaagtattagagtactatgaaaatggtaaaggttggtagtatagaatgtggaggcagagaattagatgaatgattggggcaaggaaaggtgagtgctgcatgtaactcacgttgattaatgaaaggaagcataccaatttgaagcagatttttctcttgtatgaagaataatcaatcttttggattattacattaaataacattagcaatatatggagaaaatgttttacattttacaaacgatagagaaacattttttcacatgccattttagagaaactggataaaagcctcaggcataatagaaaagctttagtaatacaggtgttcactgttccagtggtttgattcattaatttcttttgggtggtgtccctcgaatatcagttgtctcattcaggctgttgacagatgctaaataacaatccattcaggaataagctctgtggacaacatgggcagtgaggattttccaaataggaattctcacccagtcttttttttttttttgagacggagtctcactacgttgcccaggctggagtgcagtggtgcgatctcagctcacggcaagctccgcctcctgggytcatgccattctcctgcctcagcctcccgagtagctgggactacaggtgcccgccaccacaccctgctaattttttgtatttttagtagagatgaggtttcaccgtgtttagccaggatggtcttgatctcctgacctcgtgatcctcccgtctcggcctcccaaagtgctgggattacaggtgtgagccaccgtgcccagccctctcacccagtctttaggaacgtgtgttggtctaaaaagtaagactggttgtatcgtggtgtatacttgatgaattaatacagaaagaaaaagattatttttgagatgtagctggtgaaattgacattttcagttatgtaataaagcctttgttaaaataattctgagtgcaaaatggcttcctcatctaaaattgtcaatgaattgttggtactcctttaacatgcagttacctcaatatgcattttaaataagtgactaagaagatgctacaaaacattctctgaggatgtcagtaagactgttactagaagtaagacatgacaggcttaagtttggccttagagttttttctttttgttttttaggcttrtaacagcattacatgttcttggttgtgttaaggtttatggaatagtaaggattagattcttcatgcatgttcattaccagacatggtgcttgacatataggagacactccgatttgttgagtgagtaagttaatttataatactttttgaagtatttagaagctaacacagttttgtggggaagaatattgcttgcatattaaggcttttaaaaagattattactattctgcttttggacaaatcatgctacttggtcctttttgctttgtgaggtacgtatgattatgtgcacagaaacattgcagactgagggaagtgttaagaatcgtgggagaaaatcgccgtcaaaattggagtttaactgtattgcagactttctccttgttggcacagactaactctgttgtgcttgttcgttctttgacagctcaatgtatgccataaagcaggggttttaacaacacatttgaacaattcttgaggattagaaaatgaggtctgttaaccagttcagaattttaagaaaacaaaccggttgtacttagagaacttgaataatgagagaagactcttagtttaaaaactgatctttgacatgatgtaggaaggttctttgattaagaagttaaatgaccctgtttgaagggaaaaagaaaggtagtagtcgtatttagtcgtatttagtcctctgagatgtttcgagattgcaggatttctgtctttcctcttttggtaacatcctgggaggtgagattaacatgatgaactcacagcctgtccgcctcttatgcatcctgctgcccagccatcactgtcagttgctctgattcatggtattttaagttctttccactttgcagagttaaatattaatgttttatcatagctttgtagggatgcttaagagcaagtgtttggcgtcagagagaccagggttcaaatcctgattcttcgactttatagccgatgagcactgggcatatggcaacgtctcttgagtctcagcttccttgtctataaactgtcgtagtggtgtttgcctcttgaggttttgagaaaaaaaaggagtttcttaaactctcatggtacataactagcatttgataaaattaatgtaatatttttcttttaaatacgtgtattagagaaaattttaacatgcaatagtcttaatgtgattagattatattgtgagcccccaaattatcaatattgaaatgtatggtctagtaatataatggaggatgaaggaaaagagggcttgagaacaatattttacagacaagttttcgaggaggattatctatactggttcagctatcttagttggtctctgtagtagtgataccaaatgtaacagtgccttaaacgtctcttaactttccctaaataacacattcttcatctgctatgcatgaattaacacatcatccttgaaatcatacttcaattcagtgtataaagccaagtgttttgtaaaataaacctcaagttaggttttatgtttccttatgattagattcaggtttcagctgggcacagtggctcactcctgtaatctcagcactttaggaggccaaggcaggaggatctctagaacctaagagtttgaggtagcagtgagctataattgtgccactgcactccagtctgggcaacagagcgagactctgttcccctctttcccccggcaaaaatagattcaagttttgtactttcagtaggaaaactacattaggtatgtgttgtcagtttgtcctaatactggtgatcttagctttgtcacttggattaaaggggtatctatctggtttttccactgaataaaaataccagttttcatttgtaattagtaggtaatctgcagaaaagctttcaggctatgtaaatattctttagtaaccttcacccaatggttttagcatccattaatgatccttgcttcaatcactaatgtgatggttaaaaatggtgacttttctgtcattccttctacatttattagttgacattcagtagagtttcgcctgaattttaaacctaacaaaatacgatttcttttttgttgttgttaatgctgagtcttgctctgtctctcaggctggggtgcagtggcgtgatcttagcttactgcaacctctggctcctgggttcaagcgattctcctgtgtcagcctcctgagtagctgggactacaggtgcaagccactatattgagctaatttttgtattttttaagtggagacggggtttcaccatgttagccaagctggtctcgaactcctgacctcaagtgattcacctgtctctgcctcccaaagtgctgggattgcaggcatgagccaccgtgcccggcctacaaaatacagtttgtaaaatgagaaactaagttgagaaataagactgtcttgagttgggttttcccagttgcacctgtaactttaagaactttaaaattgtttctgaaacatcttcaaggttggagtcagattagtttgcattaatatggaagagaattttgtagtggttggaagttaactgagaaaactaggatgggtatagtcagatgataccaaaattatcattgcactaactgatacctctctagctttgacagtttctagttagcctcgaattattcttttggacttgggtgccaagatcgaggatgttaagcttgttgaaataatttgggttgtttaaagtcttttaatttaaaagtgtctaatttgagttttatatttgacctataaaaagctgctttaattcaatagttaagatcaataaagcttattctcaacatcgaattaattaataaaaaattattcatggatatttactttcctacattccaaactacctagtcattacaaatttacagtaacgtgaaaatcaaacaaatcatgaactatgtaatatgaatgtgagtatagtatgagattatctttcaaagatcttaatactcttgagggagatggcaataacagctaatatatggggcagtaatataatgaagcccgtgatgatttgggtgttgtagctagcccatgtgtgctaaatgagaggggaggggactaaagtgatagaggtttttagggaaagttgtggggtggggttcgtgagaggtggcgaactctgttggtacacacttgttttggtgttacgggaaaggcagataacatgagatgttgcgcagaagctatgatgatgtagtgcgtcacactcttgcctggaccttttaatatatttgctttcctgtctcaataaacatccatcttaactcagtagtctcttatgttcattttgtctctggattgacctccctttagtatttaagtattcatgttatatatcttaaaacagcttgacaaagagaaaattgtggctcctttttcccaatggatgctctttcttggtgtaaaggtagagggtagtcgtgaattgaataaaattctagcactcgttgcacagtgttaagagtaaagtatgtgcctgtagtctcagctgctcaggaggctgagatggcaggatcacttgagcccaggagttcaaggctgtaatgtgctctgatggtgcctgtaaatagacagagtgagaccctgtctccaaataaaaaataaaaaaaaagagtaaagtacagaaacttggaatcaaatatgaaccttaaaactcaccttgaaagctagtgatgtgttaagtatttatgtctcttgaaacaaaactgtaggacaaatgtcattataggtaacttgaaggggaggggtgggtatctgtgctgttttgatgtgttgaaatgtcatctttctgagaagtactccaagaagtaagcggacctttggcttgcagcctggagacacttcttatatggagatctttgatgggtggaatttgttaagatggtatttgacctgtgttccacttcaattttggaccaatctaattttaggcatgattatattgaaatctaaacataacatatttatgttagagatttagagaaacccagaaatttatttggttcagrtacagtaatgcatgaaaagaaggctaatgaatttgtggtttaaattgtaggtactatgatactgtaaaatatatatttggtctgtcctctaccctattcttaggcatacaaggcttgaaatccttagaatctccaaagtgatgtgtttttgtatgctaatgatcgactggtggccggtagctcctggtagcttcaaaatgggggctggttactgggaagactaaggcatgattagaggtttggactcagacccaccctccaacctctggggagggaagaggggctgaaggttaatcatgcccaggtaatgagtcttcataaaaaccctgaaggacagagtttggaaagcttctggatagttgaacacatggaggttcctggagggcagtttgctctgggagggcttggaagctctataccccttctccatacctaaccctgtgcatgtcttcatctggatctttgtaatatcctttacctaattaatttacttatttttattgagatggactctcgctgtgttgaccaggccggtctcgaactgctggcctcaagcgatcctcccatcttggccttccaaagtgctaggattacaggcgtgtgccactgcacccagcctgtaatatcctttataataaactggtaaacataagtaagtttttccccaaggactgtgagctggtctagcaagttaaatcccaggagggcgttgtgggaaccccagttaactgattggtcgggagcacgggcaaaaaataacctgaggtttgcaattgacacggaagggtgggggaggtcttgaggactggagccctcaacctgtgggatctgatgctatctccaggtagataatgttggaattcagtcattaatagaagacacccagctggtgtccgctgcagaattgatggcttgcttgttgttggggagaaaccccacacatttggtcacagaaattttatgtggtgtgtgagaacaaaggaaaaacagtttgtgtgtgttttttcccactcagatattcaggtaaatgttaccacattttgtgccttaacgggggaggtttttactcattaattcattcattctagagacagggtcttactctggagtgcagtggtgtgatcatggctcactgcagccccccaggctcaggtgattcttccgcctcagcctcctgaggagttgggactacaggcacatgccaccacacctggctaatttttatatttttagtagagatggggttttgccatgtttcccaggttggtctcagaattcctgggctcacgtgatctgcccaccttggcctcccaaattgctgggattatgggtgtgaaccactgcacacggctgggaggatgttttcaatacctaaaacagaattgtatgtctctagcttaycgtcacacaaatcatccacagtttgaaagtttgttttccaattcccaattctgtgtgttcaagttgtaggaaatttaaaatgctgaaaagtttaaaggaaaaatactcatccaagtaattcatcattaatttttgggtaaactaattttctctcacctccttcctctcttccttttccttcttatcctttctcacttccttttccttcttagmcttcctcactccctccctttttcctttcctttagtttttaactaagacataattatagtctcactgtaaataaaagtgttctactttttcatttaaagccatttacacaggatttttctcagtcactttaccagctggggacctttggctggtgacccccgtgtccgggccttgcttggctatgctaccctcccacttggcctgcctgtgccacacctggcttgtgctctggctcagctagtggctgggccagtcatgccccagcctacctgtgttacggctcatacccacgtttggcggttcctgagttcttgttctgcatccaagaagaatgaggatatgctgacaactgaagggtgaggaaggcagacgtaaattttattgagcaatgaaacagttctcagcagaaaggggatgcgggggtggttccccacccgaagttgtgtggtttttcccccagtgtggctgggtcctgggcttttacaggctcagaataggggagtgtgtgctgattggtttgtgagtatgcaaaaaaaagttaaaagcaccactcaaaggtgggcttgacagtgtaagaaaccaattagggaagtgtaggtatatgtaagataggtgaagggtgaggatcaatcagaggaaagtgtgccaaatggcaagacaggttctcaatccggtccctggatttatctgggacttgtagttctcttgaaaaacaaacaaaaaatactgtgtatctcgaccttcaggctttaaactgtctttgatttgaaggtggggtttcactggggacctacccctgtctgcctaggcatttgtctgcctgctgctgctctcaacataagcatttttgttcattataaacttaccattttaaatggctgaattgaacttcaccatgtaaaatgaaccagggtttaccaaaccatttcctcaatcattgttagacatgtaaattggtggcggggagtgtttctttgctcttataaatggtaatgatgaagggagcgtttctatatgaagttttttttgtgtgtgtggtaatgactaggttaatgtgcagcgaattttaattaagaatgacagaaatgtaaagttcatacccatagtgttagggtaaactaaaaaaaaaactttttaaaaagacaaatgacaattaaaagtaaaaatataaatagttcttgtgttttgtatttaaatatgcaaagataccagtgtttaaattcttgaaattattgttttttttttctctttagtctcttaatccttggtttgaccttaatcttttcatagtctatattcactaaataatagttgataaatccttgaaatacttgttttatatactgtggatatgttggatattttcttttgatttcttttttatatttttgaaatatccatgattattactatttcttgtttctctgtgaaacattttattgcctaagaaacagttcagtgaaataatgttttcagtgatgtctgtccagccagtaagtagtacacagtattttttgtttgtttttcaagagaactagtgaatacaaaactgtttaaatttactttacgttaggtaccatattttgtgatttaattgcattgattttcatcttaatgtaaatgcataatggctagcttgtttggaatgtaggggaggaaaacttttcctccacccacttaggctctattgctgggatctgtgaattaaactaacaaaagacattaacaggggaagaggtctacagcttgtattgatgttaatatttttgcacgcacaggggcatcaaagaaaaagatgtaaaatcccaaagaaacacttagatttagaggctcatataccatcttaacaaagagtgataaattgtggaaggacaaaggaggggatgtttggatttctagggttgataaactgtgggaaggtgattagacggtgtatggaggaaaccattggtagaaaaggkttatttattaaggtttgtttatgcagattcatcttggtgccatctctctgtgctgtgataaggattgttcttttcttcctggtgtagaagaagggggagtttatgccttactcttaagtagaaaaagggaaggcatagaacttttcctgaatctgttgattcttaattgctttcagctcaaaataatataccaaagtggcatagttgggggtggcatctcctgatccccattcaggagtttgtggtttttcaggttaatctggctataaattctgtataaaatcttctatgcattatatgagaatgcattttctatgccgaatcttacggttaatgaaacattttaggttttctttaagggtttcataaaattttaagagtttaagaattatgctaaaaaaaatggttctaggtagaggtattttgtatgatatggattttgtatgttccaagcattttattttctctctactaagtttaagatcttgtgtaatcctcgtaatagtcaggtgtttctgttttacaggcaagtaaacaatgttagcgaggtagtggagtctggatttaaaccttggtattctgacactgaactgcttgctggcattaagataatttttaaaagaaagataggtacaaaggaaaaaaaaaagaggctgcttcctatatccccagttgccttactcagtgcctcctgcataggcgggtatacatgagaagggagtgacagtgtatagatgtcactgaaaactcagaatcagtgttttgaggcaaatacgtccattaaatacatgtttatatgtatatataagtatatgtataaatataaatgtgtatattaagaggcaagagcatcaatttgcttattaagttagctaaaaacatctgagactttttctgctctacaacttagaaaagggaagtaggtaggagttgttttcaaacaacttggattctatgtgtggattcattttcwgtgtggctgtttgcccactttcattttcatttttaaaaattcctccatgtagttggccagcatattttagggcttctccagtatttaagttctaagaaatggaattttattatttggtatgaatactgtttgagatttgggctatatttaaaaaataaaaaagctaatgttagggaaatacaattaaaaccaaaatctcccaacccagaaaattgctccacaaaggtagaaaagaaagaaaacaatgttattattgaatgaacattaaatcagactgctgtgcccatcacaggcagtcactaaagggatggcaaagacagaaagaaatcttactgttttatgtaactaaatggttacaatccattacatccatattttcaagataaaattgctaattttttttcacatttttatgactagaggtaggttttacattttggagtcaggtgacagattaggcccatctcctcctaggaaaccaggcgattgagtgttatttcccatttcagagatggctttcaggtccttaggaaacatagccaagttataagactagagacttaaatttatatacattgaaagggagggagaaataaaatctggaaaagaaaaggggaaagggacctcttcccttttattttcagcagggagaactatgcctcttatttttaatttgtatttgtccttacgtcaacagtcagtattttgtatctataccatggctgtcctaagtgatgtaggcgtgattgcagttaaaataatgccttgtatctcacatagcacttttgttactaggaacttaaagtgcttcatacatttttttagttttctctgttagcttaccatgagtattgcttatactgttttaatgtcactatattgtggtttttttccatttgtttatcctggaactttatagaagtcatgcattttgggctttgtgagagtaggaatgaaatctggatggtaatatttgcaaagttaataatgtcagaatctgtgatgcataataacatggatgagttgaaattattttgtcaccaattttgaaaattcacagcagaaagttctaggtgcctttaggcttcagatctgaatggttagctctttcttgctactagcctgtgaaaggatacagcctcgttactgcatttagttgctaatgtggattaagtttgctagtttgtactaaaacttgactgtctgatatgtggcgtgcctgtttcagagttatcttaaaggggcctatgaaacaggattttgcaggtttgtactttacttcacagtgatcaattaaaatgagaaaatgacctattagctttgaattaccagtataaaataagttgctattatacttgacatattacctttctaatgtatgtatggaattatcaatggaaataatgtggataacttagcaataattttgtaatagttgggtgacattgaattttaaaggattatcaacttagtaatttgattatggcatttctaggaatgaggtgagtctgaattggaaatcatctctagagggtgacacagcaggacatgttggtgtgcgtggtctttgcatcctactaggtggcggtatagaatgaaattaaaaattaaatgaagtctgaggtagccttagaaaacacaaatttggctggttgcagtggctcacacctgtaatctgcagtattcaatacagcatgttactgtactgagtactgtaggcagttgtaatgcagtggtatttgggtaatcttttgggactacagcactttgggaggccacggtgggaggatcacttgagcccaggagttcgagaccagcctgggaaacatggggtggccccagctctacaaaatagaaaaaaaaaataaaaaacraaaagaaaaatgaaaacataagcactgacatattgggagataggaagatatgctcatatacagcatggtactgatttatcatagtgtttaagtatttttaaagccaagttttactgagggaaaaggtaatttaatgccaagagttatcccttctatctaattggattgtactaacaagttgtttttcctggctgtattagaacataatatcccaattttaaagggcagttcttttagacatgcattgtcttgttgcccaacagataaagaattttatgagggatcttaaaaagtagaacatctcttaaagttcgttttaaaaaatgagttgtctcttctaaaatttctctctgattgcttttaggttacctagggtatgaattaatacagacttggaaactctgaaagaacttagaatcagcattttgaggtaaatatgtatatgccaaagtagtgataaggttgccccagtctgctttgttgacttcttagcaaaacaaatttgtgtatgaaatgagaactttaacctccatgagaatgtcttttaaaggactggaagtagtaaaaagaggccactgccaatttgtttttcctgagcttatggtagtggaggcattgcagaaggctcagacctgagcgcaaaccaagtctgatgtcagatctaacaaaatcagtatttgttgatcaaattaaactttttatatctacattttatgctttcttagtttttgatttataatctcttttagagagccaccccaaatttaaatttatgcccgacattaacattaacagtgttcttgaattattttatttataaactaattctataaaaatgtatagtgtagatgtaactgtccttttgtgtttttaatttcattttgggaaattggaattgctgatggatttcatacctgtgttaaagagttactactgggttatttggatttctcagccaagtacgtcttctggtgaccttctttatttctttcgtttatgtgaatttaggaaataatagctatttttttcatttttctataaaataccatctttagactttatttactttgatttccttatattagctttgaaatctttttttgaactttgctctagctctttatttctcccagatctctgggaattaggcatgctattgtagcttattctcttgttctttgttttagggtaagccttggtatcctaaaataatctaaatgccttttgtttaaaatttaattcaaaataatggccttttattcaactcttcatatcagtagggctctcttgtagatgtgtttctgttcagtttacaggaatcttaaacttggctatttttgcatttatttttagagcagaagcttgggcatgctgtgattttccaataaactgctatcacaatgtcaaaatgcagttcagacaagagcaacacagagatctcaaacattaaaacggtaaatctgtgattcatcatgtggaaagaggaagagagtttattcttgtctttcttgtcttttgctaaattacagtcatgcattgcttaatgactggatatcttctgagaaatgcattgttaggcgattttgtcattgtgtgaacatcatagagtgtacttaattaacataaacctacatggtatagcctattatacacctaggctatatrgtatgaccttttgttcctaggctactaacctgtacaccatgttactatattgaatactgtaggccgttgtgacacagtggtatttgtatatctaaatatacctaagcatagaaaaggtacagtaaaaatacagtatcataatcttacgagaccatagtcttatacggggtcagtctctaaaacattgttattgggtgcatgactgtatttctaagtgcataatatgtggaaactatgaaacaacctcactagtttcatgagggtaagttgtttgaccagaaatttaaaatctatagttgaaaaacagtcatgtggagttattttggctctgcaaaagcagttaatggtagccagtttatctgtgaaactagaacctttacctgccagcagagattcagatcttttcattaaggccaagtttaaaaaatctgtttaaacatgccaagaaagtaaaaattggcaaaattataggttttcctgtttttatattacagattacctgttggaattttaagtcttggatttgttttccctaaatagaaagtgcattactggggccagttattgtccactaaatgaatgaaaattaatttaaacattgtaaccttatggaaaatataattggaagggttaaattgttgttctttatgtccttgtacatcctctctcctgcactcatctctcagggctggtaggagtgggatagatgtgtgtttccaaaccgaatagaaatatatcttgatccatccatgattctgttctgtatattattgtgtggacattcatgagtctctaattcagtttgtcaaatatttacttaaatgtatatacagaacattgtagcaggaaatttaagaggtgcaaagaatgagactcatgtcttgttcttatggagctgtgctccagtaaaagaataacatgtatgttgtgtatgtgtgtctatgaatagctctaaaaatctgtgatagaaattatgaaaggcaaatagaagctgtttgaggttttaatgtcactcaggtggacattgttttcattctaacaacctgcagtttttgtttaccatgtcctggatgtggttctgtacagtgggtaatacaggtaagggtaagatatgcagctcctatatccaaggaaattctagtctaattggtcatattttagtgagaacagagttttaagagaaattttctaaataagaattcatataaaattacagaagtacattttatggattaagactataccccaagcctctgtagtataactgctaggatcacttggattgagcacataggattgaaatacaggattaaacactttcagttggtcagtcagggaggatgcataatatgctataggctttcagccaacagggattactcttctgttgtggaaattgctggtgaatggtgatgaggcagcaataggatagcattctttttttttttttttatttttttatttatttttttttttttattatactctaagttttagggtacatgtgcacattgtgcaggttagttacatatgtatacatgtgccatgctggtgcgctgcacccactaatgtgtcatctagcattaggtatatctcccaatgctatccctcccccctcccccgaccccaccacagtccccagagtgtgatattcyccttcctgtgtccatgtgatctcattgttcaattcccacctatgagtgagaatatgcggtgtttggttttttgttcttgcgatagtttactgagaagctgggtgaataatctgaacgtaaggttacaggtcggcagaagtcaggcagtcatgagtgggggcagtacttttcagagtacatttgggactagatatcacagagtgtagtgctttgcttaatttcctttttaaatatcaactttttaatgaattccattccagtagtttgtattattttcttacacatggttttttgtgagagctgatagaaaccttaatcttttcaggtatttttggttagagatgttatttctgtatttctttattgtttgatatttatttttactatataatgtatctattttctctttatttagagcctaaatgttgataaatgtaacctttcatttctctgttttttttttccactttttttctcagattgattcttagaaaccagctacctatcatttttttctaaaccctgtgaaagttttagggtggggtagggcatttatgagaaatgttgtgtttgctaagaaaaaaaaaaaatctctgtcctttgaaatgccaggaacagaacctggacactgagtgaatttgcaactcctccttttccaagctctttacctgctggtttgtaggaataggatccacatacttgagtgaggttggtgtcttgaggtgaaaccgggcctgagaaacattggaggtctagggcttattttccagatagaattgagtctttgttggtcttgggccagcttccctgccctgcctgttttctcctttgtgattttatgagaacaaaggaggaaataggcaggccagggaaacgatctctctccctctcttgtgccgaggaagaactgtccagatttttcctcaatttgtttccgaaacaagcggctttgcagtttcaaaaagaatttactgatagcagaaagtgaaaaaaagtattcctaaggacaaataaggagaacattttcaaagtcttagaagcttcttggtagagctcatccctggttttttggagtctaagacccttgacttttcccttacaaacaaagcttttcaccttgcttggggtctggctgcagtacttgttcattatctcaatatttgtggcctgatggctttctgctttgatccctgacttttttcctttccccttcccctttcccttccccttctccattcccttcccctttttctttccctttcccctttcccttttccttccccttcccctttcccttccccttccctatccccattcctgtcccctttttctttccctttcctcttccccttttccttcctcttattcccttcccctttttctttccctttcccctttaccttttccttccccttcccccttcccttttccttcctctttcccttccccttcccctttccctttcctcttcccctttcccttttcctttttcttttgcctttcccttccccttcccctttccattttcctttttatttcccctttctcttcctcttcccctttcctttccccttccctttttcctttccccttccccttttccttctccttccccttttccttccccttcctcttcctttcccttttctttccttttcccctttcccttgctttccctttttcctcctttccttctttcccttctttcctttttttcctttcctttctgttcatatctgttctttgctttcctcttttctacttataccttttacaggaagtgataatagtgatttagagagtgtcatttggtttgcttttatcccagaatattcaactcaagctagcttggatagttaaggaatttgttggctcagttaattggaaagtccattgttaggctgggctttgagtttggttgatccagcagtttattgatgtcatcaatgacccaggttctttatttttgccatctgcggtgctggtttcatcctaaggctggatcttttcatgggtctgtgtagtgtaattgcagcagcaaatgggactaataatttcatgagtcatctttagagggaaagaaagacaactgcttctcttcaaccatcaaatgaaagtcctaaattttttgctgttggatgagcatgaaccaattcctctggccaggggtaagttgtatgcccatcagcttaggtttgggtgactggcagatggcagaaaataagaaactagagcctaggcagcatagtgagaccctgtctctacaaaaaattaaaaaattagccagtcgtggtgatgcacacctgtggtcccagctacttgtgaggttgaggctgcagtgagccatcattgcaccactgcactcagcctgagtgatcgagtgattctcagtcttggtgaaaaaaaagaaaaaaagaaactggatccttgatcagtgagccactgtttgactgagaccacgctgagttkagcatggctattacctgtggaggaaatggagtatttgagagctagccagaatcacctgtccttgtgcttttgaatacataaaggaatgaggtatttatttatatttgagcagaaaatgaagaaaaagatttatgttgcaagaataataggacaaaaatatgtgctgtacccattttgccccacttgctttatcagctgtgtgtgtgtgtgtgtgtgtgtgtgtgtgtgtgtgtgtgtgtatctacatgtagattctttttctgtaccatttgagaataagttacatgtatcatagctctttacccctaaatacttcagtgtatattttctaacaataagagtattgtcttacatagccacagtcagttatatcaacttcagggaattttaacattgctgttatctcgttttaaaaatgaattcaataatgtcctttatgaatgagatcactatttatgttctttgcaacattattcataatagccaaaatattgaaacaatctaagtgtccatcaacagatgaatgggtaaagaaattgtgatacacaaacacacatggaggaatattattcagcgctaaaaagaaggaaatcctgccatttgcaaaaacgcagatgaacctggaggacgtaatactaaggataataagcctgtctgttatttccatctttatgtccatttgtatccatatagtctttgttaatctggaacattttcatagtttttctttgtattttatggcattgacatttttgaagaataccctccccagctttaaaaaataaaacattcctaatttatttttagactatttttctaaagttatttattgttattactaatgttatctatatgagaagaaatggtgacagttgtagggaggagggggtgctgctggttcctggacatacctggtttctggaagtaggagaagatgtgttgggtatttacatcacggccctcttttctcctttgttttatattttcatccatcatcagaacttagacttgtttcttggtaccttctaccatgtcttcaataagtctaggattagcatttgggttgggtgaaagtgaagggtcaggcttaagggtgaatagtgctagacagtatgcagtctgtagtcatgaaggagaattgtggaggtatcacgagagtggattccaggtgagaaggtcagtgatgggacccgcagatcttagccttgggccttcagagtggcctcctgatctcagacattttggtaaaatagacttccacatagggttcttggcagttgtattaagaaaaaagtttaactgatgagcctgcaagtcctgagggcttgctgaatttgggaaagtgggtactaggcttgggtactagggtaaaaggaatggctgttggggctttgattcagagagaattagcacattatttttcgtgaagaacatagttctctttgatccagggaaattatgggttaatattatctcataaagtactctgtggtacttcgcttgttcccttctggaaagatgatgagcgtgattgtgctgtcaggcccgcagacgtgctgtcttaccgggctctcagctccggcagtggggtgcccctgcactgcttacttgagatagtactttatggtagctgaatgttgaattcttgtcaacagaattaatttctcaaatcagaattcagtattgtgttgtataagagaccctacacttgagacttcttgttgaaatagttgcaacaacttaagtcatgtgttgtacttaacatgtcaggagattcaaaagttttggttgttaagtaacagagttgaattatctcttccagtttcatagagtaatagcaatgaacactccaaagcagtgcaagagaggaaattcccttctgtggggcgaggaaatcctgctgacagtaaagccagtggtaggctttcacacagatatttgaatccctgaccctctgtttgaagggtaggaattttaaagtttcastttttatcattttacataatcaaatttatctgtgggaaaaactatatgaaatatagaaagtgcttasataccatgaaaaaatttttatttcacagagtggtgtcatttgttttaatttatctaggatatgtataattttaaagatacatatttaaatagttgtgcatttataataggttgtcaattgagaaaaaggcctgtgttcgtgagctgttgataaagtgacaattttagcaggtgtctaaatctttcgtggtgcaggcacagtgctaagtgccttccatacattatcattttatcagtaacgtcatagaatatacaaagaatgttcaaaatttatttatgtgtatatttacatattttatatatgtacatatatttaacaaggcatcatgctgtacatattttcttttaaaggtttattatggacattgttctgtgtcaggaactacagatatgtgctataatcttaatggattcaaagtattccattatatagtcatagcataatttatgtagcttattttttaccagtagattttaaagttatttcttatttttaagtaataatgcaacaacaaatattcatgtacatctctttgtgmagttgcttgattcattctttaagacaaatttctaggcatagaatcactgggtaaggtacagaatgsttgactcctaaaatgatcctcttagatcaagaaaaagctaaaacaattataggaagagtttgaatggctcataggaatgatattctgatgtttctcttgtttctgtgctttctttgtttttaaccctgcatgattgtgtaatggtattctttttcccttttgtagtaagctgtgctagaacaaaaatgcaatgaaagaaacactggatgaatgaaaagccmtgctttgcaacccctcagcatggcaggcctgcagctcatgacccctgcttcctcaccaatgggtcctttctktggactgccatggcaacaagaagcaattcatgataacatttatacgccaagaaaatatcaggtactaatgcgaacactaatactggagcattctacactaaaatggaatacattagcatatagttgacacaacttatataaaactcatttaccctttcaggcctcccacttctgattaattttctcatttaaaatacttttattcttaatagtccttttcttttctaacatctgctgggtaattggatttgatagttgtatttgtgaagtttcttttttccccctctgaaaacctcactgttccttaatattcacttggatgtgtctgtcctagtgagctgggtaggaacctagattagtttgaaaatgttcagccatgaactggcagaaccacgattactctaagtttagtcattcatgttattctaaagaagtattctgtgtatacaaaaataatgcttaaagaaagggtaaatgccatttcaacacgtatttacacaatacagctgtatatagcaggcattttattcctctgagttattctcgtataaagacgtagactgtggggttttttttgtaaatttattggaggrcgattttagagaatagtgaaatttcctgatttaaaataaaatccaattttataaattttgtacttaggtaagaagtgcataacttttttttcaccatgtttctaggttgaactgcttgaagcagctctggatcataataccatcgtctgtttaaacactggctcagggaagacatttattgcagtactactcactaaagagctgtcctatcagatcaggggagacttcagcagaaatggaaaaaggacggtgttcttggtcaactctggtaataaaaaattattttatcaagttgtgcaggggaaattggatgggattttatgtttaaacagattttctgtgtttcttmagttaaattattgaagaaagtttgacagataatgtactcatttaatctcttctggcagaaattgttttgtcctatttctttttgctgtttctcttaaatgttctgcttctgtatttcttttgaatggattgcttttggaacataagtattggaacatatgtacattagaacataatctaagttgttacatttatttttttcttgatgttttagcttcaccaagtatgtcaaaaggtgcttaattatggataattaacgtttgtacttatgattttgctaatcagttgtattaataaagttacatgctgcttagaaattagatattcagttaagagtttaaaatactgatttttatatgcttggattatatataaaaataaaaaatataaaatgtgaacctaagctggtagggcactaatatattcatgtcactgctctttttttaggttgtctcagtataactatctgctttaaatacatgttagactgtcttgtttccatctgattttattgaagaaaacaggagggtggcttagaggaaatcagctatgaagaagaaaggtggtgtagggttctctgaagcgagtgacaaaaagtgaggtggcaagtctagtaggtgccatttttttrgaggataaccttggaactgtggttttaaagaggctatcaaaaacattgttggttaggtctaatataataataaggatttctgtagactgttaatcattagtagtccagagagccaactaggcaagatttctcatatttacatggagtattatatttgtaattagcaaaccaggttgctcaacaagtgtcagctgtcagaactcattcagatctcaaggttggggaatactcaaacctagaagtaaatgcatcttggacaaaagagagatggaaccaagagtttactaagcaccaggtaagacttgtagagaaatttcactttataaatccctacaagttcttgacttggtttgtaagatgatctgtagccttggttgtctgatttaggtttgaaaactaatttcctatacttaatcagcctagaagctagtcctgatgtactatatcttactgtaagtcttaccttaaaaccaaataaaggccggatgcagtggctgacgtctgtaatcccagcactttgggaggctgaggtgggtggatcacctgaggtcaggagttcaagaccagcctgaccaatatggtgaaaccctgtctctactamcaataaaaaaattagccgggcgtggtggcgtagtagtcctaggtactcgggaggctgagacaggagaattgcttgaatccagaaggtggagtttgcagtgagctgagatcgcgccactgcactccagcccgggtgacagcgagactccatctcagaaaaaaacccaaaaaacaaataaattactaatttttattgctcttaactttgtagaaaagaaataggtttcagtatgatctgcttgcttgaaaaacacaaattcctatgacctatttccaacttgctgataatgcgctttcaaaaaatttagtcttgagttaaatgtcttgaaactggaaaaatttcttgcttgagctgtttaggtctttgacggagacttcctctaactgaatgtttccatgcagccagcatgtgctggaggctcctctaacttacatgtttccatgtagccagcatgtactggggcttttggtgtgttggtcattgggggatacacagtgattaagaggcgcttcctcactgaactgaaacagcccagcctactagtgtgcttcacatactgggataagtcctcattaataaagcacttaaatatccacataatgataggctacaaaaataacatttagtctgagttttcttccagaaaaccatgtcagttcaacagaaaaaaataaaaagtgtgaattgttttgtgatttgcctaaattgacagatctcatcagtcataatatggctgtggggatctaagaacctgaagtaaatttagatttgtcgtcaagacatgctttccattatcaagatattttttctctactcttttcccatgctttcctgatttccttcttagttctgatgtataaaattatatgtatttagtattttagttttaattttgactaatgaattccttaatcctcacttatgatacaatggctctatgatctgattttatgtaagtatatccaggcagtgaatgctatgtttgtttactgatgttgattttattttaggttctcattatgacttgctatgtcgccttgaatgttttgaaaaatggttacttatcactgtcagacattaaccttttggtgtttgatgagtgtcatcttgcaatcctagaccacccctatcgagaaattatgaaggtaagttttagacctaagtcttagtaattcttggtaaactattgagtaaatgcagatttttgtttttagatttcaaaagcaataatattagttatcaatattgggagtttggctgyagtgtatgaatgaatgaatattaaattaatgttcatttaaatctataataaacttttaaacatcataataaattctatataattttcatagtgtatctaattgagcctttttgaaaaacagatcttttaaacaaactacagtaattctatgagtaattttatgttgtccttggtatagtggcatttccaccaaacaaattcttttttactatttgttagtgattttgatatgttttaatatggcgatgtctctcttgttatagccttgcaaaatgaagtctttactgtcagtatcttttattatgttagctctgtgaaaattgtccatcatgtcctcgcattttgggactaactgcttccattttaaatgggaaatgtgatccagaggaattggaagaaaagattcagaaactagagaaaattcttaagagtaatgctgaaactgcaactgacctggtggtcttagacaggtatgcacttctgattgactcagctttaatgagattagttgaaaacaatattaagtctttggtgtttttgtagtaccttgcagagagtacctatttaagtgaacaaatggcagtaaaaaggaatgggcaagagtaagaattctctrtaagtaccrttacctgtgagttcaagaatctaacgttgtttccacagagagtagcagacaggcatttctgccttaagagattatgtgtcagctcttcctatttgctgttgttgccaaggactgggaactttgacagtaaatttgtattttttttctgtcaatatgtgtgctttgttgttctgacctgaatgtcttacatgatgctttcaaagaacattaagttatttagagaattcagcagtatactttaaaatgtttggaaatacccctttgttttgaaaatgggttgtggatttcagagaaagttgctgtttgtgatttctaggtttgactctttttgagagggttactattttgagtttcattgaaaagcgcacacacacacaaaaccttcataacttaggttggtggaagggagcctttacaaattaggaaaatggcttttcaaatgcaatgaattcgatttatgtcaaaatagccttccattcttactagatgtagtcttaaataaggctaaagattacctagtggtggttcttaggacagttacaataagtagcggagactgatttctcaagttgtggagttaagtcagacatgggtttgaatactagctccactaattgtaagctgtgtgaccttgagtgagtcacttatttccttgaacttgtaaaatggcattgacagtggtttcatgggattctttgatgatcaattacattgacacatagaaaaatctgcagtgtgcctggcatttagtaagaatttgaggaaaattttctttggagagtgagaaggaaaggtaatatttgggatctatcaaacttaggtatccaaatgccatgtgaaatataaatcttacgacctctagaacgtgctgtgtctgacttcttgagccaacactgtggtggtgaagtagaaggccgtgcttgtgcttttgtctgacctgagttagagtgcttcacttgtattgcccaaaggttttctgagaagtagaagtagtagagcgtttaagtaaaactgataagcaatctgttgaataagcattacctaattctgcaaataaggactctttggttgagtataaattctgttttgggttaagaaaaaaagaactatagtatatatgtttttgctagatttcttttattaaaattatcatatgtacttttaggatattatgtgccattctggtggtcattttttatgaaaggcataaaagacccaaggaatgatattagaaatgaatgaaagttgggggagttttccttatgaggatttaaaaatacattaaaaataaaagtgatatttgcaaatattaaaaattcacacagatatggaaatggataaattgaatgataaaactcccagtgatcagtcttcccattcttctttccgcttctgcgaagtgattgagtttcatgagtattttgaacacccttgttcctcattctgrcaaatgcctaagggggcaaaagatggaagtctaaacctaaaaaacaaaagaaaacaaactaataataatgaaatctattggcaaaattatttgaatatcagcccctgtggtcatttcttgagacctaacaggcaagcgtagtacagattgagcaaccctaatctgaaaacgcgaaattcaaaatgctccaaaatctgaaaccttttgagtgctggtgtgctgccacaagtggaacatttcatatctgaccttgtgatgaactgaagccaaaatgcgaccaaaacctgtttcattcacaacattatttaaaaatattgtgtaaaattaccttcaagctgtaaggtgtatatgaaacataaatgaatttcatgtttagacttgggtcccatcctcaagatacttcattttttatatgcaaatattccaaaatctgaaaaatattggaaatccaaaacagttcaggtcccaagcctttcagataagggcactcaacctgtgcagataaacatgagtaccactttaggaaggcatgttgtaagcctgccttttatattgattagatatacaaactgaaactaggaagcttctttttggagttagacctataaatggatcataatgctgtagtgagttttttagaaatgaaacaaaaggtgttcagggaggcagtagggtttggctgaaagagccctcagaggaaggcagtcctgagttttgtttagacagagtcatgtaatgtctttgaaccttcatttccttcgtcatcctccctgtgtgtggattcagttagaaggtatgtaaattcccagcatcatgcttggggatgcagtggatgctcatttgtattcttttctttcccctcttctccccttgccttttgaaaacatcttttaaacaacactttactggtttataaaatacattatttactgttgagaaatatggtaatatagaaaaataataattaaacacctaaaatctcaccccactgctaacattctggcatttttttttttttttagtatctattcccttttttttttttttgctttttgaaaaactttttttaaattgcattctcactactgcagtattgataccttttgtttcttatgttaaaggtatacttctcagccatgtgagattgtggtggattgtggaccatttactgacagaagtgggctttatgaaagactgctgatggaattagaagaagcacttaattttatcaatgattgtaatatatctgtacattcaaaagaaagagattctactttaatttcgaaacaggtaagcatataccaagtaggtatagtgattatattttgaaagctttgttaatttttaatattgaaatgaaaatatgcttaatgcggctcttttctttgcattttagtttaaggtcttaatctttttagacatttttcattgaacataccatattaggttgagttcattgttatccagtgcacatttatattaagtgtagacttcccctatttaaggagctgagctaggattcatgtcatggttatttaagtataaggagtgagtccaatttttgtttctttttggtcagaagagttagttcctgttcaracccttgaattaaacaaattcttccgcagtttcctagtgtgtgtaactggatatgagcctattgtctctcagtggtactgctttgagaagagatcccttaggacagtgatccttccattgtgggccccacatcatcatcagcagcatctgggtggggtcctcaggactgaattttactgtttgcagtcttcagttttgaatttcgataagccctccagtaatctgattcattaaagctcgagaaccactgccctagaactttgcaaccatttgtgaatgttaacactgtattaaatgtgggtcttagtttctctcctgatgatttttttcttctcgagcagcagtgcccacatttttctcaatctttgcattctttcttcctttccttttcccttccctttcctttcctctttccttttctttcttttctttcctgtctttttttcctctctctctctctttctctcctctcctctttctgtacctcccctccctccccctcccctccccctcctcccctccctgtcttcctcccctccccctcttcctcccctcctcctccctctcccctccctcctccccctccctgtcccctccctcctccccccatctctgcctcctctcctcctccccctcctccccctcctcctctccccttctccctctcttcctctcccctcctcctccccttcccccacctttcccctctccctcccccgaccttctccctctccctctctccctctctgcctctctgcctctctccctctccctcaattcctcagttacaccctggccatggattgactttcggctctcaattagagttgtaagatgcagcactctgggagggtccaggatcagagtctgaatttagctgagatgttaatgttgaggagccctgaccttgtggtggtgttttcattgaaatcggataacaggggcttttggagaactgtgacagagtgtgtggaggctrccccagtgcagctgtcctagctccttttccacttccaaccaataaaggcctttcctactgtttagaaagaaagaaagaaaaaagaaatgatgatagagacagctgtgcagtgtttttacaacagtctcaccgtggcatccagaggtgctgactgtagatcgaccaaaattcatccacagtttctagtcagtatagtggaaaacatataatgctggagaatattgtacataaagttcaaggaaaactgtattgctcttccttgatgcctaaagttaaattactgtgctacataaattttatgtaatttggcaggaagtaaatgactcaggtatagttttaactaattacagatctaaaaataagcttcattaacctcatacaattgcatcttttaatttctgtttgattattttattgaaaaaaggagatggttctaggcatatacatacgaaatgagcttgaaaaggctaatggcctctccccccaccttcagggacttaacctaaggctgggttacatttaaggagccatttgagaacaactgaaatcccagttaaaccccacatgaaaatgctacattattattatttggcattaggttttttcttttcttttttttgtagatactatcagactgtcgtgccgtattggtagttctgggaccctggtgtgcagataaagtagctggaatgatggtaagagaactacagaaatacatcaaacatgagcaagaggagctgcacaggaaatttttattgtttacagacactttcctaaggaaaatacatgcactatgtgaagagcacttctcacctgcctcacttgacctgaaatttgtaactcctaaagtaatcaaactgctcgaaatcttacgcaaatataaaccatatgagcgacagcagtttgaaagcgttgagtggtataataatagaaatcaggataattatgtgtcatggagtgattctgaggatgatgatgaggatgaagaaattgaagaaaaagagaagccagagacaaattttccttctccttttaccaacattttgtgcggaattatttttgtggaaagaagatacacagcagttgtcttaaacaggtaaatctgtaagttgactcctttcacatgagaacagggaggcgtcctgtgttgtgatgtgatgcgctgcagcagctgtaagagctagcatgagggttatgtaagtgtccttgacttggcgccatcattgctgatacgtcatgctgtcctgggattgacagagaggatgttttccagaaggctgcttttcatatggctgatatttttttcttaaaggatgctaatctattctaatctacctaaaatggaggacaagtatggtttttaaaaaaatcagtatacatttaagtaaagyattgytttatattcaattttagattcaattcagatatttattaatccttaactatgtgttagacattgtgttaagcatttcacaccaagtgttcccctcaggtagtcttaggagaaattttatctgggtattgtgactaattttttaatgttgatttttttctcttaaaaatatggattcaacttttcaaggctaggttgggcatgatgggttgtgcctgtaattccagcactttgggagccagaggcaggtagattgtttgagttcacaaggggcaacacaacgaaaccctgtctctagaaaaaatacaaaaattagccggtggtggtgtatgcctgtagtcccagctacttgggaggctgtggtgggaagatgagttgagcctgggaggcagaggttgcagtgagctgagatggcaccactgcactccagcctgggcagtagagccagactttgtctccaaaaataaagttttcaaggccacagtgcaaaaagtttagaacaattgaatttattttgggttggttcatagactgcatattaaaattttgtgaatcagaagagaataagaatgttggggaaagttctaagactattagcaaaggtgatattgaatccaaattttaggccgtggattcctactctttctcccttcaatgaaagattttttttctaatttagaaccagccagggagctatacttcagatttctgtcagatggtcacttaatgtatggtccttttggtttgtagatagatactcttatttttttctgccaaaaaaggtccttattttgtacttaaatcaatttacttttctatgagatccattaattggccacagttgatccctaacttttctgcaagtagtgatctcttaggaaaaactaagctttgcttcctaaggtaatttgggatttttttttttctttttctttctttgtgtgtgtgtgykcgcgcgcgcgcgtacacgcacgygcacacgcgcttaactgcttctgaatgtttaggggttttaaaaacttttttgagtaacgagaaattggactcgagggtcatcatctggcagtttttagtctggtaattttcatagtcattgagcctgatccttctgatgaatacaaaggaaaataactttagggaccaaattacatttaaattagaagttgaagattggaaggggacctcactgactatctaatccaacccacttatttttgtaaaaatgagaaagagcctcaggagagagagtgatttgctgtaagttaaattgctagtcaatggcagagacaattctagaatcctaatatcctgactcctagtttccagttctttctatcatagtaatgcccctgggcatcacagaacactaaaaaccagtgctttacagcaggaagattgccaggagacggacctgggagagcgtgactaaggagggattatttcttagggcagggaaaaagcattttgggagtcaaaaaagtttaatgctggcgcagttgtaagcctagttatggacatactccccgtctccatttaggattatataaggattaaataaattttctggggcttggagagaagaaatgggggtgtattttccgccttcctcctgttttctgcatgtatttttaggtaaagatgtgccagtttttattgcaggaatattagcctgaaaaggtttatccagaatcagtcggttacttcctattgactttaaggatcagatgaattgtgatcaactttcataaaatgtgactggaatttagtgctgtatgatgaatcaagagtgctctgagggttgactttatgagcagctaattaaatatacaatagaggtcttgttccagtaagctttttaataagcttagaaaaacttcctgaaattcagattctttccttccatcagtttaatgggaggaaaaacccttctatagtgaatagtttcatgggcatataagctattgtaatatacatgcagttttctactctcctaattaaaaaaaataaatcacagccacttctatatgtagtgtaggtatgtgcacagtcttatgtttatgggtttctttgtaccttatatttacataggggtttctaagttatatatatttaagacatattcacaacactccataggggaggaaagtagatgttctttccatattacagaggaagaaaacaagcatcagtgtgtgaccttcccccaaattacacacatatcaagtggcagaaaatggcttccagtctcaagtccagtgttcttttcaccgtgtaatatactagtattgtgtgatactggcattggacaaacctgggttcacatcctgtctctacccctccccctttttttcctaataactttttattttggaataatttgagatttacagaaaagttggaaaaatggtacggagttctcatatgcccctcacttagtttcccccattgatattatctcatgtcagtgtttgtcacaactaagaaaactaacattggcccattactattaactccagactttatttggattttgacagcttttctactaatgtcctctttttcaaaaaatttatttttatttttttctaaccactagacagtaagggataatgtctttaatccaaggtgtcatatcacatttagttgtcagtatctacccagtttcctctggtctgtcacagtttttcagtttccgtcttgtttttgatgaccttgacagtcttcaggagtacaggtcaggtatttggtgaatgcccctccatttgggtttttcttatgttcttggggttgtactggggtgatcggatatggaagaataccatggaggtgacctgctcttctagtcacattatatcagggggctctcatggtatcaaccacaaaacgtcactcgtcatgttcatcttcatcaatggattgtgatagtgtttgtctgctttctctactgtaaagttacactgtttcccttttcttactctatttggaaggaagtctccaagtctagcccaccctggtagggagggattaatctccacttgctggagagggatatatctatatgtatttggaattcttctgtaaggaaaacttgtctggtttatcctttttatgtaactgtctacttatatttattaattgaatcatgtatttcagttggtggtttcatgtttattttatactttgggccataatccaatactgtgttatttatttgttgctcaaattgttgcagcggtggccactgggagctcttcgagtttagcacccgtgtccctttgacataccctcatccttttgtttttgagcactttctttgtgataccacagggtgctctgggctcttgtatttctccctgcctggccctagaatcagccattttgccgaggagacttggtttcttttctgcccactttgtggatgtatattttgtgaaagttatttaacttttaaaagtttcagtatgttcattcgtaaaatggaaataatacctccctctcttactggcttgttggtaagagactttgtattaaaaatggcagttttatcaaccagcacacagtagatgctaattcttcagccgcttatgcacccatctagggagtgcaacatccgtatgctattatgtaactgtcagtgatctttttttagtgaaatcatagaggaattatatctggttttctccacattgacaagaaaatgtaaggagtaagggatactgttaaaggagttgttgataatgtatttcaataacctggcaggaatttcaaataatgtgtttatatctttgaatttcttttcctcttatggttgtctgcattagttagcatgtttattcagatcacaattttttgtaatacatctattagttttctgaacctaccatacatatttcctatttttggttatgttattttcattctaattggggagaattagatgtacatatacacacaaagtataggctatgaattggtgccagaatttacctatgtcatgagttaagtacaaagattgagaagaagcatttagaaactcttagagcagtttgacagtaattttatatctgctgaatacaataaaattgatgcttgaattttartactttttaaatttcattttcttagtcattcacttttatgaaattctacaaaactgcctctgatggattggaaatttaaaaagaaaagctggttcttcactgcagatcgtttcagaaacactgtgcattagggaacagtatactttgctggtgaacagcttgctggtgaacagcttgtataaactgagtgtaaaaaccaaaagaaacaaataatacattgtcttattttttctgtggtgttacaaactctttaagcagtttgcactgtccattatcctctgggagttcacatgatgtgactgcctggctttgttttccctgaagcctgtagctttgtcctgggtactggttaggcatggccaagattcaccaagtagataaatacatttttctctctaagcattattagcataggtatatcccatgtaattattgcttacaagagattttatttattgtgcctgttgtctcttctgttctctgtggttttgatgtgggtttcattaaggaaaaatgaattgactgttgttgcctctatttcttagctaattgaagtctgccagatggataatttataattttrgcaaagtaaaatacattctttgcctaattaacagtaagttaaaacacattctaaatctctattatattcaaattgatgcttatttatataaaatttggaagtatgtattatttctaaggtgatttattttgtattttagacttttggacatgttatttgtttgcatgtaacactgctttctgttacatcttaaatttattaaaataattaaacacatcttggaacataataagggagctctgattctgaatatttaagtacgtgaactgtagagcttgaactacaagctgtagtttgtagactcccaaactaacctagacacgcaagtgttgtgccggttgggatcaagagagattctagatggccacttccagctctttattattagtctgtttcatgtattttttttttttttaaaagaatgattcaacttaaaaatgcaattttctatttggaatttatactatgtaatatgacttcagagaaaccatgtggaatcgcttatatcaggtgtggaaccatttatcccgtgtgctgagtttttgaatgtggatatttccaaaatagctgtaatggcagcactaactgttaaccttctgcacccgtgtaatgtgatcccgtcccgtagctctttgccatttcttagctagaaggccagctttcagttacaggcactgtgggttaatacagaggagcaggcaggaagagagacagagctcaggaatctcctctttcatgacagggaagggtggggttgccttgccatttctgtgccctgtactatgctgtgcagaattttggtcagtggcctggggacaagaaagcatcagggattgagaggatacaacatttctttcccatgggctctgcttctaatgatatcaggtgataggataagaggaaaagaaatcgcagctggaactcttgttacatttgttgggggtgaaggtttcctttggtgttgggctcactggtcctttctgtataagcacagtagggcctgcagctcaagctgtgcatggtctagagaagggtgttgagttgagagatgagctagtagaactggtagagggatgagtcgagcttttttcattggacgtcctgtcccgaggccaagatctatgaggatccgtgtttctctctgactagctcagtctcatcctgggccacatttctattaaatcaccgtcgccaaatcagctgttggaggtaacgtgaccatttcatttgtcagtacaaaccaatcttgtatttggcgttataagtacttggtccacagatctatgtggtgaagagtgacagtgatttctgtttaagcaagttgggaaaaaaggaccaagaccgttttgttaggtatgtttgcaaaaaatgcatgtacttccattttaaaggaggctttaaaaacaaaagtttattttctttcagcaacgtttaacttccaaatgtgtataattttcttagattgataaaggaagctggcaaacaagatccagagctggcttatatcagtagcaatttcataactggacatggcattgggaagaatcagcctcgcaacaaacagatggaagcagaattcasaaaacaggaagaggtaacttaaatcaaaataagtgtacaataacagttttcgggacatatacagacaaagtgcccatagggtctcccttttttcatagtttcccagaattactattattttttgtattatagaatacttcttcatatattagaccagctgtccccatgaggtagctgtagagtgatttgtatgctcagaattagaatagctatctggcaaaccaattttgtgtcttaattgccatcaaccaacttattttctgtgattggattgatgttacacaactgcatttcatggaaagacaaagcatgtatgaccttaactcttgtacattccatatgactatgaattaacaaactgaaatcttttcctagaaagtgttttctttttttcatttaaaggcctattttgtttcaattcttaaaaaaaaaaacagcactatattttatagattttagcttaaatatttttgtgccttgtaaggtcttaatacaggaaacagcattgtaaagatgctaaaaactaataccatggtctggcttgtacacaaaaacctatttaaagtttattatttaacttaaaattagcagaataattcctgttgaaggccttttctacattgtagctttttgataatttccaaatttggagagtccaggagccagtctgatagatataactgtctgaacactagcttatgttaccatttaatttatcctgaattggagagtctcattaaatcagtttctttgtccatgtttccatgcatgctgagttttctgtgatactgtcatcttctttagcctggccttaaggatttagaatgcccaagagcatgtgtgtcagaaatgacagttgtcatttacttttactaattttttttgttcattttagaaattttcttagaagtgcttttcttggtggattttttttttcaggtacttaggaaatttcgagcacatgagaccaacctgcttattgcaacaagtattgtagaagagggtgttgatataccaaaatgcaacttggtggttcgttttgatttgcccacagaatatcgatcctatgttcaatctaaaggaagagcaagggcacccatctctaattatataatgttagcggatacagacaaaataaaaagttttgaagaagaccttaaaacctacaaagctattgaaaaggtaagatcaacatattaacatgtgccggcagattgggaaaaaaaattaatgtggcttctttgttattctttgtatccataggaacagataatgagttttatctacaggcaataatctcaaaagaggtgtactctgtgtacattgtaaggaagttgagaatgatcacaaagacccggcagtgttatacaaagtgtttgaaagggcacaataagataacagtgaaaatgatcatcacatatgttattkgggatgaacgtctgggaaattgcattgcaaatatggacagtaactgttgactgcttaagttattgagtgattggaaaatgatgacatggtagttacattcagaaagactaacagtcgtgtgtgtgtgtgtgtgtgtgtgtgtgtgtgtctgtgtaggcacggtacagtatagactttgtaccatatggtaagggtctccatacgattggaactgggagggattcattggaagaaggtgtctgcagcaggttactttggagtactgaagtatgtttaggagagagagagatattttcaggagagttttttctgtaggtacagaggcagacagcatacagcagagaggatgtgttttcatcataagttctgttttttaaatgttcagatcttgagaaacaagtgttccaagtcggttgatactggtgagactgacattgatcctgtcatggatgatgatgacgttttcccaccatatgtgttgaggcctgacgatggtggtccacgagtcacaatcaacacggccattggacacatcaataggtatggcatcatatcatttgtgtggaaaacctgggaatgttgyacagtttaagtctaaacctgtacattttgtattgttgacattttgcggttaccagtctttayttagacttgccatattttcgataaagaaaagttacttcttttttcatttttttttaaatcaaaaggcaaaaacagtatcgtgcagcaataaaagttcagtattccttggcaaggctaacataatgaaggcattttaaattaggtttaatttaattttataattctcaccaatttttttctaaatcctgaaattttttgttttgtgccataaccattgggtaatgttgaattttcccctagcaataaagtaagattgtgataaactaatttatgtttttgggtacattgtaatttactttgtccagagctgataataaaatttctaagagctaagaacagcaaatgcattcctggattatatrccaggataatttctattcagagacaaaagagcaagtataagattttctttgtaaccttttattttgaaacaatttcaaactttaaagtgttgtaagaatactagaattccgcatatgcctttcacccagacaccaagagagactcattcagtttcatgagaatgttctttgtagccaaagtatctaccttagagtcaggagttgtcctcaactcctgttgtcacatcttcctagtctccttcaatctggaaccattctttagtctctccttgactttaatgaccttgaaactttggaagatagataggctgtcattttgtagtcttactgtcagtctgggtttgtctgctattttcttatgatgagacccaggttacaaatttttgggcagcacatcactgagacgatggtgtcctctcctcatcctagcttaccaagtcgcacaccatgttgatttgtgcccttaccggtggtaacttagatcacttgagtgaagtctgccagttttctctactgtaaagttccctttcaccccttttataattagtagatatttcatggggagatactttgagacggtataaaatttgttccttttcccagtttgactcattagtgtaagcattctttgatatttctggcccaaattgattattactatgatggctactaaatgattttctaactccattatttctgtatttattagttggcattctaccatccatttcttctctccgtttattcattcttatattatcattttttaatgtcagtgtgaacttatggactcctgttttatttaatgggttataatctatcattatcatttactgtttgttttgatgttaaaattgtttcatatttggccagtgggaaccccttaaagctggtttctttgtctttttaacatctcactattattccttgaatacttccttgttttatggcgcaagacattctagactgccccagccttgatgttggcaatttcctcgaatttagtggagaaaaagttgtagttagaaaccaagaactggatactaggtttattcattgctaccggygtgttgctgctgccaggcgttttagtggacagagctagaatgtttgtttgttcatgtttacatctgtatttgtttcagtgtctwtctgttgatatctctattttcagtgtgacactagaggtttcattctagatttcctcctttctgtctttgtacctcctttctctaataatcagaaatttggctcccattgtcctcaaaataattagtgttcagtcttcctgtatgtagccagtctccctgctctgtagggctgcaactgtggtcaggtgcccttgctgcacaggtcgcaacctcacagggctgctgcccattccagcaccctcctgatgtgggtcctgtcccagcatccctttctgggctagctttctgccctgttccaaccttccctggtgctgttgctcagtgagttgctagttctactgtcctttttgtgtcagcactgggctgtcccgccctctgctgatgccttccttatatgtgtgctggtagttggtgggaaatgtaagatgattaaggaaaaaacattggcagtatgttttcttactggattctgaacaatactttgtgctctattatggtaacactcgacacatgttactatttaaattcaaaattcaatttaaaataaaataaaaaatggagtttcgtagttgtacttctcacatttcaagtgctcaccagccactgccctgttgggcatcgaagatatagaacatctttgcagaagttctgttagacaacactattctgtcttattcgaagtttgaagcagtaaagtttaaatgccacatataaatacaaattcagtagaggggaagaggcacatgacaaatcaaactcgaggttataaatatcaatattttctcagttgtagattcagcctcagaatttctttttcttcacagatactgtgctagattaccaagtgatccgtttactcatctagctcctaaatgcagaacccgagagttgcctgatggtacattttattcaactctttatctgccaattaactcwcctcttcgagcctccattgttgtaagtttagaagaagaaatgattgttatcttttaaaatgtgtcattagtggattttttcagcttttctaagacttgcaagttataggtaaatttgattttaaaatctactttcatgagcaggagccttgtgttgacagaccaaaaataaaaataaaaaccaaatttactttcaaaagtagatttatagattgcttttgtagtcatctacatgttcatatttgtaatagactgtctaatttacagatacttagaactggactaggtgatctctgaagtttcttctaaggtgttactaacatgcacatttttgacagaatcattcaactgtggcttagacacttagagtaatataaaacttattatagatcgttgcgttgtcctagttattttgttggtgactcaaaaatctgctttttgtaaatactgttcttggtctcagtactgatttccaagtgttccaaggtgactaatttctattgcacataaaaagctgctcaatactgttaatgttatagctatgttttgataaatctttctttttgttacatatttattgattagtaaaaataagatactttaaaatcttactgaaatttaaattcatcaaaattgtaaaatcttaattatgacttagtttttactaggcaggacttttaaagatgaatatttcaaatatggagattagaatttttaaaaacttgctggaatttttcaaaataaagaattttgttttggtaaattgaactttaaaratgttggggcagtggtttcataggtgtttcatgtgctagaggtaatacagcgatgtgcatatataatggaaaggtttttgttattttcagggtccaccaatgagctgtgtacgattggctgaaagagttgtagctctcatttgctgtgagaaactgcacaaaattggtaaggatgtttgaaaagcatatacgaatgaaaataaattgcaaccattgtaaaaaaaaagcatatagaggactttatagatctgtaaggattttgtagagctattcacttgctgatcttaatgtgctttggtgaatataaacataagtgttagtaacttgaagatcctacattgttgtgggagctctttgttttccatagcttgactgcaaacaactgtcatttatttgctctctttaatgactccttttaagtacataaaggtcttttcgtaattgttgaatcatgcaccatgaacacttgtgttttaatatgtcagtctctcaaattagtctatactagtatagaaattaatccttttttaaaaaatgaactcagtttcttttttttttttttctcaatcctgctcctgtataagtggacccattttctatggccattttatttagcattgatatgtggtgatgtcatgtttagatgtttttgtttctgaaccttagaacagaatttgcagtccagctcatattggaatatatggatgccaaaatagactttgcctgaagtgtgaatctgattacttttaaattgtaaaaggcaaaggtgctttagtttccattacttttccaggtccttctaacatagttctgttctamattctttactaattaatcaggcaaaatctggattgtgttaattctctctttaaatttgttaggcgaactggatgaccatttgatgccagttgggaaagagactgttaaatatgaagaggagcttgatttgcatgatgaagaagagaccagtgttccaggaagaccaggttccacgaaacgaaggcagtgctacccaaaagcagttagtattggttagaacagagtaaaaacctagcatttctgactttgttttccgctacatcaaatctcagttcctctgcttggctggcttcccacacccttacagtttggcccactctggatctcagctcctttctccgattcacagcttctctcagatcagcctctttccttcctaatgtagaatgtgtgctcttccacttcagaggttgcttttgtttttcttctcaaaaggattcttggacccatctgtcatattctatccagaatgagattatttcatttaaatagacattctttgtttcattcagtttagtggtgtgattcttgttttacttatgatttggggctaagacagaagaggatttgtgtgataaaataagcaagtgaaaagatgccctctcaagatgacaggtacactggaaggtagaagcacaaatatctgtcaggagttatgtcagattcccagtgtgggccattgggaatcgaaataagttatttccatggagtgtttccagctcaatctgtgggcatcctagcagagttcacacatgaaagcatctctaaatctaacttctagtaatagacaaacttggctgaagtatttatttttaaaatatttgttaatatttttacctcataagaaccccaagcaaaagcagaattttgctgtgtgtagtagtcccgcttacccttggagggtatgttccaagacccacagtggaaactgcagatagtaccgatcctccagcagctcaacgttgtttcattagaacgttgacaaggaaaaaaaaaatcgttcccagccagggccactgtctctatgtggggttggcacattctcctcatgtctgcttactccggtttcctactacatcccaaaactgtgcacatcaggtgaactggcgtgtctgcactgccccactgtgagtgagcatggggatgcatgtgcgtgtgccctgccacagagtggtgtcctgtccgggatgggttcctgcatggggccctgagctgccaggatagactctggcacccttggccctgaactggaataagtgggtgaataatcatcttccttgtttttattcatctttcttaagtgtatctatagctcacatttattttaatgcttaatattaaaagtgtttttttttaatttagaaatttggtgatgtttttgtgatcagaaatgtgctggaggaatttaactgatttatgtcaattagcctgtgggaaaattggtttctttctaccaattggttgtttcccttagccagtttctaagaacctgccgaagacattaagtgaggacttacagcatatattatgctttttaaaatacgtttgtacatatttrtgatagtttaagatataaattaggcacagtaataacaaaatagaacaattgtaaccatatactgtaataaaagttatgtgaatgtggtctctctcaaaatactgtactgtacacacctgttattggaccgtgactgacctcaggttactgaaaccatggaggctgcagataagcggggactgctgtgcctgtatgttagcctaaatatgtgtttctttggttttgcttatgcagttttaccaagtttttactttataaaattttgcacccagcttagcattttcaagattcagaatcatgtttttaaaaaatcatgaatgttacccattttcccaaaatgcatgttttcctcataccaaattttcacgtgagactagtttcatgtgataaagtcgttaatgataagtgtttctaaaagcatagtattggctgggtgtggtggttcacacctgtgatcccagcattttaggaggctgaggcaggaggatcacttgaggccaggaatccgagaccagcctggtcaacatagtgagaccttgtctctacaaaaaaagaaaagcatagtactgcctggcatcctgtttaattaatagatacattctttattttctgattctctattaaatataactgtctcttttaccagcatttttgtaccttttaactacagatgcagttctttttcattgaacctcaggaactgcaagaccataatctgaaggattgtgttaatattgaaagcctagcagcaatgtccatttaattatggttcactcacataatgaggtagccattacaaatgatgatattggctcatattgactcggacagatattctctttacagtaacgggataaaaatcaggctatctcacaaacacagayacacacataccctaatatacaccagtgttgtgtgattttatttgtattgaaaaatataaatgtatatatgtttctatgtatttatgcatagaaaaagagtctaggaattatacagtgtatcaaaatgttaataaagrctgtctttgagtgataggattatatgtgattttttaaaaatttgcctaacttcattttctgatactctacagttaatacataaaaagcccaaggaagagatgagttttcttgtcagaagaaatagatcaaatgaatagtatttttaaaaaggccctacagtgttggattgttttatgtataattttggtattagctatgtagtcagcactgcattataatgtatgtgaacttgggccaccgtcagcagccctgtcctgagatccgctgacttacccagcagggttaagtaattaagaagtgtcatgcctcgggtattttcttagcttattctcatcagcttttagtaaagccagaattaatttgttttcttgctgacatctggaaaagaggctaatatgcttgagcatgacgcttaattttcctttccaactctagattccagagtgtttgagggatagttatcccagacctgatcagccctgttacctgtatgtgataggaatggttttaactacacctttacctgatgaactcaactttagaaggcggaagctctatcctcctgaagataccacaagatgctttggaatactgacggccaaacccatacctcaggtaggtatttcataatgagtacttatgtcaaaaacgtcttgcttaggaaaaggaaaaaaaaaaaaactagtagtaagtaccttttgttacctcagtatgtttaatatttaaagatcgaggtgcctcttctatttctccactagaaagcatcatttctgttctgaagttaactgtaatggaataaaatacctgttaattttgaggggtgctttacatttccttttgctaagattccacactttcctgtgtacacacgctctggagaggttaccatatccattgagttgaagaagtctggtttcatgttgtctctacaaatgcttgagttgattacaagacttcaccagtatrtattctcacatattcttcggcttgaaaaacctgcactagaatttaaacctacagacgctgattcagcatactgtgttctacctcttaatgttggtaagaaaaaaatctcttactttgataactctagacacatatacaaacatacagctttggtatgaaacttatctgtatcatgttttaacaagctaaagagtcgtttttctcttctargttaatgactccagcactttggatattgactttaaattcatggaagatattgagaagtctgaagctcgcataggcattcccagtacaaagtatacaaaagaaacaccctttgtttttaaattagaagattaccaagatgccgttatcattccaaggtaggtatttaaatggaaaggaaaatggtggtgatactttgttttaaaagatgcactaggtcgggcacggtggctcacgcctgcagtcccagcactttgggaggccaaggcgggcagatcatgaggtcaggagattgagaccatcctggccagcatggtgaaacctcgtctctactaaaaatacaaaaaattagccaggcgtggtggtgcacgcctgtagtcccagttactcgggaggctgaggcagggcaatcacttcaagctaggaggcggagattgcagtgagctgagatcgctccactgcactccagcctggagacacaccaagactctgtctcaaaaaaaaaaaaaaaattcacttattcacatgggaatataagtgggctgtgattttagcattgtaattactaataggaaatatattagtcagtcaggcatggtgatgcgtgctgtaatcacagctactcagggctgaggtgggaagattgcttcagcccaggatttctaggctgtgcagtaagctgtgatcacaccactacactccagcctgggcaacagatcggggaaaagaaagaaactcttaaggtcgacccgttctctccagtatacttgcttaaaaaataatacctaaaacgttatagataaggaattttcctttgtaaagggtcagataatctaatgttgataggctttcttcttaaaatctccatccttttagtctccagagtcttatagaatttgattataaataatgatttcatttcttaaaatttttataaggaatattaagctctgtgaaaatagtaaatccagaatgatttttttccttattttataaaaatttagggaatggagttttggggcaatacaatacaggcagttttcaaataattataatactagttgtaattcaatctttgattttttttttctttttgcacctcaaaaccatattttaaatgttagttatcaggaccatcactatcatagatgatgcagtaatacgttttatatgacaagtgtctttaatgtttagcattagtaatatacaaagtatttactctttggatagtgtaaattttttatactatttatatagatgaaatagatatgtaaaggtgccatttagcttcatgtgttatcaaaatgtagatatttagaacaagaataataataaaatgggacaataatgtgtccatttttacttgataaaaatacagttcttacatacttgaaatatatttggaatacagatgtttattgttacttatttttaatcttttgaattcttaatcatcatttccatactacaaacagttgtattttgagaatagttgatttaaatcaaaaagcaactgattgtttttttgtttttcttttttagatatcgcaattttgatcagcctcatcgattttatgtagctgatgtgtacactgatcttaccccactcagtaaatttccttcccctgagtatgaaacttttgcagaatattataaaacaaagtacaaccttgacctaaccaatctcaaccagccactgctggatgtggaccacacatcttcaaggtaaggggcttcagagatgacacttggattgcacttgagggattcttaccagacatcactagacatgcagaggttcactgtccccctgcccacccgtggactatctgaaatcaggagatgctttgcacacaaacttgcccaaggggtagcccaagaggctgtagttgaaatgagctcttcaggtggtttttggagaaccactgtgaatatgtactcatttttgtgtgtttgataaaattgttttggaattcttrcagacttaatctkttgacacctcgacatttgaatcagaaggggaaagcrcttcctttaagcagtgctgagaagaggaaagccaaatgggaaagtctgcagaataaacaggtaatgagttaattgtactagcataacttagtatttgtttgagtattaaagattattaaagataagtttgaattttatcttaccaagttaaatgcatgattcgttaattttttagaagttacctaatcctcaaattttgttttgttttgttttaattagtattatgtgttgaatgttayttgaatgttctttttggtaagtattgagagttttgtttttatacttggcccattaatatatcacaaaatcattctcataaatcctttgataaatcccatttggccttagaggattatttttacaaatattttttaaaattaagttttactagcatttatgattttctttatccattagtgaaattggtctttttttttttcttttgtgtgtgcgctttgtatttatctgtccatttttccccttacttgaagatactggttccagaactctgtgctatacatccaattccagcatcactgtggagaaaagctgtttgtctccccagcatactttatcgccttcactgccttttgactgcagaggagctaagagcccagactgccagcgatgctggcgtgggagtcagatcacttcctgcggattttaggtatgcctgtgcagtcagccagaaagaacacagatcatgagatcctgtttgcaaaagaacagaattaagttaaaattgtatataaaataattcttaaaagagtaaaaagaaaataatggatatcttatgtcttgtcaagtctcagagggagatgagaatctgaggtcagaaataaccattactgcttaagccataacagttggagtgagaatgaaattgttctttgttactgcatcagcattttcagtctgttttttcttttaaaaatccaaatatatgttaaaaagcaatagccttagcatgttctttgtcttcattattttcttcccattagtaaaatctctgcattctaaagaaactgttggcttaaacactcacattagttctggttatccaattggcaatatcaagactgttctagggattgaaggaattttaaaatataataggaataaccacaatatttattggttagttgctatagtgccaaacactagcttaaatgctgtaccctgtgttagttagctcatttaatcattaagacagtgctatgagataggaattgttagcccttttctcaggtgcagaagctgaggcacagagagtttatgtaagttgcccagagttactcagcgggttaaccagagtgcctgggattccaacccgtgaagctaggccccaggtcctgcaggatgcctgcaagcttcgtgaccttcttaactaccacacctagagtctagggccagggattaaagcagtagataaaaccatgtcccactttataatttacactgtaaattaaaaatttggaaacttgcttctattctaaagtttaggagtacatttttgggatctttgtttttgtttttaaattcaaattgctgttgctctcagcctagctgttttgaagaatctgatgtaaagttataaaaatgtctttgcagataccctaacttagacttcgggtggaaaaaatctattgacagcaaatctttcatctcaatttctaactcctcttcagctgaaaatgataattactgtaagcacagcacaattgtccctgaaaatgctgcacatcaaggtgctaatagaacctcctctctagaaaatcatgaccaaatgtctgtgaactgcagaacgttgctcagcgagtcccctggtaagctccacgttgaagtttcagcagatcttacagcaattaatggtctttcttacaatcaaaatctcgccaatggcagttatgatttagctaacagagacttttgccaaggaaatcagctaaattactacaagcaggaaatacccgtgcaaccaactacctcatattccattcagaatttatacagttacgagaaccagccccagcccagcgatgaatgtactctcctgagtaataaataccttgatggaaatgctaacaaatctacctcagatggaagtcctgtgatggccgtaatgcctggtacgacagacactattcaagtgctcaagggcaggatggattctgagcagagcccttctattgggtactcctcaaggactcttggccccaatcctggacttattcttcaggctttgactctgtcaaacgctagtgatggatttaacctggagcggcttgaaatgcttggcgactcctttttaaagcatgccatcaccacatatctattttgcacttaccctgatgcgcatgagggccgcctttcatatatgagaagcaaaaaggtaagagatgatttttttattttgagcagttaattattcagtgtgcctgaaagtggtttgcagtgttggataatctcagaggatgagaacgtatcatgctcagaaattgctacaccggccaagcacagctgctcccttgttctaccagggccagcgaaagcctgtggcagaactacctggcagttgatgagtattgctttacaccaatcccacactcaggttttggggcttagctgatctccacgtgccttactttttgattgaaagtcagttcaaaggaagctatgcaagtgtgtacaccccttgatcctgagggggatatgaagaaatgtgcattgtagtcagtcaaggagcttctgctttgttgagttaaacatttatttgagagggtacgtcttggcttacaaggcatacagacatgagtaagacacaagtcttgtggaggagctcatctccaaagttttggagagtggagcggagaagagtaacaagcttcacagagcttggctgctctccagtgtgaagagggtgacaccagagttctgagtaattaacgctcgatagctcagagaaagggcgggctcttaaactcagcatggactaagacttaagaaaaggaatgaaggtaagatattcaagttatgggggaaaaatggaaaaaagtctcacaaggcaacatgagcctcctggacaaataccttagaaagctgctgatcacttgcagcactcagaaggaaggagcatcactgttgaatcaaggatggcattaatggaggaggcaagttgacagtgcataagcaaagtgaacagatggcagagcatgtcagcgtcagggaagcagccgtggcagcagtcagaagtgtggaaatacctgagaaaaggcttgaaaaggcagctggggtgaagctgtatcgtggaaggccttgaatgctgggctaaggagtttgcacgtgttttgaatgttgtaggcactgttgaaggaatttagagcaaggaactattaatgttaataaagtggtagtttaaaatgattaatctggtagcagaatgtagtgtgagttgaaaagcatatccaaaccaacagcagaagcagagaatgggatagaactagagttctggtagagaggaaggggctgaggtgagtgagaatttcagaagaaataattttagctaacaatttaaaagtgcttactctgcactactctaaaagataaccgtatacgcacacacacgtacacacacccacatatatacacatatatgcatataaacctaatttaatttttataattctgagaggtagaaacttttattttccccattttataggtgagaataggctggagaagttagcttgcccaaggtcacttggcaagtaagtggcagagcttgggtcgaatccagacagcctggctttggagaccttccccttccccatcacactaactgctccggatagaaccatcacaccaggcagcacaccaagcatttcccaagtgctcactcattcactcttctctaagcctctgggaaagagacaacacatccctgttttgcagatgaggggactcacacttagagagtcgaatgggctcctgtcaggtcacctaactgttcatctgggagagtcaggagtgtgtccaaggcctcccaggatgatcttgaggtggactggaggcrcagtcataacaaccacgtaaactggcaacttgggggcagtggcagtagcagggaggtagggagaaatgtgggaagtccatgttagagttgagattttagacctcatggaatatgaagtggaaatgttcagataattgaggctgtaggattcagatacggttttgtagagtagtcgccatacggaagctctgagaatggatgagatttccaagaggtggttgcaggaagaaagtatcagaggcttggacaagtgtggcataggcaataggataggatactctgttagacaagacagaggtgactttctattacaaaactcgtccatttgtctgctcagaaaccttctactccttatttctgcagaaagaatgatcactccctcagcctgctgttcaggccctttcagccctgatgcgttttggatcctaagcaggtggaagccccttgcagctcattggacagactccacgctcagacccccagccttggggcccttgctctgtccttccttctgcagagggcttgcctccatctctacctgtccagaattttgccccatatttgagaccttacgtagctctttcttcatcctgcccaccatttctgtcaacttggaatgtgatttccctcccatgagtccacgttgtactttatcctcttcttggcgcttgtgatgctttgttctcttagcttggaaagggaagctagcatttatttcagcctgctacgtttcaggcagagagggagagtacttttggctatagtggtcacacgtaccctccttttccctgctagcctgtgtgtcacgaggactgcccctctgtcctgctgccatcgttccctcagggttgcccaatcgagtgcctctcatatggggggtgtctattaaacaatagttgagttacatgggaagagggctaatgaagtacttaataataaggaaccgagctttatgaaaatgaaaatgggattgacaattctagaccctagtttccaagtactaacttgacagaaatgcaatgatgtgagaaattaagaaggagatagaggcattaggaaaaacagaccggagtagagggtaagatagtaaagctgttccattaatgtgaataaacagaaaccttttggttcattttttttaagttgaataaaagtgtcttgaaatggctgtaaaacaaaggaataatatttgagagagcattacagttgaaatcccgtttgtggcttcgattctaggaatataacattgtttcagttttgttcggtgccagttttcactttgcagctagagctgatggcatcctccccccatttcattgaaaatattgtgacatcttgactttttctatgggttcttttctactttggtaattccagttagcagtttgcattttatatcatcaggttgtattttcaaggctttgatattgtctgaagtgtttcttctcagtcattcataaggagtatgcatagttatatacattattttttctgctctgcatcttatattcagaaatatttacaccaaaaaagcatagaatatgtgggaatttaatattctttttataacatgaatgggtagaaaaactgtagagcccttataattaattgatgacatataattaattgattaattttaagaacatttaactgaggatatgttaatatgccttgaatgaattccagcagtgatcatttatggataagtatcctaatattttctgctaaaggtcagcaactgtaatctgtatcgccttggaaaaaagaagggactacccagccgcatggtggtgtcaatatttgatccccctgtgaattggcttcctcctggttatgtagtaaatcaagacaaaagcaacacagataaatgggaaaaagatgaaatggtaagtttkktgtgtgtgtgtgtgtgtgtgtgtgtgtgtgtgtgtaactggagggatttacttttcggtgagccaaataatttgttttattaattttttgtttcattttcttggtatgtttataatagagtagatatttgatatatttaattaattcctttaattacactgtcttttcactgaattcagaaatagtattataattttgatggaggcaaatttctatttttattatttcttttccaaaggcataagagtatgtgatgttttgactttgagttttgctcttctttaaaaaaatttcactttgctgttattacaatttatcctagatccttagctctgttcagtgaaatgacttttcagtgacctgtgatctccagtctgtctgtgaaataattaatttcagtaaaatcttgcttttgtagctcagggttttcccagtcaggactcctgtgaacttaaaaaaaaaaaatcatccataaagattgttattttctggaaataatttaaatcttgccagtgacttaagaagactccaaatatcagcaacagccrcttcattttgtcttgtcttgaaggccaccagagggcacttgggagggcctccaaactgcaggaaccagcgcagtggtggttgactgggagagttctagtgcctcttccgaagttaaaggcaatgcttcagacagtttcatttcttggagatttattttgcattaaaaataaattggctcattgttacttcatttttacctcaggccaacaatgataataccgtttttttctttcaaaggttatatttttaaatatccattttctccatgtcttctttgtgatgcatgtatcctatatatctgcctttaagtatttccaggtagcatgttcagtgacactatttggatttttacctatttattgaggatgtttttaactcatgtagtatttgtcttattacagaattagaacttatttggaaaagcattaagggaatattttaatgcaagttaggtccgaacaattatttgttattaatttagaaatatgtagaaccttagaggaaaatgtatagattttcaactttagaaatggtatggtatttctatgaataacattccagtaacagtcatcctcctttgttaataccgtttcataatgtttttggctctttttaaaaacttgtagcatgaaggtgacattggcatgtcattgattttttttttaagatacaacacaaagttcaatttatttttcttaatgtttctgatggcactttggttattggaattcattagaaatactgttcagatttttatttagtaagttacttttattgaaatataggcccttgcattatattgaaaagatacactgtggttttggctggttgcattgccattctccctaccttgctctggcccttcagcaaatgggcttaagtggaaacctttgcatgctaaaacgcctcttaatagacgagagtatcaaagttgacttgaatgatatagaaaaggatttcatgtggctgttttttcttaaaaggcttgaagtgctcttgaaaaacattttatgagacagaaccccactcttttgtagatgaagcatctgaaacccagaggcactaaaaggctttgcccaggatcacacagtttgtgataaaagtcagccctttgtgatttttgtgctctgccacttttggcttatggtggcacctttctaaagatacagaaggtttttttcaataaaaaaaaaatattgtctgattttttaaaaatcgcagtttggccctctttttcttaaggaccaatcaaaaacatcttcatgttgccttggaaagtctaagattgttagcaggaaatgttccttgaggtctgccgctacagttgcttttggtgttccttattcttgaaaaggtgtttctttcttaattaaaaaaatgaaaagataaatagttagagatatggcttggcttactgctatttcttttcagacaaatgtagtgtttatatcttgagtctagtttaaaatatttgtagtatttaaaaaatgcttgaaggttgcaacttttttttgtcagaacactggaaagttgttacaatcaacattgatgcacacccttcgtcttcccccttcacaagttttttggttttttaaaaacttgcataacagaaatttggcatctttctaggattgcaaagaagttacatcattactgaaatctagcccattattaaggttgtcactcacaaataagcttttgccaaagaaattggaattagcaaagatcttttgacagaaattggattgttgtgtttcatgttagtctaaattttcttccatttttgtcagttatgctataatctgttcccctgattaccgtagttcagagtggagggaaaaarcgtaacttctcaaattcatagcttagtgcagtgatcacttttattttttaaggaaagcagtgtagtttttttgtggcaagtatactttgaagtggaaatagggacaaaaagctttattataaaatcctattgtacattttaaaaaatgattttatctgtttttatattatattcttaattgcaaaggtaatgcttttctacatctggaatttcgttttattagtttgaaaatctttttgaaaatcaaattaccacattttcaaattttgtcagcaaaattgaagatctgtgtgatcagcatatgagtgctttcattgtgtgtcctaccagagttagacgacttagttgaagttttgcattgtggacattaattttaactttatatccatgttcaaagtccttaacttaaagcttcatactggataaaggtcattttataacttagaaaacgaacattcaaagaacatgttttactttgtttatatgattaaataacttattttatgttaattgaaaacaaatggccatgattttaaagttgccttttagtatttgtggttgtcatttgaaattatccataacccttgcttttattgagtttcaaacccttttaaaaacagcagctatgtttcccctccttccccattccccctcgtttcagacaaaagactgcatgctggcgaatggcaaactggatgaggattacgaggaggaggatgaggaggaggagagcctgatgtggagggctccgaaggaagaggctgactatgaagatgatttcctggagtatgatcaggaacatatcagatttatagataatatgttaatggggtcaggagcttttgtaaagaaaatctctctttctcctttttcaaccactgattctgcatatgaatggaaaatgcccaaaaaatcctccttaggtagtatgccattttcatcagattttgaggattttgactacagctcttgggatgcaatgtgctatctggatcctagcaaagctgttgaagaagatgactttgtggtggggttctggaatccatcagaagaaaactgtggtgttgacacgggaaagcagtccatttcttacgacttgcacactgagcagtgtattgctgacaaaagcatagcrgactgtgtggaagccctgctgggctgctatttaaccagctgtggggagagggctgctcagcttttcctctgttcactggggctgaaggtgctcccggtaattaaaaggactgatcgggaaaaggccctgtgccctactcgggagaatttcaacagccaacaaaagaacctttcagtgagctgtgctgctgcttctgtggccagttcacgctcttctgtattgaaagactcggaatatggttgtttgaagattccaccaagatgtatgtttgatcatccagatgcagataaaacactgaatcaccttatatcggggtttgaaaattttgaaaagaaaatcaactacagattcaagaataaggcttaccttctccaggcttttacacatgcctcctaccactacaatactatcactggtaaggagcccacgaccagacttcatttctgggaaaatgagactttgtgttgatctcatcgtgttggccttgtaaaagtgatctatgcatgtacagtgttcatgcttaatattcaagggatggggcggggaacaaaaggaatagaaagaattcttttccttgttatttggggagcacgtattgctttataactttggttgttgggagtatggctatcatataccctcatcagtgtcattttatatctgcctaattagagaaattttaaccttagtattttgatgtgttttccccattttatcctccgcaaatatctttctcttgcccattcagtgctgcttttggtttttgatttagttgtatattctggatgtatttccacagccttttattgttcttcctggacaaaaagacccctcctttagggtctttttaaagatggatagattaaaagattaaaagcaatgatttcacaagaaggttgcgtggcccttgctgtgactctgctgtcatcttctacttctcactgtgctctgtatttgcccctcttttaatagactgtcaacccattagattagaagggagaacaagcccctcacacccaaatcagcttcaggctgtgaaacacagctgaagtttacatttcaatttctgtatcagaaaaataagtgcctgaattcagaacaccaaagcaaagtataaagtttgtagtttatataataaaagcagcgtaggttaaggtgatcagcaaaatgtaaaaaccaaaaagtgaaaaactatctgactctggactggaaagactgatgaaactaaagcctaattttcgttatggaggaaaaatgatacgtggctttcgactacattctgctggaagttccgagacctgggttctcgcctagcagtccctgcttctwaattccttgcttattctgggacaagtcaccatcggtccctgcctcagtttcctcagctggatatattattttaatcactgtgagaaaatagaggtgttgatttaacattgatcattttcacattttgacaaccagtttacctgcctttgctccctttcacaactcttctttctcaatctcttggtttgtggtaaattcatttctataatagctcaagttaagaagagggtcttcttttcctgtcatcctgtgtaacaaaaatagcccaggaatagtgaggaatggtatcacttatgcacagattccagagtgtgaatgagactttagcgatggcagcacagtgtagccacatggagaggtgtgtgcggccctggtttcacttaagtgatgatgtgtgagggagactcgagaggaaggccccagcacctgcccagacagcacagtgccagagaaaagcattcagtgatcatgatagcacctgtgaggttttgtttttccttcttaacaagcgttagtcttttgaccacttgaagattttatgaccccagtttatataagaratgtacttaatttgtcattaaaatttagtttccagaggctttttagtatgatatgtcagataycctttttgaagaatatatgtatgaaaatgattgtaaatacaaatcttcttcggatttggggatcagttgctatgtggggatagtgtaaatgcttctgcacaagcttacggttccacttcggatcccctcagattgttaccagcgcttagaattcctgggagatgcgattttggactacctcataaccaagcacctttatgaagacccgcggcagcactccccgggggtcctgacagacctgcggtctgccctggtcaacaacaccatctttgcatcgctggctgtaaagtacgactaccacaagtacttcaaagctgtctctcctgagctcttccatgtcattgatgactttgtgcagtttcagcttgagaagaatgaaatgcaaggaatggattctgaggttagtgctgttcaaaacgatgttgaaaaaagtggtctaactaggagtctctgtagtttcagagttctgacggcatagtggtctaaagggacagcaggaggtcaggggtgtgggacccagtgtgctgtgttctgtgggagcacgagtgaactgcagtttgcaggtaggcctcttgaacttgtctgcccccactgtgggctgtgtggtcattcaggtgaagagaaggaaccaggcctttcagttaggtacccttcccacgccttcatgagggcttccagcattgaggcatgccaaagaagtggcctccactgccggaccccaaggcaggtttagctttagtaaaagcccagtgtagcttatccttccytttttaaatggatcagaaatatttgctaatatctcagggaagcatcataaatatacattctgcttctacttgaagtgggaaaatctaatttaaaaaacaaacttctaaatttttgaccattggaatttgggaggcttctattgtaagttcagccaaaggctgtctggtgacagagctaattctaatgtgtttgtgagctatttcgaatttttgtaggaaaggatattgcttagatctttccagtctcttaacattcatctgcatacctgtgtcccccagagagactctcatttcctcctcttcccatttcatttcctttgattttcttatttttgtagattttcttataaggagtcaggaaatacaaccttaatactagtagctgttttagttgtcattgctttaatttgtaccttcccctttttaattgcaccaaacctttgttggggagtagtgactttctatgacaaaaattaagagtaggtttgaagtctagccgcagagccgagttcacgccctgccagctgcccagatgtgcactggaggagtcagtaggccctgctcttactttaacgcgcctctgtgctcttgtccaagatgaacagcctgagctggagcgtggcaggctgtgaggcgagaaggcgggaccagctcgtagacttccaagtgttacctagtctcattctttagaaatagctaagcttgaaatttgaggaattagttaaaattagatttaagctctctttggatgccagtggggcatattggttttgttagtttttgttcattcttttccttccctttgtttatataaacatatgtatagaagttacaagaactgattggaaatgtcatggtctggcatttctaacttactatttgatcttaagaaagtctctttacctctctgggcctccgtttcctcagctgtaaaaagagagaattaaacttggtaagttttaaaattcctttctatctcaaaaccataaatatgaacaataagtctgtttttttaagtaatcagcagtataaatgtattatatgtaactttgtatggctaaacaacctattagaaattagtattttcccactttctctttatttttttcacaaatgatttgtgttgattttagaaaagttagtacaagtaaataagaagaaaattagttaaatttgcctgattatgctacctcggaaataaccaatattaacattttgggaggaattgtggatgtgtatagatataaacatatctaaaatgtaaaatggaattctrttatgtataggatactgtcacctgttcttttcacgtataatatattgtggctgactttccgtgtattgatgggtatcgtgatgctcaggggccacacgctagtcaacacgtggctgattgatttaaacgcttctttatggccgagtaattaagtagtttttggttaggatgtttaataaccatggaggtgataaatacgcttatgtatctagttacctccttaaaataagttcttagagatgcaattgctgcatcaaagaattgtgaacttttcaaaggcttttgatgcatgattttcttttattaatttgcatacatgctatgtcagatactcggttatagtgaacacatatctagtggcttaatgaagagggaacttggaggaaaaaatctttcaaatataatttccctatttccctacaacagcgatttctgctccccaaagcagcatacacccgtgccagcaccagaccaattagtactattgaatgcttgccaagcagctagggagtagaactgttttaaagtatagttctttgattacgagtgaatttgaatttttttcatacttttattgactatttctaattctttgttaaggttgtttaaagttagaagtaatcttttttctttgctgggtatatagaataataaatggggtggggatattttttctttttttcttgagaagtttgaaaaacttttttaaaaatataacatttgttttactattacaatatagtaggcataccataaatggtatttccccccttactaaagaagtaacaaaagtcatatatccaagaaaagaaactacatctgtggactgcctgtaaaagtggcctttttgcttacaagtcacttttccctctgtaatagcttaggagatctgaggaggatgaagagaaagaagaggatattgaagttccaaaggccatgggggatatttttgagtcgcttgctggtgccatttacatggatagtgggatgtcactggagacagtctggcaggtgtactatcccatgatgcggccactaataggtattgttggctccctttagaaagaaaaaaacccacaaaattaaaaacaacttcrgagatattattcatattattctttcattttgattgcagaaaagttttctgcaaatgtaccccgttcccctgtgcgagaattgcttgaaatggaaccagaaactgccaaatttaggtaagcaaaaaatgtacatggaaaaaacattaacttaaaaacatcaaaggggaaaagttcacaaagatattgtaaactaatgattcygaaaaatatttacactgtggtgtgctgttgtcagatttctgtttgtaatctgattgacttctcttttttccttctgtttttatgaaataatgctgtaataaagactagacggcagccctgtctgtcgggggtatgcaattgcagtaagtcgtaacgcgtgtttcctttgtgtggtgtcagcttatacatgggactcctggcctgagagtgcacactaaatgctgattgacaatgataataaatacttctgacttctaattcaagctgtttggattttttacagcccggctgagagaacttacgacgggaaggtcagagtcactgtggaagtagtaggaaaggggaaatttaaaggtgttggtcgaagttacaggattgccaaatctgcagcagcaagaagagccctccgaagcctcaaagctaatcaacctcaggttcccaatagctgaaaccgctttttaaaattcaaaacaagaaacaaaacaaaaaaaattaaggggaaaattatttaaatcggaaaggaagacttaaagttgwtagtgagtggaatgaattgaaggcagaatttaaagtttggttgataacaggatagataacagaataaaacatttaacatatgtataaaattttggaactaattgtagttttagttttttgcgcaaacacaatcttatcttctttcctcacttctgctttgtttaaatcacaagagtgctttaatgatgacatttagcaagtgctcaaaataattgacaggttttgttttttttttttgagtttatgtcagctttgcttagtgttagaaggccatggagcttaaacctccagcagtccctaggatgatgtagattcttctccatctctccgtgtgtgcagtagtgccagtcctgcagtagttrataagctgaataraaagataaggttttcgagaggagaagtgcgccaatgttgtcttttctttccacgttatactgtgtaaggtgatgttcccggtcgctgttgcacctgatagtaagggacagatttttaatgaacattggctggcatgttggtgaatcacattttagttttctgatgccacatagtcttgcataaaaaagggttcttgccttaaaagtgaaaccttcatggatagtctttaatctctgatctttttggaacaaactgttttacattcctttcattttattatgcattagacgttgagacagcgtgatacttacaactcactagtatagttgtaacttattacaggatcatactaaaatttctgtcatatgtatactgaagacattttaaaaaccagaatatgtagtctacggatattttttatcataaaaatgatctttggctaaacaccccattttactaaagtcctcctgccaggtagttcccactgatggaaatgtttatggcaaataattttgccttctaggctgttgctctaacaaaataaaccttagacatatcacacctaaaatatgctgcagattttataattgattggttacttatttaagaagcaaaacacagcacctttacccttagtctcctcacataaatttcttactatacttttcataatgttgcatgcatatttcacctaccaaagctgtgctgttaatgccgtgaaagtttaacgtttgcgataaactgccgtaattttgatacatctgtgatttaggtcattaatttagataaactagctcattatttccatctttggaaaaggaaaaaaaaaaaaacttctttaggcatttgcctaagtttctttaattagacttgtaggcactcttcacttaaatacctcagttcttcttttcttttgcatgcatttttcccctgtttggtgctatgtttatgtattatgcttgaaattttaatttttttttttttgcactgtaactataatacctcttaatttacctttttaaaagctgtgggtcagtcttgcactcccatcaacataccagtagaggtttgctgcaatttgccccgttaattatgcttgaagtttaagaaagctgagcagaggtgtctcatatttcccagcacatgattctgaacttgatgcttcatggaatgctgcatttatatgtaagtgacatttgaatactgtccttcctgctttatctgcatcatccacccacagagaaatgcctctgtgcgagtgcaccgacagaaaactgtcagctctgctttctaaggaaccctgagtgaggggggtattaagcttctccagtgttttttgttgtctccaatcttaaacttaaattgagatctaaattattaaacgagtttttgagcaaattaggtgacttgttttaaaaatatttaattccgatttggaaccttagatgtctatttgattttttaaaaaaccttaatgtaagatatgaccagttaaaacaaagcaattcttgaattatataactgtaaaagtgtgcagttaacaaggctggatgtgaattttattctgagggtgatttgtgatcaagtttaatcacaaatctcttaatatttataaactacctgatgccaggagcttagggctttgcattgtgtctaatacattgatcccagtgttacgggattctcttgattcctggcaccaaaatcagattgttttcacagttatgattcccagtgggagaaaaatgcctcaatatatttgtaaccttaagaagagtatttttttgttaatactaagatgttcaaacttagacatgattaggtcatacattctcaggggttcaaatttccttctaccattcaaatgttttatcaacagcaaacttcagccgtttcactttttgttggagaaaaatagtagattttaatttgactcacagtttgaagcattctgtgatcccctggttactgagttaaaaaataaaaaagtacgagttagacatatgaaatggttatgaacgcttttgtgctgctgatttttaatgctgtaaagttttcctgtgtttagcttgttgaaatgttttgcatctgtcaattaaggaaaaaaaaaatcactctatgttgccccactttagagccctgtgtgccaccctgtgttcctgtgattgcaatgtgagaccgaatgtaatatggaaaacctaccagtggggtgtggttgtgccctgagcrcgtgtgtaaaggactggggaggcgtgtcttgaaaaagcaactgcagaaattccttatgatgattgtgtgcaagttagttaacatgaaccttcatttgtaaattttttaaaatttcttttataatatgctttccgcagtcctaactatgctgcgttttataatagctttttcccttctgttctgttcatgtagcacagataagcattgcacttggtaccatgctttacctcatttcaagaaaatatgcttaacagagaggaaaaaaatgtggtttggccttgctgctgttttgatttatggaatttgaaaaagataattataatgcctgcaatgtgtcatatactcgcacaacttaaataggtcatttttgtctgtggcatttttactgtttgtgaaagtatgaaacagatttgttaactgaactcttaattatgtttttaaaatgtttgttatatttcttttcttttttcttttatattacgtgaagtgatgaaatttagaatgacctctaacactcctgtaattgtcttttaaaatactgatatttttatttgttaataatactttgccctcagaaagattctgataccctgccttgacaacatgaaacttgaggctgctttggttcatgaatccaggtgttcccccggcagtcggcttcttcagtcgctccctggaggcaggtgggcactgcagaggatcactggaatccagatcgagcgcagttcatgcacaaggccccgttgatttaaaatattggatcttgctctgttagggtgtctaatccctttacacaagattgaagccaccaaactgagaccttgatacctttttttaactgcatctgaaattatgttaagagtctttaacccatttgcattatctgcagaagagaaactcatgtcatgtttattacctatatggttgttttaattacatttgaataattatatttttccaaccactgattacttttcaggaatttaattatttccagataaatttctttattttatattgtacatgaaaagttttaaagatatgtttaagaccaagactattaaaatgatttttaaagttgttggagacgccaatagcaatatctaggaaatttgcattgagaccattgtattttccactagcagtgaaaatgatttttcacaactaacttgtaaatatattttaatcattacttctttttttctagtccatttttatttggacatcaaccacagacaatttaaattttatagatgcactaagaattcactgcagcagcaggttacatagcaaaaatgcaaaggtgaacaggaagtaaatttctggcttttctgctgtaaatagtgaaggaaaattactaaaatcaagtaaaactaatgcatattatttgattgacaataaaatatttaccatcacatgctgcagctgttttttaaggaacatgatgtcattcattcatacagtaatcatgctgcagaaatttgcagtctgcaccttatggatcacaattacctttagttgttttttttgtaataattgtagccaagtaaatctccaataaagttatcgtctgttcactttgtgtcctttcatcttttttcaattcaagtgggtaataacgtttaaatagtggtagcagaaatgatctttataatgtttcaattccatggtgaatcatatgaaaatgcatattttaatataaaattttgtttaccaagttctgcttcatgtccacctgtagaattatatagtaacaactgtcttttttgaagacttaattccaatctgctttttggaaattctgtcacattgattgatgcattctaggtcttggattatttagatgatgtgtttgacacattcttgaggtgaacttggcttttctaaaagcaggtggacagaatgttcagcttccaggtttttaggacacatttccaatattgttgattaagaaataattctatcattttagccttttgacccaactttttttgtaactcagtaaaccaagcactaatatgaatcatttggttgtagaaacaagatggtaagaagttttttagaatgagaaaaaagtttagttttcctttgtaggtttaaattagtcccttcctttcctctctctctgactgccctaaactagatgagaaaaaagtatattttaatcctaaggaatttgggtaagtgctgcatgcttgtgtgtgttgatgttactgccctgaattctctagatagttcaggccaagcctcagggccacaggtccttcctgccaccattgaccctaccctccaagacaagcaactgctcacgtctgcagctgtcacggctagcaagaaagaacacagccaggctgaatgtatcattttgcagattgcgatgtgcgtgaaaagaatccagatgggattgaatttttgtgtgtgtgcagatccgtgagcacaatgtatgttttagatggaatggtaaatgctgggtcccagccagctcaggtctgtgccccttggaaagatgcaaggagcagagagatgtgcaggccaggagaagtgctttataactggtctgcaaggcagtttatgaacaacccttagaaggttttttggtgtgtatgtggtaaaatacacataaagtttaccatcttaaccatttttaagtgtacagtttaatggcataaagtaccttcacagtgttttgcaattctcaccacccttcatctccagaagtttttctttttctttttttgagacagagtttcgctctgtcacccaggctggaatgtagtggcgcaatctcagctcactgcaacctctgcctcccgggttcaagggattcaccagcctcagcctcccgagtagctgggactacaggcgcccgccaccacgccaggctaattttttgtatttttagtagagaaggggtttcaccatgttacccaggatggtcttgatctcctgacctcgtgatcttcctgcctgcctcagcctcccaaagtgctggaattataggcgtgagccaccgcgcctggcccatctccagaacattttctttatcccaaattaaaactctacccattaaacactaatattcctttccctccaaatccctggcaacctcattctactttgtgtctctgaatttaatttttctaagtacctcatataaggggaatctgacaatgtttgcccttttgtgtctgacttcacttagcataacgtcttcatggttcatccataccatggcacatgtcagaatttgctttttaaggtgaataatatcccattatatgcatagaccacattttgtttattcatctgccaatggacattggggttgcttccaccttttggctgttgtgaacagtgctgctgtaaacattagtgtagacatacctgtttgggtcactgctttcagttctttagagtatatacccagaagtagaattgctggattgtatggtaattctgcttaattttttgggaagtcaccatattgttttctatagtgactacactattttactttcccaccagtaatgcaccaagttccagtttcttcacatcctcaccaatacttgttttatgtgtttttgctaagagccatcctaacggatgtaaagtggtatcttattgtggttttgatttacattttcctaatgattagagatgttgagcatcttttaatggcttattgaccatttgtctctttggaaaattatctattcaagtcccttttacccattcttgaattgggtttttttgttgttgagttttagaagttctgtatatattctggatgagagttttatagttttagctcttacactgggtctttggtccattatgagttagctttcgtacagaagcttctctagtcatgatggagttatgtcccagtaaacccatcgtaagttgaaaatatcttaagtcaaaaatgcatttgccccagcgcagtggctcacacctataatctcagcactttgggaggccaaggtgggcagattgctggagctccagagttcggaccagtctgggcagcatgtcaaaagctcatctctataaaaatacaattcgctgggtgtggtggcacatgcctttagtcccagctactcaggaagctgaggtcgaagatcatctgagcctggggaggtcaaggctgggctgagccatgatcatgccactgtactctaacctgggcagcagagtgagaccttgtttcaaaaaaaaattattcaatccacccaacctactgaacatcatagttttgcctagcctaatgtaaatgtgctcagaacacacattagcctacacttgggcaaaattatctaacacaaagcctgttttattatttttatttttttgagatggagtcttgccctgttgtcaggctggagtgcagtggtgcaatcttggctcactgcaacctccgcctcctgggttagagcgattctcctgcctcagcctcccaagtagctgggactacagacgtgtgccaccacgcccagctaagttttgtatttttggtagagatggggtttcaccatgttggccaggatgagcattgatctcttgacctcgtgatccccctgcctcgacctcccaaagtgttgggattacaggcgtgagccgctgtgggctgtgtggggggaaccggctaggtcctcaaagtatggtttctactggatgcatatcagttttgcaccatcagaaagtcaaaaagtcattaagttgagccatcatacgttggggactctctgtggtataaggt

SEQ ID NO: 95198 - DNA, 21648 bp, Homo sapiens
  misc_feature (1)...(21648): n = A,T,C or G
attattcaaaagaaaacaattaaatttcctaaatgttcttctggctgcaaactcagtgactatcagagggagacataaacttctgctaacagataaatcttcctaacaggttggatacacaacagcactgcctccttactctttctattctgcgacctagggaccttttcaggtctctggaatgtaataatttgagttatagaaactatctgctggttaaaaaaaaaagaaacacataatactacaaaacactgccattaaacaggcagttggggaaaataaacaattctttcatcacctttaaccaaaaggcttaacaagttttacgattaccacttaattctcaataccactttccgggagatatgattcaggcccatgtccttgttattaaataaggcttgcaacagaatgaaatccaacaggtgtatgactttcaaggcacgcagctgaggagcttggccctcaatgcgagaaagcagcgtggggacaagaggaacatagctttcagaaacagcaggctataggcttagatttttttttattagatttttggttttctgtgtgtttgtctgtttttttgagttggagtctcgctctgttgcccaggctggagtatgcagtgaagtggcgagatctcagctcactgcaacctccgcctcctgggttacagcaattctcctgcctcagtctccaagcagctgggattacaggtgcccgctaccacgtccggctaattttttgtatttttagtagagatggggtttcgccatgttggccaggctggtcttgaactcctgaccttaggtgatctgcccgccttggccttccaaagtgctgggattacagatgtgagccaccacgtccagctattagatctctggattgaacttttgtcattttaatttacaaagcccaaaaatcatctgtgtatctagtatatatgcagagccagcaaagataactgggatagttgattttctacaggacttgttggtgatgctatgaatcagcaggaaaacagaaattgcatgtgaaggcaacaaaacttagagacacaagtgctaatgtctatcaacatattatattagaaaaaaacataatttggagaccaaaatgtctgagaactgttatcctagggttaatgtatgcttcgaatgaattcatgtatacacacaaaaatttaacaaaaaagtacaatctatgcaagatgataacatttgggggtaaatatttatgagcagagaaagtacacacagatttcttacaacgctgcagcctttatatgaagaaattcttcaattatatacaaacttcggcagacatcaatttggatttttccaaaatccagaaaggggaaaatagatgtggaaaaatctgaggaaaatcaaaaagaactcaagtactcagcgacgtttaagaccagaacccaggactacacctccacccaaattccaggacaaaactgggttgtcatggcatctgggcttttcataaatgctcacctatctcccacggtctattctagactgaactaaccagatctacagcatgccctttctcttcagtgacccagtgactcagggcaggtgaagggagcaggacttgtgtgacacagtggaggctggcctgccttcctgtctccaagatgtgggcggcagggatgagcaaagcctcggccaaagaagtattaataaaccagctgccttgtcagatagaggtagtcgaaatccaacaagcatttctatctccacaatagggactagaaaaattctgagggctgcattttgcttcagtttcttatacattacattatttttggtgttatcagggaatccaggtagttccagggttgcagtgatgctctaaaactactagatgatagctcagtgcatcacagaggaagctttcaggttccagctcaggtcaatagaatctgctattttagcttaggaatgcgtggtggttcggccccttgtacaatccaagcagccattttgcccttaatatgacatttgcagaatgttctggccagctcagatagacacttctgtaccacacgttctcatgcaaacacaccctctcattttctaagaacaaacaagaatgcagcactgagcataaaatgaacagggccagtgcggcggctcacacctgtaaccctagcactttgggagggcaaggcgggaggagtattcgagaccaggtgttggagaccagtctgggcaacctactgagacctcatctttttaaaaaataattttttaaaaaagtaaaggtacagaaacactgacatgtggagtgctcagataaagcatcaccttcagttcaataatctgaactctagttcttcatttggggctgataaacggaagaagctatctcagatatgtggaggtttacacgatgaattcaatggcgaatttgtttttggagaagtggatagaaaacaggagttctaccaaatatagtaaagccttatctataaataaacacaaggaagaaaaacatttttaggatgcctgagtcagcatgtttacacggcatgattatttagtttggggtttaaccaatcctgtgactcaaatcccaggattctcagaagttcctgagtacttcccaccctcacctcttcactaatgttcacgaggcaggaagccatcacatgctaagacaggccatttactcaaaacacccaaaacatctggtcatagatgcagactgatgacaactgtttatttaagatgtatattttgtcatgttttcatcataggactaaagaggaatctcaaaaccaaaatgccaaactttatgcaaaagtctgatactttggacgaagtattttgaatactgttttctttgcttcttaagatcactgatgtttggtgctaagtatttcactatattttgggttgttttattaaaaatttaaatttagatgtattgtttcaatttctttggttcagatacatgatctgtttcctgcccttgctcatgctatcaaaatagctccttgaaagagcaccaacatgcttttccatatccttagcatttcacacactgtatgttcttatcatattctacaaaaacacggcaacttcactatgatttagcaaaacacaggctttgtactcttccttctcaaggattactcttaatctttaatggcagctgcattctcaacttaatacaacgttcaacaaataaaaaagacaactgcttctgagcccaatattatacattaggtaaggaacacgatactcctcattactgttctgtctcaggatataagtttgcaaattcttctcctgatctcagtcaacataaaagcagaattacagtttagagtgggcaatgagaaaggtggaatcaaaatagacacagggaaggccataaagagttcgcaagcataaatgcctgatagcaaaaacgatcacagaagattccaaaaccacaatcctgcacaaaggccatctcaatcttacacaaaaaatacttctgcaatgcctgccgagcacctgcctgtccaacctgggactggtgtcacctttgttactgatccttgtagtcaaaaataattatctcaaaacaattatgtaaccctcctcatttttcctttaaagacctttgtcttcctctatctcccaggatacacacagttaactatcgcatgcattttctcattgcagtgctctattcctgaataaatgccattttcttttagagagcctctctctgttcgttatttaagttgacagcaacaaacagtttaggtttttggcaacaaatcaccaatatttacttaaaaacaaacaaaacacttacaacacaggtaggaacaacaggttattttggaaagagtttaatatattctctattgttaagtgcaccagatgctggacttctgaaacaacaattatgcttctgcataatagctttttctacatatttctgttcatgttgcttgttcctctgatttacctggaatcaatgaatctgaaaaacaaaaagattctttaagcacctggtaaatttcaggtcccacattagaaaatgagcaatcatcaataatattgatgggggtgaaaatatgacattgagactttcgggtaatgtgccgagtttactttcatagtttactaggctcaggtttcatgccgaaggattatttgaaagactcactcactgacatgattttctgattttaaattcgaacactctcaaagcataaacagatcacctccagcaacattgtaaaaaaatactcaaagtttaaaaaaaaaaaagtaacttgtggcagtacttagtgttcaacagaaaacactccatctgctaaacaatatctcgactgcaaagcttctcttactgttggcggatagataatgacatagcccagtcattatcaccgtggcaacagygaccagaaactatcagaggaaaattgcacatggaacagctggctctcgagcaggcatgcctcagcttcctctggagtatgctttttctgcaagtctggtgtgctcgagggtaccaccaaccctgtgcggctccaagactacagattatgtagcaagtccactggtcctgctcttccggatttattcttcccgccaataggagcacttaccacgttccaagcatcgtcctaggcactgaggatacagcagtgaataaaactgagtgctgggtaggaagtcaataaccaagctagtaaataactgtatattgtcaagcactggtaagtacaagggagagcagagcaagcaatgggcctgatgaggcttgctttgtctcctctgcactcccacactgctttgtatctgcttctcatttctcacgatgggtccaagctttgggcaccaggtctccctggacattccgcgctggcactgcgcctagcacccagcggctgctcaggaaacgtttgtcgaacgaacgaattcacttcttagttccccattcaacaaacctttcctgatcctaggcccaacaggttaaaaggctggagggccaacgaggctggaaactcagaggcggccgggggcggtggctcacgcctgtaatcccagcactttaagaggccgaggcaggaggatcccttgaagccaggagttcgagaccagcctgggcaaaaaagtgagacatcgaccccccgcccccgccgccaattccgtctctacaaaaaggaagaaaaaaaaaaaaacccagaggaaatcacacaggcaaaagcgctttacaaattttaaaaatgaaaactgttctagagaaataatcgcgcgccggaggcggaagccccagagcctcagctcccacgtggcggcggagccagggaaagtccaggagccaaggctacggcccgagcgctggaaccccggtcaggctccggctccccgccacgacgaactgcatgcggccgcggcgctccggaggcgcccggggasgctcacctaagctgggagaggcggatacccgcccggcctagccccgctacctcccaagagaccaacacgacaagcgcgcgcccaccgcattgccatggcaattcaaccgccgctgacaccggaaccggaaacttcatcaggaggtgaccccttcccggcgttccgcggaacgggcgagtcccgcgcctctcccagttgtctcggcgtagtccagctggcctcattggctcacaggaggaaagtcgtcttccctcttgttttgcctctcgttgccctgcaagcgtgaccctgatggacatccagtctctccaattaactaacaaagcrgttgccgacgaccaatagtaaggcagtaggatgaggctccggcataaggcccmcctcctacctgccgggcgggacgagcaacatgattggtggaatcgagtaattactgatcagtattgtccaatcacggagggcagtttagagccggcccaatgagggcctccagggggcgggtcggactgccgcgggccggggagcgctctgggtggccagctgtgggcccgggccgtcgtgggctccggcttgcgtgcggagatgagcgggtccctcggccgagctgcggcggctctgctccgctgggggcgcggcgcgggcggcggtggcctttggggtccgggcgtgcgggcggcgggctcgggcgcgggcggcggcggctcggcggagcagttggacgcgctggtgaagaaggacaaggtggtggtcttcctcaaggggacgccggagcagccccagtgcggcttcagcaacgccgtggtgcagatcctgcggctgcacggcgtccgcgattacgcggcctacaacgtgctggacgacccggagctccgacaaggtcaggccagtgtgccgggcaggcgccctccgccccgggcccaggagcatcgctgcacgaggccgaggggttccgccgcgccgggctggggagcggggctccatccgccggggtctgtctgaaggttcsagccgggttagggcgaggagtactgccctggagtagagtctgggctgagggtgtagttgatttcactgggtcttgaggatctggggctctgtactgttgccaacttgagcagtaggtaaagtcctaaaggttcacttatcctcacttcgagctaatataggcgtttcggggcgatttgtcartgactgactcggaggagggtggcccgctgcctgactgctctgcacggttaggaaactcatagtaaggacccactgtgagataggtactttcgcggacactttggggaggttggaagccattggcctactcgtgggtaaggtctagggctgtcgatggtggggagagggctgaggttgcccttgaggctagtgaggtcggaggctgatctcgcttggctcacggctcagggtgtcaagcatcatcctctgtggttgctacaagcaaagggttggracagctgtcggctgaccttagtcgggatctatgttgtcggggaagagtcatgacatttggctttagatactcaagcacagggctgaatttatgtgggccagggcttggagaggtttgtggggaaaagaagcagccctggctcctgggccctgggctaactcactggctcagccttggagcccagggggccagggcaccaggggccagatggattaggccgggagagggaaggctgcagctaataagcatcttttccaagtactccacgtgcattcgccagtcttatctgagtaggggaggaggaagaggccaggcacaagggcctgctccttggccaggatggtcagggttggtggaaaactgggaaggctgtaccttttccttctagagagtgacttaggrtacctgcatcccagttagagactttcagtgactgagtccctgcatgtccctagctaaaaagaggtgccagttgtgtgctaaaaataggtgccaggttctctgttactctaaattcgaaattactaatcatagtcattgcttacaatgatgagacaggctggtgtttggaaaagctttgggttgacatcctcttctgtggctaatcaggtgtaaaacttaagtcactcacctgcatttgaggataatgagacaatttggcaaagtttgtgttaggaagccaaagtaaaaattatagaaagtgtgtattattttacctggcacagaaagcacccggtaaatggtagctggcttcgtattagcmcttgatggttttcaaatgtattttttcccagattatctagtccttaaagactcttggggataactgatcctccatttgctgtaggtgatagtggtggtgggtgggacctagaaagcatgttgagttgargagtcgagagggcaggttcaaattaccacgtatatgtaatattaccatgtgttattctcatgacccttttgtcttccttgtcaactagtatgccaccagttactgggctcagttttatcatgtgcaaggcaagggacctgcagtcttccttcraagacagcttctctgcttaaaagaggagtaactattttgcagtcttttgacagagaccttgcagggagtcccctgcaaattgccaatatggcactagtaaaaaagtggtgttgttatctcgcttagtatcatgtttcgagggtctttggtttgtgaatttattttctcttgtttaatataactggaaatgagatatgctggaatatagctagtaaacggaaagtaggagcaaaaatacgaatatgtactgataacattttatttttctgtcttttatccacgtctggtgtctggtttctgagcttactttcttaagttttcaaacagcagcgacaggaatttaacccttacattccttgaccactgagtttcatcagattgctattttggttaataaacgcgttgcatatatattgaatataacatacctcttttattgattagaaaagtaaagattagtaagtattaacatttggactgggcagggtggtaaaagcacgttccccaaatggggattagttcagccaggktattaagactcttcccctcttccctatacagctttatttaccaagagcaactaacgggctgtccgatgcttgcttttgccagccgaaactatgtttgtacaccagatccaaggtcatttctagtaataggaacggagctcttgcaaaactggccttttgttggttcttatgccaaggagacctgaactttacaaagtgcctaaaccggaggaaaacattctttcctagttttgagtactgggttcccaggagtgtgatacagacacatcttgagactgtgacccaaggaacaaaggtgactatgaggcagcattgtgttctggccttctcaagaccttcttgtccttctctttttatctggagtgcacacagaagacagtcacaaagggatcaggtcccagtagactgacatcatcatttcctaatcctggtcttaataaaggaacttatgctcatggaagcaaygtagaaaacactgaaaagtttaaagaaggaaaatcacctgtaatttatggaaactattgtattaacatttagatctagttcctaacagttttttttttaacacattgagaccatgcttgtytatacatagtattttgccctccagagacgagggaatatgtcttatgccactgcctgtggtgctgtgtgtacmgcttatgcaaagcaagctttcagtgagcattttaataaataaataaatactgcttttatttatcattatattgcaaactctgcggccttaaaggcattataaacatttgytgccgatttagatcatcattgtagtccttgcatctggaacagtgacagaatagggactcaaatgatttgttgaataaataaccatatcctgttgttgaatgtttattaagcatttgaaaatacgctccaccttttcagtatcagggaattgaagacagtagtgaaacatgtcatgctggtgaaccttaaaagttggataacaagttgtgtgtatgtgcttgtgtggtgcacatgtatgctgcagatgggagtataaaatggtaccaacactttggaggagtaactatcagtacccagtcaagctaygggtgaacagagcctaagacccagctgcgtgactcctaggtatatattctagagagggggatctgcaaacttaccctagtaaagggccagagactaagtacgtcaggctttgtgggctgtgtggtttttgttgcatctattcaactctgctgttatatagcctgaagtcagtcatgggcaatatgtagatgaatgagcaggctgagtttcaataaaactttatttatgaaaatacagctttaattacgaagtagactggatttggcctgaagaccatagtttatctgtccctggcctagagactgacttctgcatgtgtgtgttaggacatgggtccccaacccccaggccagggatcraggacttacagcaggaggtaagcggtgggtaagtgagctttaccgcctgagctccgcctcctgccacatcagtgacgacattaggttctcataggagcacaaactctattgtgaactgcacatgtgaggaatctaggttgtgcgttccttacgagaatgtaactaatgcctgatgatgtgaggtggaaccgtttcatcccgaagctatccccacccttccctggtccgtggaaaaattgtcttccacaaaaccagtccctggtgccaaaaaggttggggacctctgtgttaggatacctgtgttggcgcgttcattgcagcatggcttgcaataatgaaaaactgacaggaagggatcttggtctattagcagcagaccagataaataaactttagtcacatgatggaaagctaaactgtagttaaaatgaactagatctagatgtatttaacatggctgaatctcaaaaatacaatatttagtcaaaaagcaagttgcaaacacgtaattatggcataataccatttgtatatgtaaatgttaaaggcataaaacagtcccatatattgcagatatgtgtgcagtgcacttgtagctcctgggcaggagtgagatggcagctagagggtagaggccacctctggtgrgggactcaggtagcatgtggttaagagtctgggcttttgtactcctggaarcctggatataaatcctggtttcactgcgctgtcactgtgagtttcggtaagttacttaacccttctgagccttagtttcttcatcttatgtaaagtagggataattgtacctgccttgtcagatttttgtaaagattaaataagattatttttgtaaaacgcttaaagagtatgaaactcagtaatccttaactcaataaatggtatatatatatatatttttttttttttgagagagtgttactctgctgcctaggctgaagtgcagggggcaatctcggctcactgccacccctgcctcccgggttcaagcgattctcctgcctcagcctcccaaggagctgggattgcaggcacctggcaccatgcctggctaattttttttatttttagtagggacagggtttcaccatgttggccaggctggtcttgaactcctgacctcaggtgatgcaccagccttggcctcccaaagtgctgggattacaggtgtgagccaccgcacctggcctgaatggcgttttcattactttagggtatacttaatcactttttcctgctttattttcctatgctttttctgttgcctttctcagaaaagcattactgtgaagggtgggtggtggagcatgttggtatggagagaatgtccacactgtacctggtactatgctgggagctcaattcatttcattccttagatatcatggaatcttcataatatgtgaggcgtagagtatattcccattttacagatgaggaaactgaggctaaaagattaacagatttgtctgaggctacatttacaggctagcaaaccagatctactgatccttaagcctgtgccttgcccactctgccccgtgccttgcttttcctctagtgagggtctactgatttccgtgctttcagctcagatcatcttatctcgacttaacgccattctctaaattagagaatatgaagaaattgtgactctcagaggtggtgtaacttgcccaagatcacagagtctagtaggtaagagacagagttggaactcatatcagattctgaagctactgtagtgaggttctaccaggaaaaataaaaagaaagaaaactatgattatgctgctctcgtaatttagtgtccaaatcaggagtaatgcccagtgttctgaatgtgatgaattttgaaaaataccttttgaaagttctggaagggaattttaaagtatcatttctgtactctttctgggttgatactttggaatatgaatttgtttgtatgggtttttttggtggagcattagatgcgtgtaaactgactttgtaagatagcctcctaactcccagttcctagtgttactctgccatataactttgcagtcagcattttctgccccagatggaatcaccaccgtctatcacatatgaaataatgattatcattaaaattcattcttggatgtgattttctaattttcaggagtagctctctgattctgagttaatttcaagtgatatttgtaagaactaccactgcatattgcagtttttgaaaactaaagtgtgagagagattaaccatgtgtaaacagttactwgtggatccgcaggattcattttaatattcaacttatgaagagtagtcttttattattattaggagtttctcacttcactctataggaagcaattgggtatttccttaaatatttaaactggtaatcaactttcttaaaaatggaaaagagcatagtcattaagaagggtgccaacgtttggccttgatgccagctgcctattacayctattcatctaaaaattaaagaagcagctaagtttaattttgataaaccgtcagctgctgtcaagaacaggcaggtggctcatgagaagttagtatcacttgcatgtggctgtgtgtgttgggtgttgagaatgtctgaaagcctgcttgttttgataattttggtggtaaggattctgggggtctccccttctctcgtagtcaggacatrtgatcaacagcaacataaagtttaatcaatgaggcaagcccaatgcttcgattgagtgtgatactataaaagtgattgatgaaaagcaattttactttaaaaacatgtattttttgggtaaaacatgtagttttgggtagttctcaggcagcaaacatttccatttttggtgtgtttcagaaattatagacatccatcaaaataaatcagtaaaaattgattatcatggaaagcttcacacaatatattattcattgaaacaaaacaggtcgttcatgcacataaatgattcatttgtataaaaggtatttaagaaagttgaagataatgaaaagaagctcacgtttactttaaatatttcttaattctcgcacccagctctcagtcatcataaaggtaaaagttttgtaatcggcatcattgtaaaaagtgagttttgatagactttgtatttgaggacagagtttgaagaaagtaaaaaaacacacaaattatgctagttgtttttgttgatggagcatcaaacatcaccatgatgaacaacttgaattcatcagggtattctactatgtctagatatttggcattataaagacattttgatgattaatggaatttaccctttattggcagctgccaaagagctagctgttgtttctttactagcacccagagtggctgagaggtgtccttttggaggcctagagcaatgtaaccctttcttaatatgtgaagtctggagaaggaagataaagcccttggttcaggggctttctttagggctgtcatttagagcaaagtcagtttttttaataaggcaataacttttaagaaaaaaataaattgtatattgggacttgtgatataactgaaatcagtaattttatttggaaaatgtttgataataaattatagggtatcaagagcaagtttttgtatttttagtttgtttacataaaaatcgatttgtgtaaactgtactggacttgaacaatctgttgacttttccgttttgtttatccatatgctcattttggccatttaaaaatatctatctatgtaaatataaaagtgtcacataagtgttagttattatatgccatgctttgaccatcttcgtttttaacatgaccaatacaggctttttaatggccgactatgtttttgaaagcacagtcatctcaacatacaagtagaaaaggaagtagactgatgaagaggaatgttaagagtaatcttttatgtcttaagattgaagccacatttctttcttaccattttgttayagtcatcatccttgtggctcagaattgaacagagtagttgcacagctgcgctgtcacagagtgtccctcatctcatgtgtgtcctcagagccatttgcacacaggactgatcacatgcatgctggttggtttcttggctgctgtgagygcttaagagcagagcgggtctcactcccccacccctcagccctggacagggaccttgctgagctctgggccttcattagactcaccagtcacttcgggttctgcacagagcctcatcatccactccacagagagcccatcacagtggctggatagatgggaactgacaacccatagctgtgggacagggatttttccctgggtaaaagtaattgttaaaaattaaaaaaaaaaaaaaaactcaacaactcatcatctcgaggagaagtgactgacggcctgcaccaacttagacrgtcacagtcatgaaaagtgcacaggtgggattgcccgagttggccatgaattaccgtgatggatccatttggaaatgaagttggttgtgacatttcttcaagttttgtttcgcttgaagcttgactggtagatggagaattttggccttatgtatcttatgtgacttgcattacccagtccagtcctctgccattaatctaaggtccgcaatgyatcaggtattttactgagaatcttgcttacctaattctcacaaaaaaaaaaaaaccttgggagatgagggtggaaacaggatgagaggtcaggtgacttgtctgagggcygacggtttgtaattggaagagtcagggcctaaccactggtctctttgacacaaaaactcatgctcttagtggcaagcacagtgttctcaagattgggggaagccagggagggacagtgggttgtctgctactrgtgggtcaaaattacatatttagtcatgaatggttcagcttttaccatttaaataacaaataaatgttctttctccataggcattaaagaytattccaactggcccaccatcccgcaagtgtacctcaatggcgagtttgtagggggctgtgacattcttctgcagatgcaccagaatggggacttggtggaagaactgaaaaagctggggatccactccrcccttttagatgaaaagaaagaccaagactccaagtgagggcggccaagtcctcgctgagcagagagggarccgttcatgtcagagactcactgccagaaaagccttacccattttggttttcactattgagaccgcaactgcttgcactgatcattttggttcrtgagcagttggtgattttagttggtctggtgttcgggctaagaatattttattgtggacttaattacaaccactgcmctgtaatgattcaatgctgtattatgatattgctgtaaacaaaattcattcttatattgtcacttattctttgcctgattcagaagttaaataggagctttggaatcattattcatgacccctctgcaaatgtgtcagtctccaaagagagtatctccccccaaattttgtgtagcttcttttgttatggaaaatggtgracaaaaaaagaaactgtgataactggggcgttgttttttaaaataaactccagcacagggatrctgtgcatgcctgagttgattccgaagtgcatatgtctgtaaggatttggagtgcctgcagtgttttatgtgtgggaagtaagggtgagtctcatattcttctattaaatttgccacaagaattgccgtcgagccctggtctactttctgggggaagcagctgtttggatggtgagtcaactgtgcagctggaggcgtgggtgggctggagggagcagaggtgggtgaggccggaggaggcggccccacctgcctatctctggagccctgtgcttggcacactgctacagttagatagggagacatcgtcaacagtccaccgagctaggggatttaatgagtattttacttcttaaaaagtggggactttctaaaagaggacataatttggaattgtggcagagattctcccagtgtctggtgtctttataagacctttccatgatttctgcatcccgagactggggcctggtagagcctggggctgtgcagaggcccatgggaaggaagcccgcctggtgtggcatggaggctttgttcatctccagggacttaaagagagcgcttgtctagaaacatatctttacggtggcagaggtgggaagaaggatgcattttctcataataagggcaaaaaggacagaacggctcttttccccagagctattctagaggcttgttcttcgttgcttatttaatctccttgagttcctctcgagaatactctaaaaacagacttcctccatgaggtcaggctagaactgatggagttgcccctgctccccttccccagaggttttggaaggggaaggaaagctgtagccccacgcccccaycctgnggactgccccatcagattagagcactgctcctcagcagtcacccacctcaccgtgttagagaaaagaaaaatagattattctcagaaaaaggttattacattaattgtctgctacatcccatgatacctttatgtcttctgtaagctaagggaccttaggatctaagaggaggttaaaacacatccatttgagccatttggtttagaaatgagggaagcaggagcactagaaggatctaccttgccctgtagacagagtcaccatgaataagtcacttcatactgcctctggatggatacaggccgtggaccagaggccgggtctgcaaaattgtcccttgccatcacatctagtgaggagtgtgatacgttttcacaattttgcttcttttggcttttccttgaatctgcctgtgtgcccttaggtttcatctgaaaagcgaaatgatgagaaacttattgatgggaagcatcaatgtaagaaacctctctagaatatgattggagctaggaaaaggctgccaagtgaataatttgactcatgcttatgagtcatagtgagatcatatcaaagtcactagggaacttataagttgaaggaatcactgggctctacgaggaatgtaagtcttctttctcagagttaattaataattttttctatatgcctaacaaatctctaccaagtagaaaattgaagatgctatctagtgtaagtctgaataattttgatggtctgcataattagaattcactgtgagaattagagcagagacacagaggttccttgtgcaaacagcagtatcacgcacctatttaaaatgcaaggactgcttctcgggtttaaatgcacctatttaaaatacattaggcctgtattagtgtgattatattggatatttgtcatagcttcagggtctgtgtgattagacccttagaaatcaagttattttagaagattaaacattttatgatttcaggtagtttttatttttttcatggattggtagttacataaatggcattctgcttcattaagctatgagttttagagatatcttaggacagaagataacttttaagttgggtttcgttttgttggcagtgtttaattcacttgtgtagaatctgggaaccgaagctttcctttaacttttcaagccatagcagccagcttaagagagaattcttgttacatttgttaggtttacttagatattttgacataaattatatttcgagaaatcaggtcccttgtttgtgacaggagggactgtgctaagggtagaggaatgacttgtgtcggcaaggtttcattgttgcagattgattgattgattgattgattgaaaaagggtcttgctctgttgcccatgctggcgtgcagtggcctgattatggctcactgcagccttgacctcctgggcttaagcaatccttcccactcagcctcctgaatagctgagacttcagatgtgcaccacaacacctggctaatttttttattttttagagacagggtctctgtgttgcccaagctggtcttgaactcctggctcaagcgatcctcccactctggcctcccaaagtgttaagattacaggcatgagccactgcacccagcagaaacaaataaatgtgaggtgagaaagctttcatgtgggttcctgagagccaccgacaggaaaagatatatattaggggatggccacacaaaacactgattgttttaaaaatttaacattccacttaagaattgtttagtaaatctaaaaagcagctttaaattgtgcctaagaaccatataatagctactatgaagcagagcagaggaatggtgaagagaaaagccattttaaggtccaggggcttacagagacgcatggggtgaccaggtggactcttgtaaagccacattcctgtcttatttcctgagagtagcatcactttaggtctgaaagctatgtgggcattttgcgtgaggggagcattgttttcttggcggttgccctgggagcccagtgcaggtgagctgagggcagagtctcccttagggcagagatgccactgaaggtgcacctcacctcaaagatccctatcctggattcagtcagaatagccatgttattctcctccttgtgaacctcccggggcacccggttgtgtcacagtgaagtctctcctatcccagaaagccttccctgaccccagacggaacagaccctttaatccactctacagccctgttctttgttcatcactccaggacctaactgcctgttacttggctttattcagatcccctctggccagcatacagagtgccccaaaaaatacatttagaaaagagtgaagaatttcctttcttcattccttttggattagtcacaagaaatgttaggctattacaggttacagcctcgcaacaccgcagtagctaagagccgggactcaagtcaccctccctgggtttgcatcccagcacttgctgggtgtgctactgacctcagacgacttagtaacctcccttcctgcttaagtgggcaaatagcagatgccaccgacctcaggcgtgttacaagcttagatgacagcaccctgtcgagaccatggctcataatgagctctcactgtaagttgaccttgacagttaatgttggattacacctggacttggtaccgcgctgtggtatccaccaccgttcggagggtttaagggagcagagaaggacaggctgatgaacacaacatcgttcatgtttggttgcccctggaacatagagactcattgttgaaggcaaaggacagatctaatccttgtgatgatctatcagtggactgcccagcagccctaggggacggcagggccttcagccagaaagaattccctgtaaagtatctttcctacgattatagtttgacttactgccaccgagttttatttttaaaaatactgcttctatttcataccaaagtggagagtcttttctgaaccgatatgttagacagttattgtgttgagttatgcttcaaagaatgcagtttaaccttgagctaattctaatttagcagtagcaaggattgtgacactgggttctactgtacctcattagccattttcacagggattcgttttgccagaaaaaggaggtagaaatgttcgccggttcctaggaaatttggtgagcaaatatggaaagtatttccagattattgatgtgtcttcactagtcctgagcaagctatcagctttgatcatcaccaccaccgatgaagcaaccttcctggggaggccatgctgagcccgagtctatggggacctcttctggctccagacccaggctgggcagaggctgagacttcagctgggtgtcagatacccctcaccccttgccctgatcttgggggcgttagggtgctgtcagagtctgacataggtattaaaatatttcaaatctcaaggagaacttcagagttcttcagtacatttacaagtaaattgtaatcctgggaaactagcagcacacttcctgttattctggcttcttaaattcttttgttttttgtttgtttttgagatggagtctctctctgttacccaggctggagtgcaatggcgcggtctcggctcactgcagcctctgcctcctgagttcaagctattctcctgcctcagcctcctgagtagctgggattacaggcacctgccaccatgcccagctaattttttgtatttttagtagagacggggtttcaccatgttggctaggctggtctcaaactcctgacctcgtgatccacccgcctgggcctcccaaagccctgggattacaggcatgagccaccgcgcctggcctttaagttgttttttaacttttttccatgattccttagtaaagtctccttaaaatgattcttgggagagcagagggcaaggggcagtgtcagttacacctgactaagttacttcagttcaggtgcacttcgtacaaagtgtggtgggatgtccatgtcctaatccctggaatgtgtgactgtgttacctggggtaagtttaagctgtgtttaagttcaggatcttgagatagagagattgtcttggatcacctgggtgggcctaatgtaatcacaggtgtcctgggcaggagggaagcagaggttggagtgatgtactctgaagagggcggaaggggccacaggccaaagatcgcaggcagtctctagagctggaaaagccaaggaaacggattctcccctggagtctccagaaagaacacaggccatgattttagcccagtgaaagtcattttagacttctgacctcctgccctgtaagattaaaaattggtgttaagccactaagcttgtcatttgttacagcggcaaaaggagactaatacacctggctgcctggattttatggtggatgcttacttggtataagcagacagggggaagggtcaaacaattattgagcatttagatccgtaatttgtttctcaccaaagatctgcaaatgtgggatattctctcttcctttcagatgatgacacagagactgggagggggtcaggttacttgtccaaggtcactacctggtggaatttgagctgtgatcagatccatattgtagcacccttcggagggccggctcagtgagtgcagccgcttagtgcagctctggctgtggtgtccagagtgttcgccctgcagccctgagaagaactgaatttgagcttcagttgcctgttgaaagagccagggaggccaggaattttggaagttgcccctggccatccactatcaagtatgtgaaggaagcagagggtcccacctctgaggtcagacaaatggaaggtgaatgcaaatgatgcctccttgcaaatgatgccagggaaagcctcctgggccccgtgtgttgtgcggacaggtggccaggccagaggtcccactggacttcactctgaaattccagacagcaggaagtaaacaaagtgctttacgagcgagttcccgcggtctgctggtctttccctgcacttccgtccgacctcggtcacagccctgggtggggtcagatatttctacccatactcagggccacctgttgccccaagttctcacttcctggcagtgtccctctgctagcccttgctgctgcccccaccttcctctgtctgcccgccaccccccagccttttccttggtcacagttgtccttttgttacctgcggttatcagaaacatggtcaaatagggtataagcttttagtatcccat

SEQ ID NO: 95199 - DNA, 114586 bp, Homo sapiens
tctcatgagcctttccccaggcattggaagactcttgctatagaaacacatttaaaacaggattacgtcttttatttcatggatcttcctcctcaagtgcgtgatccagggcgatgttgggtaggaaagggaaagawaattagatttgcaccttctgattgttccagctacagtcttagaaattacaatttcatgaggaactggcaatggatattaaggtaatatcactttgggggaaactatcatatgaaaataaaagcttctgttcataagggtatatttaaaactcatttattaaaatattgcttagaacttgaaaattcatcagtaggtgaattgtttggaaagtatggtttatccatacagtgagatgttatacacttttaaaaataacttggatctacatgtagtaacctggaaagaggcccattatacactgtttaatgaagaaagcaagtttctgagtaatgtatataacatgattccatttatatacagcatacaccaacagcacacacttttatatatataacttaggtcttatatatatttgcatgagcaaaaaatagagaagagtacacagtaaaatgttaatattaccttaagggggtgaagttttaaatgaaagaaaaatctagcaaagtttaaattaaaataaaatcccctgagaagaaagggatcagaatggttacatggtccagaaaggaaaaggtggactcaatcacagctttgttttaccacctccactcattatgcgttttcaggtcgggttgccctgacgcaccagaggtcagccctatgctaaggcagatgacaatgtgttatgccacaagtgacattggtaaatagtgcatttggagagaaaaggctataaaacttctcatctgtaaaagtttccaaggcatacaagaactttggtatcttggtaaaaagaatgtgtctccaggcacacttggaatctaccatgcttctggttgaggccctacagcctccagggtctcccggtccatatcagtagatacttcttgcagggcctacctgactgtaagccattgattatattatatatatatatttaacctatgagaaccaatgcataagacccccgatggtacctaaatctattataacagttagtatattagagttagtcatttaaccaactcttcctggaagataagggtcaccagtgcagagataagtctcttcaccttttagtccagaatacttagcacttgcttggcccatagtcatataaagttaacagaaaaaaatatgtattaagttattgcactggaaagactgaatggcttccagttggctttcagggattccagagagatttcccataaaaaggtgagccttaatgaaagatttaaaaaggaggaaaggagtagagtatacaacgtccacccagtagaaaaagctaattctgttgtggcagcacaacagaatcttttgggtctttctcatccttagagaaaggtaggtaacaagagtattcaactttttagaataaaacagcaggattaagctataaatgcagaagtattatactaagaaaatgcctcccagatattgttaaagcaaatagtatcatatccagcacaaaaccgcagtgaattgatttaatcagacattatcagagcaaggaagaaataacattctggttttaatggcaaaagaaaaatcccacctcatattgctttgcaggtattggtggcactcagcgagttgttctttggaatgcagtttaaaaatattgggccttgggttagggaggaataggaccacagaggcttttgtgtaggagaacggcccaggtgtggggctgcctggaggctcagccaggtagctggctgctgcagccttggcttggctcccatctggcccagaagacactaagaacactgctggggtagctgccatgaggtggtgatggatcatggctctggcctgattctcgaggagtcgtggattcactgcagtgtgctgtggccatatgtgaaccctggccatgtgtgaggtcccctgggaggaggaggagaaaaccacataatatgtcgcccctttcagcagcaacgaccattggaacaagctagagcctgagatttcccaggcagcatggtccgcaggttaaaatgctgcttcctgattctaggggcctgggattttgggcagcagcaaaaggaagtgttggttggcccctggagatgaagtatggtacagtcttcaccttctggggttccagcatgggctcagagttgacaggagacagaattacagagtcccagcacaaggcaggtggaacctcagagggcttgctcaaccttctggcgtttgtggggcctctacatcatttacgccaacaattaatctaactgagcctttccagtaataggaaactcacttcttctgcagcatctcacaaagctggataacctttgtaattgtaaccctccccaagggtctcatcccaaccatcaacacagctttcctccagtccaggcctctcaagaacctgtgagttagagatagacctccttacagtgtggggttcttgttttggatcttctgtaacttagggatcttcttcctctgcaggtgtttttgtctccagatattcttgtccagttgtcctccaatcatcactgtcccttagaattagaggcttaaagaatcctgatgcccaaacctcactaaatcatactctctgggggtagaactaaagcactggtatttttaaagctctccagatgattccactgtatagccaaggttgagaaccactgtcttgctccctgaacctggtcaacttcttgaggtttatgctatggaatcaggtatcttagatttgaatcttgcctctaccacttgggcaattccttgtgtttttgttttctcatctgttatatggggataattgtatctacctcaaaaagctgttgaacgggctacatgagaacacaggtaggtcaagaataatctctggcatatagtaagtgttctataagacttagcaagtgttctataaaatttaactcatgtgcctaggacagggcctagcgaatgttgacataatatttgtgcacttgccatgagataggcattgttctaagcactctacttttgttgtgttgaagatctagtataagaaaaattacataaataaaatgcgtcttcagaacctctttacctggtagggtctattgtttcaaactacccatttgactcacacactagtgaactctctgaaccccttatcatcccacatgttttcttgcctcccatgaaaatctccttaagagttctacagaagatctgtacctgtaaaagcatccaacatgactacattaagagctcatcaatggtcaattcaatatgttttgttgcctcttgttaaggctagtgcctattaatgagctgggcatttaagagatgcctagtaaattatttgtgggatgactaaactaattaacctggtgaaagactatgctaatatatttttgcaaaagagatagagaaagactgaattcacaggaatggtagggatgctgagaaaatagttctacaaagtacctactatgtgctaggcacttttcacaatcataagatgtgaatgttcaggtcatctcttggtgtataacaaatcaccccaaacttcgtctcttaaagtaataattagcttgcttgtgaatttgttcttaggtggttacatagcaggaacagcacctctttgttctaagacagctcaacagggggctagagtatccactttcaaaacagttcactcctgtactccagcctttatggaaccaccctagtggcataggctcctcactcacagccccaggctggctctgggttggatgggttgggacagaaaactcttgccatgaaaatatagctctccatctcagcctctccactccccattccaaagggagacgtgtctgtgcttggggagaagccaagcaaagcaaaagatttcaacagcgaaaggaggaaacacacccactgaggttctcatagcaacataatcacgcacaggcagcagcctatttcggtgggagcttgtttcagctcccctcctccctggttagtcacagaaggcatgcacaagcagaagcagtgttgggtgggggcagagtgtcggactgaaagtcaggaggctggggagctgggtcctctgcttgctgatggaccatgggcaaatgtcctcctctctccaatcttggggtccttatttgtaaaatgagaggattggaccacagagcggtgaggatcatttcttttctgatttcctttgattgcacaaacactgagacacttttggtagggaattagatgtctctcagaatcttttgtctctgagaagatgcctagagaaaagggaattcaataggataaaagtcattctccagattcacatttattttcctaccactttctgcatgttgacagaacgggaggaacgactgggtgttgtcaaggattctgctcactcacccccaactctaacccaggtctgtgttctgagaagggaaaaggttaaggaggttaaggtcatctttttattcaagttttcacacacacacacacacacacacacgcgcgcacacacacacacacacactcaagcctcttgctacattttcatccttctcattcttcatcctctcctgtctctatccctcacttctcacctctacttagtgcaatgtatcctctctttgcccgaggaccagatgatggaggcatgtttcctactgagaatgattctagaccttttcttcaatggactctggggttagttgaggacagtcaggctcacacttcccagttatcgaaggtgatgataaaaagcaaatagggcatttgggagggacctccccaaacaagtacagagatgaagtgaagacagccgggtgctcagggagcatcttataggtctcagtccttgactcgtaggttgaaagcttaaaagtacagctgttttaaggagtcagcctgagtgtcctgttgcaaagggagaggcagaatggggtcccccgcttttgttctatctcccactgcccgacagatggccagtaaaacagagaaaaagaagctctcaaagtgaagacaggaatgcattgtataaaaattcacaccccctgctgccgcccaaactcccttaaaaaaggatcaagagaatcctgacgggtacgtgacatcctccctctctcccataaaagggacttcaaaatctggcgatggtgggggaagggtgaggagggagaagagaaatgcgtgggcagggggctgccagggaagactggagtggggggggggggcactgcagtctcgcatttgactttctcccaccctctttcccaagccactctggccgccacctttgcccctccctctcagcctgaaaggggcttggagtcccaagggctttgggtacaaagagagagagagagagagagagagagagagagagaaaaggataaagaatgacaccacacttacccctagagttgaaggagttaaggaccctcccccatccagacacccaccccttcgttccccaaatcgtaattcgccgaggaaggatccaggaactggcagaggagcgggagagctggggtgggccggggtggggagggtgcgagttaactgtggcccggtctcgcccggacctcgccctaggtgggagcacgcgcaccgggtctgagaacctgcaagagcctcgcccggcgccggctttctctgggccccccgcgcgggcctggcctccacgtaagttgtgtgcagcgccagggagtggaggcggccgagaccctcggagactaggggagggggcgggcccgggggcgctgggggccctcggtctgcgcccagccgccgccggctccagcgaacctcctaccccgcccccactcacccggctcagcccctaggagagacgcgcaggaagcgtgttgcttcgcccagcggatcggcagaagttgagaggagttggcggctgcctccggccggccggactttgcgagcagcctggagaggatccgcgaccgccgccgccgccgccgcggaggcttcggggctgcttccctcgagcttagcccgcagcgcgggtggagaggggcggggagggggtcgggggcacgagaagaacttgaaaccgtgtgaaggaatccggagcagatgagaagggaggaaaataaaagaaagtggagactgcagaacagactccgctgtggctgactgtgccggccgacgctccagctgaggggctgggttggatttttttttttctcccatcctctcgctctctcttttaaagcgacaccagctctctctcctcctctactatctcggtatcaccaaacccttgccggctcttatgggcatgaaacactcctcccgctgcctgctcctgaggaggaaaatggcggagaacgcggccgagagcaccgaggtaaggaggcgagcgagcaggggctctcggagaccccgccgcccacccggaccaccgcgccgccgccgccgctcagcgccgagtgccaaactttccccagyttcatcccgctcgcttctgccggcctcctcctgtgtgtgtgtgtgtgtgtgtgtgtgtgtgtgtgtgtgtgtgtgtgtgtgtgtgtgtgtgttggtggggggtgggggggaagttcatgtctcaggtcccctccctcttgaaaatgcaaaacagtcactctcaccccatcaccctctcctgccacccgctgctcccttctcccgcccccaagtcccaaaccccgggcagccgcgctcccctgccctctcctctgggctccgtgagggctcccgggtcccggctttgtgcagagctggggtgggtaatcctggggccaggtctgccccctgcagtgccttgaccgtctcctgccgctgcctcagctttacccttcaagctcgagtcggttcccgagctctccgtccccgcagcmgcgcggagagcccccggccgcgggggccgagccggcaggaggactcgggcacctcctacagaccctccggcccagatctgggccagagagaagtctgcaatcctcagatatcagagccgcctctgggtagctaaacccggcagggcacacgggccgcggccaccttcagcaccagggacagcgtccgcccctgcagcagccgagcctgcgcggactgtgggggctgcgcgccgccggctgcagtgagaaatgggtctgcagccacccgtcccgcaagggcttttgaggaggtcgctctagctccgcaaattgtgttctcggcccccgccttcggcagcctttttctctactctccagctggccctgagccgcagagagccctgctgggctttgcgtcccgagactcgaggctgtgatccctcgcctccctctgaccccgctgtcattacaacaaccggactattccgtaggctctgggcacctgtagtcacgaaggggatcagcgtgggcagcccccttaccttcctggagaaacggtgcgccgagatgggggcggagtggggcatgtgtgtgaagatcatcccttactcagtggcaggaaaaagacacagagagcaaactcccaggctctattaatagctgggtgtctggtggggctgccgcacatttcacatatggttacccatatgcagcggggggcggggatgggggtgtggcgcggggattgtccctctgtcttgccggaatgcaaaaaggtagagagacccttcctggtcttcttccctcgagttcttaactctgcgctaaaacccctaccccacggcgtaggcagcaaagctttataaatcccccttctctgagagactagaagcagcatgcatctgacaattgtcaatttcaaaacaaacacgctccgggacttgaacgcagcggggcattcagtagcgaatgctgtctccttgagttagggcaaagcctgcgtgcccgccgtcccctcaccacttcctcttccccagcccccacctgagagcagacattcggaatgatgtgtagtgcgaggcggctagcctcccagcagaaagccatccttaccattcccctcaccctccgccctctgatcgcccacccgccgaaagggtttctaaaaatagcccagggcttcaaggccgcgcttctgtgaagtgtggagcgagcgggcacgtagcggtctctgccaggtggctggagccctggaagcgagaaggcgcttcctccctgcatttccacctcaccccacccccggctcatttttctaagaaaaagtttttgcggttccctttgcctcctacccccgctgccgcgcggggtctgggtgcagacccctgccaggttccgcagtgtgcagcggcggctgctgcgctctcccagcctcggcgagggttaaaggcgtccggagcaggcagagcgccgcgcgccagtctatttttacttgcttcccccgccgctccgcgctcccccttctcagcagttgcacatgccagctctgctgaaggcatcaatgaaaacagcagtaggggcggccgggctcctgcgaacaacaacaaaacaaacaaacaaaaaaccacgtcgcgtgcggggcaccaaggcggtgcggggagggacagacccagctggggctccttggaggggtgtgagccaggttggcggatcggttcttagcaacttccctggagaaggggtagaacccagacttggtcaaacgtgcctagcggaggcatccaggcagcgtgacaatcacttggtttccctccaggaactggctgtttttggaataagccaggactagagcagcacttccaaaagtggggtgttgtggacttgcctgcatttatggtagatgagagcggcaggagcacgcctccacgtgtgtcagtgggtggtggggagcgtggtagtggtcctagttctgaattccacacctctttgtcaagcaccggctctgtaccaggaaagctaggtacccaagttccaaacatgaggaccacctggtccctcctctggaggggctcacagtctcatggacaactatgatggataatcctgtagccaccttttcctgctttttgttgtttatctcattccatcctcacaacaatcctgtgagataagcaaagattagtattcatttcttatacccattttatagttgaggacaccgaggctgaggtcaagcaattgctgaaagtcttctggtgggttaagtcagccctgaaacacagactgcccccacttctgattcattgctgtttgccctgcccttgctatttctaacaagatgccatgtgtgaatgggagtagatgaggagtgggcagagaggaatactttggaagggagagatgcagtgatggaggtgggcaaggatgggagaaagtgttcgttcaaaagctaaagctacggagagatactctaaccattgggcaggaagggagcaagtgaagaataaaactacttacattttgaccaaagcctccctccasaaagcgaagtacccagctagggtacgagagcatcaacatcacgtgcttgctggacactgttggcaatgggtggccctgggggcactcttcaaccgctctgacctcagttcccttctctgttaacttgagctgattctcctcatggaatagggcaggtatgggtataaggaaatgccaggacagcccctggcacatggcaaacacgcaatagtgttagttccatktacgctttctcctgatcactcagctatgcttctcttcctcggctaagggaatcaccattctgccagcctcttctccctctcccctgttccctaggtgtcatgagaaacctcctctgtggccttctggaacatttgcaaagcctccagtcccactctcctcttcagcccattgtcagtgcccaagacacatcatctcacctctgccctcactaaggcactttcctctgaactgtttgtcctcttctctaatcaagcctcataatcctactgtactggatcagctttctgaagcacaaatctgctcatgatcaggcatctctttaaaaacttaggatgctgtcctattgcctacaggacactagataaagcccagtttccttagcatggtgtgcaaagcccatcaatacctgcatcatgcaattcttggaaaagacctccgactgcatatgtgaatgcttctgtgcatactcttccctctgcctgtgccggtctttcctccttcttctctctggaaaacaatctttttcaacctgcaagacccagctcaaacgttacctcctctgggcaggcttcccagatctgccatttatcctctctccccagggaggggcattaccctttcttatgtgttcctaacgcctgtctctcacttttcctattgcaagataattggctttttgtgtgtctatttatatgtctattagataatgcacttttttttgaatttgtgggcctgacacacaataagtaataaatgttaataaatgttgactgaattgatgtatgtgattgtgaacaaactcttgagcctaatgggctttagtcactcatggcttcctggaaattgggattcctatctcccaccccacctgtctgctgtacttagttgctgtgaacctttgaaactcaaaatgggtaaatattctgggaatcaaggtgctgaagccagtcaaatcatgggtacattttggttattcatgtacttattcaatattcagtaattatcgactcttactatggagtgctcatctgaatagcagataaatggattaatcacaatgcccaattatgaaccatgggggataatggaccctcctgagctactgcttgctttactgatacttggtgaaagtctgatgcatgatgcattatttatggcgatgactccctgattagggttttatcacctcaaaggagagcccccaggagttgggaaacagttttagcaaagagtcactttggaaactgatatatatatatatattttttttttttttttttttttttttgaatgttctgttgacttgctggcccagggagagggaataattacaggttggaaaaaatcctacaatgtgacaatgagattaggggttgcagtgagttatggggataactgagctgacttcttgcatggtgtatcttggtggttttggctaatagatctttctcctcaggaagttactttcagctgaagaatgtggtcccattattacaggggttagggaattgaggaagaggaggaaccaggcatagttctctgaggatggtcttcatctatgtctgtttctgcagagtgtgtacactaactagtaggctatggagacagacttcctggttttcaatccagttctggacctagtagatgtgttgctacattgagcaagttgcttaatgtctctgggccttttaagattgttgtgaagatgaaaagggttaatttatgcaaaggaattagaacattgccttatacatggtgagttctcaataagcgtttatgattattatcctgctagcttttaggagtcttgccaaaaaagtgcaaactgaaagtattctcccactttctcatttctgtagctgaaatgatccataaaaccatagtccatgtgactttttcctccctccgcaaacactgatttcagtccttaagtgagctcaggagaattaagaagatacccaatttttttttttttttttttgcctggctaatttggcttttcagagtcctaaattggcttttggctgtcaaagacagtgaaacacaacactcctgtctccaattcaggagtgggtttcatttcctcctctttgctaactgcaatgtgaagtgattatcacataccagtgtggaacatgcaaaaatctgtaaaaacagtccttacaccttggagtctactctgccagcagggggaaaatgggcagcctgaaaatatgtgaacagccaaggtaactgaaagcagcctctgtgtgtgagaagcaagcaggtggtgctgttgtgaactggcttagtaacaagatagagtgagcacaggcaagaagggacctctgaaaggtcattctgtccatgcctctgtctctgagaaccacctaaccgaagatgcattgttggccacttggtctcttgttaaaaagcttcagagaagggaatttccccaaactcctcgagtgtctcagtagtcggaagttctccctgaagtctgagctcaacctcttcgattgcaatctgagtcaccttcgtttatgttattctaaaaagagatgaaaactggctgctaccttttcatttggggttgtctcaccatttttactagtttttgttccaattgattccaatccctttttctgatattctggtattagacttctaataggaatagctaggagaggagtgtttgagatttgcctctccagtattatccagccaaaatagccactggatatttcacacatcaaatgtcttttcttacttcacttgttataagaattccctcaagcatcacagtttttcccatatttgtaatgagtggcccataagtaaagatctctttttaaagtgtaattttatattgagcaaacagcttgatgtgcgtattttcataaagtcatagaatgttaaagttgggtggaaactcaaatcacttaagtcaggagataggaactacttgtccaatatcacagagctcttccgtgttggggtcaagatcctgtggactcctgggtctgtgctctttatacctcctttaaacgtagcatctcatttattgtttttattttttgtgccaactttctggtatatcctgatctgtactgtctaagaccagtgtttctctgcataaggtctaggaattgtgcatagtgagagctctgaccttcttgtagaacttaaaatgctcgcttattacattgcattgtgtgcaatgctgtgaattacatatatccccgttgtatggattaataaactgaagcacagagagttactgttatttgctcaaaatcccacagctggtaagtgatgaggctagagctcaaagtctggttttctaatcaccaaaatgctttttctagtccgctaggctgcgaaggcatgagaagaaccagagtacaaacttaaaatgtgaagagaaagggtggagaaattaacagcaggaatgtggaatggtgaatttggaagaagcctaggaagagacaccagcccagctttcctttttccaggacgtcttttcttgcttccaccgccatcttgccatcctcactttcacagtctccagtactgtgccgtgtgagtgacaggggcctgacataattgtggcagggacagccatcacctcactctccctgcgcatctaaactatccctaggcgtgggttcctagctggacccagtagacaatgtacttgtctaacaaagtatagctcttcggaagcttgaccctaggccatcaatattagatctggactctcatccagctactttattgggataaaatgaatactaaagtctccaggacaggaactttgtttcttaaaatttatctttgtagtttcatcacctgtattaccctcctaggtctgctgtaataaagtaccacaaactgggtggctttaaaacaacgagatgtcttcttccacagttctggaagccagaagtctgaaatccagatgccagcagggttggttcctcttgaagtcttcatggagaatctgttccttgcctttcttctggtttcccgtggtggccaacgatgctcagccttccttggctatagacacatcatctggtctctgccttcatcttcacagggcattctttcctgtgtgtgtctatacgtcttcttataaggacaacagtcttgttggattaggggccactctaatccaatatgacttcatcttaacttgataacatctgcaaagaccctatttttatttttatttatttatttattttttttttcctttctttttttttttttttattatactctaagttttagggtacatgtgcacattgtgcaggttagttacatatgtatacatgtgccatgctggtgcactgcacccactaatgtgtcatctagcattaggtatatctcccaatgctatccctcccccctccccccgaccccaccacagtccccagagtgtgatattccccttcctgtgtccatgtgatctcattgttcaattcccacctatgagtgagaatatgcggggtttggttttttgttcttgcgatagtttactgagaatgatggtttccaatttcatccatgtccctacaaaggatatgaactcatcattttttatggctgcatagtattccatggtgtatatgtgccacattttcttaatccagtctatcattgttggacatttgggttggttccaagtctttgctattgtgaatagtgccgcaataaacatacgtgtgcatgtgtctttatagcagcatgatttatagtcctttgggtatatacccagtaatgggatggctgggtcaaatggtatttctagttctagatccctgaggaatcgccacactgacttccacaatggttgaactagtttacagtcccaccaacagtgtaaaagtgttcctatttctccacatcctctccagcacctgttgtttcctgactttttaatgattgccattctaactggtgtgagatggtatctcattgtggtttttatttgcatttctctgatggccagtgatggtgagcaatttttcatgtgttttttggctgcataaatgtcttcttttgagaagtgtctgttcatgtccttcgcccactttttgatggggttgtttgtttttttcttgtaaatttgtttgagttcattgtagattctggatattagccctttgtcagatgagtaggttgcgaaaattttctcccatgttgtaggttgcctgttcactctgatggtagtttcttttgctgtgcagaagctctttagtttaattagatcccatttgtcaattttggcttttgttgccattgcttttggtgttttggacatgaagtccttgcccacgcctatgtcctgaatggtaatgcctaggttttcttctagggtttttatggttttaggtctaacgtttaaatctttaatccatcttgaattgatttttgtataaggtgtaaggaagggatccagtttcagctttctacatatggctagccagttttcccagcaccatttattaaatagggaatcctttccccattgcttgtttttctcaggtttgtcaaagatcagatagttgtagatatgcggcattatttctgagggctctgttctgttccattgatctatatctctgttttggtaccagtaccatgctgttttggttactgtagccttgtagtatagtttgaagtcaggtagtgtgatgcctccagctttgttcttttggcttaggattgacttggcgatgcgggctcttttttggttccatatgaactttaaagtagttttttccaattctgtgaagaaagtcattggtagcttgatggggatggcattgaatctgtaaattaccttgggcagtatggccattttcacgatattgattcttcctacccatgagcatggaatgttcttccatttgtttgtgtcctcttttatttccttgagcagtggtttgtagttctccttgaagaggtccttcacatcccttgtaagttggattcctaggtattttattctctttgaagcaattgtgaatgggagttcacccatgatttggctctctgtttgtctgttgttggtgtataagaatgcttgtgatttttgtacattgattttgtatcctgagactttgctgaagttgcttatcagcttaaggagattttgggctgagacgatggggttttctagataaacaatcatgtcgtctgcaaacagggacaatttgacttcctcttttcctaattgaataccctttatttccttctcctgcctgattgccctggccagaacttccaacactatgttgaataggagcggtgagagagggcatccctgtcttgtgccagttttcaaagggaatgcttccagtttttgcccattcagtatgatattggctgtgggtttgtcatagatagctcttattattttgaaatacgtcccatcaatacctaatttattgagagtttttagcatgaagggttgttgaattttgtcaaaggctttttctgcatctattgagataatcatgtggtttttgtctttggctctgtttatatgctggattacatttattgatttgcgtatattgaaccagccttgcatcccagggatgaagcccacttgatcatggtggataagctttttgatgtgctgctggattcggtttgccagtattttattgaggatttttgcatcaatgttcatcaaggatattggtctaaaattctcttttttggttgtgtctctgcccggctttggtgtcagaatgatgctggcctcataaaatgagttagggaggattccctcttttcctattgattggaatagtttcagaaggaatggtaccagttcctccttgtacctctggtagaattcggctgtgaatccatctggtcctggactctttttggttggtaaactattgattattgccacaatttcagagcctgttattggtctattcagagattcaacttcttcctggtttagtcttgggagagtgtatgtgtcgaggaatgtatccatttcttctagattttctagtttatttgcgtagaggtgtttgtagtattctctgatggtagtttgtatttctgtgggatcggtggtgatatcccctttatcattttttattgtgtctatttgattcttctctctttttttctttattagtcttgctagtggtctatcaattttgttgatcctttcaaaaaaccagctcctggattcattgattttttgaagggttttttgtgtctctatttccttcagttctgctctgattttagttatttcttgccttctgctagcttttgaatgtgtttgctcttgcttttctagttcttttaattgtgatgttaggctgtcaattttggatctttcctgctttctcttgtaggcatttagtgctataaatttccctctacacactgctttgaatgcgtcccagagattctggtatgtggtgtctttgttctcgttggtttcaaagaacatctttatttctgccttcatttcgttatgtacccagtagtcattcaggagcaggttgttcagtttccatgtagttgagtggctttgagtgagattcttaatcctgatttctagtttgattgcactgtggtctgagagatagtttgttataatttctgttcttttacatttgctgaggagagctttacttccaactatgtggtcaattttggaataggtgtggtgtggtgctgaaaaaaatgtatattctgttgatttggggtggagagttctgtagatgtctattaggtctgcttggtgcagagctgagttcaattcctgggtatccttgttgactttctgtctcgttgatctgtctaatgttgacagtggggtgttaaagtctcccattattaatgtgtgggagtctaagtctctttgtaggtcactgaggacttgctttatgaatctgggtgctcctgtattgggtgcataaatatttaggatagttagctcctcttgttgaattgatccctttaccattatgtaatggccttctttgtctcttttgatctttgttggtttaaagtctgttttatcagagactaggattgcaacccctgcctttttttgttttccatttgcttggtagatcttcctccatcctgttattttgagcctatgtgtgtctctgcacgtgagatgggtttcctgaatacagcacactgatgggtcttgactctttatccaacttgccagtctgtgtcttttaattgcagaatttagtccatttatatttaaagttaatattgttatgtgtgaatttgatcctgtcattatgatgttagctggtgattttgctcattagttgatgcagtttcttcctagtctcgatggtctttacattttggcatgattttgcagcggctggtaccggttgttcctttccatgtttagcgcttccttcaggagctcttttagggcaggcctggtggtgacaaaatctctcagcatttgcttgtctataaagtattttatttctccttcacttatgaagcttagtttggctggatatgaaattctgggttgaaaattcttttctttaagaatgttgaatattggcccccactctcttctggcttgtagggtttctgccaagagatccgctgttagtctgatgggctttcctttgagggtaacccgacctttctctctggctgcccttaacattttttccttcatttcaactttggtgaatctgacaattatgtgtcttggagttgctcttctcgaggagtatctttgtggcgttctctgtatttcctgaatctgaacgttggcctgccttgctagattggggaagttctcctggataatatcctgcagagtgttttccaacttggttccattctccacatcactttcaggtacaccaatcagacgtagatttggtcttttcacatagtcccatatttcttggaggctttgctcatttctttttattcttttttctctaaacttcccttctcgcttcatttcattcatttcatcttccattgctgataccctttcttccagttgatcgcatcggctcctgaggcttctgcattcttcacgtagttctcgagccttggttttcagctccatcagctcctttaagcacttctctgtattggttattctagttatacattcttctaaatttttttcaaagttttcaacttctttgcctttggtttgaatgtcctcccgtagctcagagtaatttgatcgtctgaagccttcttctctcagctcgtcaaaatcattctccatccagctttgttctgttgctggtgaggaactgcgttcctttggaggaggagagacgctctgcgttttagagtttccagtttttctgttctgttttttccccatctttgtggttttatctacttttggtctttgatgatggtgatgtacagatgggttttcggtgtagatgtcctttctggttgttagttttccttctaacagacaggaccctcagctgcaggtctgctggaataccctgccgtgtgaggtgtcagtgtgcccctggtggggggtgcctcccagttaggctgctcgggggtcaggggtcagggacccacttgaggaggcagtctgcccgttctcagatctccagctgtgtgctgggagaaccactgctctcttcaaagctgtcagacagggacacttaagtctgcagaggttactgctgtctttttgtttgtctgtgccctgcccccagaggtggagcctacagaggcaggcaggcctccttgagctgtggtgggctccacccagttcgagcttcccggctgctttgtttacctaagcaagcctgggcaatggcgggcgcccctcccccagcctcgttgccgccttgcagtttgatctcagactgctgtgctagcaatcagcgagattccgtgggcgtaggaccctctgagccaggtgtgggatatagtctcgtggtgcgccgtttcttaagccggtctgaaaagcgcaatattcgggtgggagtgacccgattttccaggtgcgtccgtcacccctttctttgactcggaaagggaactccctgaccccttgcgcttcccaggtgaggcaatgcctcgccctgcttcggctcgcgcacggtgcgcacacacactggcctgcgcccactgtctggcactccctagtgagatgaacccggtacctcagatggaaatgcagaaatcacccgtcttctgcgttgctcacgctgggagctgtagaccggagctgttcctattcggccatcttggctcctcctccccaagaccctatttttaaatgagctcactgtcacaggtactgggggtttaggacttcgacacatgtttttggatgacacaattcaacccatgatgttactcaacacggtgcccgccatatagcaaatggctgatgaatggcctcagaatagttgcaagtccgagaaagtggtctctctcccttatctctttcctgcttctcactcagctgcacactgcacccactggcttcccagggtctttatcatggctttttccttgtgcagtagcaatcactatagcaagagctaccattttagcatacatattatgggttgggtgctgtgtcagtcactttgtaaacattgccttatttaatttactcaacaacattgcaaagcaactcttattaattctgttttgcaattaaggaaactgaaatttgcagagtttcattatcctgatcaacattatggagccagtaagtagcagagctggaatgctctctgctgttgacatggcctccttcctctcttttgtccacactcccaaccccaggcttgtcctaacctttgctccacaccagctcctacccacctggagatttggaagatacacttccacgtgtggaaacgagcctataactgattggagcttgtggccctgtaataggctccctgggttagatcccctcatcttcctagcggttttgctttgtagttgtcagaggaattactttagtggtaaacttgggcgctgatcagcagcttatttgaagggctcttctggagggcaggaaggacaatgaataactaaaacatgtaggcccaccgacttctcagcctgtagcagttctgtgtgggggttaattgtgcaggctctggggttagtgtggggctgctagctgggttcaagctcagctctgctgcttcctagcttgcatcgcttactgcagttatctgtgtgtgggattcatcctctatgatatgtatgggtagtggtgcattatcccatagggttatcatagggactaagtgagttatttcacataaagcacatgtctggcacatggtaaatactcaagaaagattagctttattagtaatctgggcttacccaacagtatatgaaaggagaacagataagtacagggccttgtttgtgacagtgtggaatcggcactggaagagacgggagcagaacagttgagggaaggcacctttgattcaggcaattcatcctcaggttagccaggtggagtcaagaaagcagctgaagacagkgctctttagcttccctgcccagaggtccactgtgccatgtgaagggcccattacaggaggaacagggagcctcgtgacccacaggctgcctaccgcactccaggctcactcccagctttgggatgtagaactcaggtgtttgtccacatctatcaaatgaaaatgaagcctcatggagttcctacaggtgtgagggaatgggggcacggaagagaagtggtcattctctacgggaggctccctcgagatagacacgctgtctcaggcttctctcaggcttgacacaccactcaagccttgctcaattcctacatgttgattactggactgattggtgactttcccctgtgctcctaccgagagaaactgaggcatggataggaggtaggagagagagatacacaggctgacatgacaatttggaggtttaattattgagttaaattccccgtcttcttggcgctaaatcctgcagaatataagctgtgtgagtggtacagctaaggccaaattgggctaatgccactataaggggaagggctgttaacaaattcctcaattagggccccatttgtcactgtattgtgaaatatcatctcttgttagctaaagtaaagcggtggcctttctttttttttttttttttttttgagacggagtctcgctctttcacccaggctggagtgcagtggcgccatctcagcttactgcaagctccgcctcccgggttcacgccattctcctgcctcagcctcccgagtagctgagactccaggtgcccgccactgcgcccggctaattttttgtatttttagtagagatggcgtttcaccgtgttagccaggatggtctcgatctcctgacctcgtgatccgcccgcctcggcctcccaaaacgctgggattacaggcgtgaaccaccgcgcccagccaagtggtggcctttcaagcctgggtctcccagaaaatgaaagactataattcccatagtcacattaaattcaaggacttcctctctctctgacaagcagttatgacagtaattctctggggaggctcagtcaaaggattccacaaatgattatagcccatcagaagtgtagatagggccctaattaaggcatgttctctattaacatgcattagttcagttttcgcccacaggtacatagtagaaaattgacgactactcttattgaatgagtaaagaaaataaacctgtatatagcacatactattccttttgttagaattctttttcttctccttcttttttttttttttttttgagatagagtcttgctctgtcacccaggctggagtgcagtggtgcgatctcggatcactgcaacctctgcctcccgggttcatgcagttcccctgcctcagcctcctgagtacctgggattataggtgtgtgccaccacgccctgctaatttttgtattctttccccttttttcccacattaaagctgttgacccagtatggtgtaggggagagtataatagtcagatctgattttggatctcactttcatccctgtgggattataaatcccattttataggctggccatgaggattacatttgataatgggatacgacataaagctggtagatgttttcttctttttcttactgttacaactttaagatttttttctgcccagttgttgtttcacttttaggagaaaatttatagttcataatgggaatagtcaattctgatgttcaccgaaagtagatataaatgacctattccagacagactgcagggtgtcgggatgtttctgtgtggggatatgtacacgcttctgagtcagtaggtgcgtcatgcaggagaacatgctcatatacaaacatacatatcctgtgtgatttgtagttcataatatgtgagacatgaggtacaagtttaattaccggcctggagcttctgagctacacacagggtctgacatctgaacgcgggagagtgtgtttcctgtgagaaacatgttaaggtgaggccgggcgtgggaatagttgagggagagtcttgtaaagatagatccgagttttagggtcagagacgttatgcagccctgactttgcagctgatgtgcttcgttgattctgtgagttgtggtgctgtgggcttgttccaggcagggttctggtcaccttctctgcctgctgtctccgggtgacccyatccactctctcagcgtcatgaccagttcccattctcagactgcagcccacatctctcctctgagatacgcgaggcatagctgcctgcctgcgggacatcttcactgagatgtctcataggcacctcaggttcgctgggttgcctccggagtcctgccctcttcccagctcctgccattctcacttttcttggtaataagtcaccaaaatcacaagcctgaactctgctctctcctttctccataacaagacctggcgattctacatctgaaatgtttctcctctttgtcctgaatctgtcctccccattccaggcccactgtggccgtccctgttcgtgtctcttcacctctggcctggatctctgcagtgatcttttagatgttgtcttggttctcctatcacagcagtgtgagtgcatattctagaatagaaacctgattatgcttctcccttccttaaaccccatcagtggcttttccattattcttaggatcatgacccactcctcacccgggctcaggagcccctgtgtaatcatgcccctgagtcctcttccatccccatttcttacaagcccttccctctgctccagccacactcagctgcctacctcccytcctcgactcgttgctcctactctctcttcaggtctcagtgtggatgtcgcttcttccaagaaggctttcctgctaccaccttcagatccaagtctcctcctatgttatcctatagtaccagttcctgctgtctcagcgcatatcgccttgtgctttatttccctatttcctcatctagaagtcaaccatcaactttgtgagagtagacactgtttatgctctttaccactgaaccccagcatctaccacgatagctggtgcctgctagagacttaaaactatttgttcaatgaactatcattggccacatgtacctttcctgtatgaaaaaaaatgttctatggatgctagcaattaaatgaatatttgttggtcccgttcttaattcagtgattgaggctgtatcagtcacagaggatcccactagaagagtatacctctgaggtcaaagccaccatccatctgacctaaagcaagtccgcagttaagctgtcccagttagatgttcactgctgaagagcaaagtcaggcaaagtcagagttgcagagaggtttttaatcaatgcaaactgagtaacagattttcgcatagacaagtgtaaccggcacggcataagtctcagaaagggctaggggagtgagggctttgcctgagacaatcaagaatgccctgtgcttaggcagtggcagcagagagactgtagggagcccctgaaaaaccttgcttgaggcaggagtattttagggtttggaggagccaatatattttctcccttgaccttatccaccattactggctgctctgagcagaagatgcagtgggggatgttctcagaccagagatctgaactgtcctgaggccaaggctcctaattgcgggcactcagggcctggggtcctgctctggggtggggcggctctgcagagtggacatgacccctgctcccagcgtggtccaggtccctttactcatgtgtgctgtgggtccgacacaaccatgaacttttctctttataataaggtctagggttctatatattgcactgtaggatgactgcagtaaacaatratatactatacagtttcaaataaatagatggaagatattgaatgttcccaacacaaagcaatgacaactgtttgagttaatggatgtactaattatcctgacctgatcactatacatcctatgtattcaaatattactatattccctatgaatatgtacagttatgatttgtcaatgaaaaaattaaattgaattttaaaaatagatmaaaataagttgctccctactcgaagatgtaaagaaaaccaaactaatggcttggactgccagtactgcagggcctggggccttgtccacaaggccagctccagtggcttttcttggaggcttaaccaaactgctgccagcctgtaccccaccccactttcttcttacagctttgcctcagcggcagaaatcagagttttcagaggtcttcaggtccacctccacctcgggagtgcactccacgtaatccagtcaaggcagcagggacctatcctgagccccaaggagtagctgcctcaactttccttacacattcactccagttcctcgggccctcagctgataccaagtaacatagaaaaagtcaagaatcaagagccagaacccgtgatcctgaccctgctgcagagagttacacatctgaaaagtggatgaaatgatccccatctatctcagtctgtaggcttaccccttaaataaatggagacaatgggcatgaggactttaagaggtaagaggttgtgtgcagatcttacattttgctcttataacctcacactttgcctgttataaccttgctctctcaggggcctccagggtagctccatgcctgtcttcccttatcatgctgttgatggagctggatgccagctccacatggctgccccttccagacatgcccatgggtgctgaattcgtgctgttgaaaatggagagatgtttttcccttaggcagcaaatggcatagaaggtggaggtttggggagcagcaggaagacttggacaaagaacgtaaggggctgtgacttggataaaggacttggacaatctgaactttctgggtctgtgacttggacaaaggacgtgactcactgcaggcagcctgctggcaattatttgtctggggaagaaaccttgctccagaaacctctgccttcacttttgtttctcacctgctggctcagtcttctttttctcttcccttcccaggcctgggtttctatgcatctaagtgcaagagctctttcttttccaacaggagagactgtgaggggctcactatccaagtggcagccccagtttttcggctctgggctgtgtgggcctgggtgttggagagaatccagtcccaggcagctgttctattggtgcctgcttcactgggcagttgatgcataamcttacataggtgtcaaggatctagactgttctgaatatgaaaagagctaaaggggaaaaaaaagcaaagatttgagtttcaaatccattaaagccatccttctttggcttcctaagtgtgtagtgctggaccattatttctaaagtgctggggctggcttatctcccaggacataggcctgagccaggatgctgtgttcctttgggtaccatggctggtgccagcagctgaacttcacactggggccttgggagtgtggggggcagtgggaagtgattccatggccatccctgcagttactttcctttgatgtggctcttgacagtggccttggagacccccttgtgactcactgcagtggactctccttggtctcatctcacctggccaatcagccagctacactagacactgttgcttgttgcgtttgacttgatacccactgctctgtgggcttctaagctctgctttctcctgcgtctcccacctccctgactgttctctctcaagctttcctgtggattcttctttctcgcccagggatgttgcctccagcctactgtccctgggtgatctcatcctcttctacatcttgggacatccagatctgcacttctggctggatttctcttgctttgtgttttgcaggcactttaaattcaacatgacccaaactgagttcctcacctttccttccaatttgctcatctgcttctctccttgtctgcctgtctcatggagggcactgccattctccccttcaccccagccagaagtcaggaatcagaccagaggcctcccttactctcaactcccctgccccaatctcagatgatttatgacaaaatcctgctaattctactttcttaacactgtttacgtccatctccttctctctatccacattgccctagatcagcactcattaactcttcttcccagctcttgctccgtgcctgtctcgtctccgcactgcagcacaatgcctggccaacaggatgacttagtggatgttggtggaatgaatgaatgaataagtaaatgaactatgggtagagattgcctgctcaggggagtaatgcagggtggttgttccacagctgggtggcattgtgagtaaccaccaggcatcaccattcttcatctcatttgccctcagtgagctgcttgtgaatgaacccactttagaacgaggtttgtgggattcaggagactggggctgttgtccaggctctgtaacttgctcatcatgtgacaggtcctttttgagactatttttgtccctgagagaactgcaacaccggggatcaaagggtttgagtgtctcagttgctctgcgtctaccatgcagcactctccttggaaaggaagaaggacaaagatagagatagagtgaagctggaaaagcggcggaatctgtaaggaggtatcttgctagtttcttaacgcaaaacattgttcaatcccccatcatcacccagtcgtctcagaaagttctctgttcctctttccctcaggacaaagagggcttggtcttggggattctggaagcctctttgcagacccctgacacctaaactaaatatacgatgtacctactgaacagataactcctatttcagtttcccttatattttggcttgaacagggattttatatctagtttgagtagctgactgtgtgggtcccagtaagtcccttagaccctttgagcctgcgtaatgacatcttacctgaagacagaggctggggcccatgattctagcacatcttggaatgtgttcctttctgtgtttccttctgttacttctactcttccaattgcagtttttagggaatgcgtgcgctccgtgagagtgcagtcttctctgtccatggtgagttccctgccgaattttctctacttcattgtatctggatccttttggaaagccagctatgtggttctttcatgtcacttttcctgtcctcagcccctttcaagtgttctggagatgagagccagaatatgggtatagagagcatcataagttaccagtcttggaaaaatgtttaataacaactattttagttcagttcattgcctcagcagatccattccctacagtatgttattttgtggtactttatcctgttcgattttagataatgaataatcacaattataccaggtactgctctagtgatttcctcctaggagcctatggtgacttagcacatcttggaatccttcttgagcccccggatactgaaggatcaggcagatccgggcagaggcagggggcaggggcaggatttattgtgattgtcctttggagagggaagctccaaggaggggactttgtcagggtcaaagagttggccgcagggccaaagtcaggctgtgagccctgactgttccatgtgtcaggctgccgtgcagatgttctagcctctctgaattcatcctgccttttttttttttttctgttacccctaaggtgctcttttgttcaccacagaatactgagcacttctggttcctctgaggttggtatccggttggctcagtgtcagagccctggctgggctggcaccaggaccctctggctcaccttgtgggggatgccagcaccagattgctgttggggtgtggctggcattcgggctgcaagacgtggtttagagaggggttgctcacccaggcctgcagagcctctccaaatccatccgtacttccactgaagatgtccaatataagcgggtcagggtcaccctgyctccaagtggaatgtaaatacataacacrtggagccttttttctgagtgtgccagcatcccacatgtgcccttccagttcactctgcacctgtctgcaccctgctctggagaggtttccttgcaaagctgacctttccggctgggttctgcctgtgggcracaggagcaccagtgggagggcaacaggagcaccagtgggagggtgggggagggaggggcattgattccctcggcccctccctatgggggtcactgtcgacctgctctttccccgacctgaaactttcgtgtagcagaccccatactccttcatggcttctgggttccagtaacttctcccctcttgcctcctacatctaggggtcatcctggagctcctctcttaccaatcccaggcaactgccactttgcttcctctaagctatgttgacaaacagaaattatggatgccattcatccagcacttgctatgtgccaggcacttttcgaagctttctacatgaattctgtcttttaaatcctaaaaaaatcctctaaggatatactaatgtctccaatttacaacagggaaactaagacacagatgggttcagtaaatttcccaggataacaaggtttcaaacaaaagcagtcctattccagcgtgcactcagcatagggtctggtcaacaggtgctggctgtggttttgattgtggtggcggctgctcattaggattgctagctgctcacatgttttggatgaattcagaaaagcagacctggtttgcaaagttaggtccaccctccacctgctcactggtgtggtccctgggccagtagcatcagcgtcacctgggaacttgttagaaatgcaaattgtcagagggatagccttaggagatatacctaatgctaaatgacgagttaatgggtgcagcacaccaacatggcacatgtatacatacataacaaacctgcacgttgtgcacatgtaccctaaaacttaaagtataataataataaaataaaaaaaaagaaatgcaaattgcctccccatcccagacctgctaaatcagaacctctggggacggggccagcaatctgttgtccaggtgattgtggacatgctggcttgacagccaccacactgcacagaacccacccacatgctctgtgagtagaagcacattgctttcctgcaggggtatttacggtctctgcactctgagcctggtgtggttgaactagcagggcgggccccattctctagcttgctctgcgaaacaggctgccttgacacccatgcattgtcgttagtgctggcagttcctatttcccatcttctggtgactgtggccagccagaagcccaggcttccctggtggttggtttctcaggtctgtgtacctatttgtcctggctctgtctttygctgctcttctccctgatgaatttaactttacctgtaaggtctctggtagctccagcttatagtttggccttgtgkataaagtatccgccaatagttgacccagctttcttgggctctggagtgcccaacctccttctgagataaagcaaggcagggtgggccattcacatggtggagcatctcagagcagcattgagtggggccagggccatgcttgggcagttgaggaagcacttttctttaccataggccctagggctctctggtatggagctacctggcatgtggcagactgggtctccaggattggcttcagctgctctgtcactgtgcttctctgctgttttctttgcctggtcccctcttggtgatttgttaaggggttcattcattcattcattcattcattcgtttgttcatttactcatgcattgcattcaacaaatatttattgaatgttcactcagcgtaagagacagttctataaactgggattatagtacagaggagcctgatgctgccagcatttacagagctttcattttatgggggaaacagacaataagcaaatatatgaagtggtgtccggtgctgaagaaagttctgaagaaaactaaagcaagtaagaaaatagaatgtgatggaggtggcagtgtttgcagagagggtaatctggagagggcattctgaaaaggtgacatttgaataaagacttgagtgaggttaaaggaaataatgtatacagtggtccatttccaagacaaagggccttgatttggcctaggtcagcaaactacagaagaaacaggatatactaggcccctgcttcgatagccgatgcttgtttgttggcctccccctccccaccttccccctcgccccttagttgcgctcatccaaaccaaaaaactttcatctaaaataagaatttaccagtctgcaaaatagctcacttttgtccattcttatcagcctgcccagctacttaggtcatatgtcaaatactttaagagcccctgagctaactaggattgcaatgcattgtgggctgcaacaaaatgcagcaagacaacctaaaaacaacaacagcaacaacaaaaacaaaacaataaaacacctaaagcccctacccaacaatcaataggcaacgtccaggaaaattgtaaccccatagtacccagcctgtgaggaactgggggagggacctgtgcaccaggggatcagttgcttgttgaaactgttctgggtgtgcccgctcatcagacacccgatcttgtaaaatcgtcattaaaagtctcactttcgctgttctccgggtctctgagtccattccttgggtttggatgggtgactttgtttctcacaacctggtggcccgtacagagatctctgtgcccgcgtggagtgagtctctggccgagaggggagacacatcccacttgatttatgtggcccgctctgtccaggtgtcctggctccccacagaagccatagacaaacccaacactgttattcaggagacagcgaaagtgacacagggagaaaagcaggcactgcagcaaccaggcaagctcatgcatgagctaaggtaggaaaattgaactataagtactgccttggtggttgggcatctttggaggtcttgggggtggaagaaacctccggtaagcggggctgagtacacagaggtgtgcaagaaacctccattgagggaggctgagtacacagggaaaagctcaaacacagaaaccagctgaaaatgagaaactgaaattctaggcctagggaacaagggaaagagggaacttaaaaaccccttctaacattctcccagatagtccgctggggagaatgttgcaggtttaaagggataatcctcaaaccagggaaaaggaaaagcaaaaaataataaagtattgctgttttgtctggcctaaagagcctatttgtcagccttcagtcttttggtctaagtttggctcagataaggattgagtgtgcgaagctttaattttctatgtgaataataaaatcccatccccacaagaggagatgggttatgctctttgttggattagtgaactaacccacatgtttccccttaaagagaaaaaaaaaaagcatagtaaacagcccttgcccartgaaaagccctgggattccccaacacgcttgcccccctcaccatacatgtcacaaagtagaggacagggagactgggggcaacaggaaagtcggaggaagaggaatctgggggtcaagaagaagctaaacccaatgctcccttaaatccttacctaaacttgagggaagaattagaacaacgtgagaaggacattaagaatttccctmttccttgtaaacagcaggcatctaatgtgcgccctcctagagaagcctctatgggacagggaagagttaaatttgtgagtgtacctctaacaagtactagagttaggaattcttttttttttttttwaaaaaaaggccactctcggaaaatcccctcagtttaacaaagcagctaaatcaatttttaaaacccaatttttgtacctgggctaaggtaatgtcaatcgtgaatattttgtttactggggaagagaggggaataatgaaaagggcagccataaccatttgggaaaaacggcatcctcccaggcaaggactcctgccagctgagcagaaattcccaaatgcaaatcccagatgggataacaataaccccagaaatcgggcccaaatgcaagaccctagaaagctaataataattaaagggattcaagagtccactcctaaaacacagaatgtctcaaaagcattcaaaatccaacaagaaaaagaggagactccctctgtgtttctgcaaaggctcttggggaccaaataagaaaatactcaggrttaaatccagaaacccagtagggcaaggccttttaaaggttaattttgtgactaaaagctgggctgatattactaagaaactgcaaaaaattaacaaataaagttttaaaaaattaaaaattactaaaggaagctcaaaaggcttttgtaagaagagaaaaaaagtttagctgctgaccctgaaggcaggggagagccggccacacagctatatgtggaagctggctgctagaaagctgttaatagaagtgactgctaaatctttgtcattttggcagaactgtccgtctttgcagacggacagaggggagccagggcccagcacggctcagctcgtggccagagagagaaagaagaaaaaactaagtgtaagggaaaaaggaaacagggaatgacagagagagagagagaaaaagaaaataagcgagatagagactggaaataacagagaccaaagggagacactgaagaygagactggggagaaaaataatggaaaaggaagaaagagtacaagaggaagtgagaggatgcggagaggttggcagggctgggggaaggttctagaggctcaagcaacaaagaggtgccgggaaaggatgcagtgtggccactgaggcgggacagggcccaggaactgggggatgcaagtgagaaagggatgtggaggagagtttaggatcaggctgtttgaggaacagtgggttgcctatggcaaagggtagatggctgtttgtgaggtgggggtagaaagcattgaggatgtggaagggtaaatggatgagatgactattaaggttttgttgttttactgagaagctgtgagtccaccaggggcagctgtcagtaaggctgcagaaaggctggggggctacataaggaagatccaaattagggttgtaaactccaaggactacagggccagcaaatggtgagaaaaagggctgcagggttggatggggactgtgactaactcaagagggcacaccctgttaaaggggccatggttgctcggctgctcttacagtgccagccctgtgttgccaaattgtcaacaaaatttgggaaacatctaattttttaatgtaaaatataagttttaaatgctggtgatcagttcaaaaatcttaaaaacccaatacaggcgaaagaggatgccactttgccatctctgaaatagagagatctcatgctggggaaaagtctgccgagacgctttgaggtgggttgtatgaaagtttcccagagccaggctgggccaggggaggatccttgcagctgaggaggaggaaaagccactgagtcccctcccagagtggggacaaaccggagaccctttgcagttgctgggtcaccagaaggggcgatgtaaaatacaaacagtgcatctctcggcctgtcgggaaaaccaayrgtgccttcaaagcaaagaaaaggaaaggagagtgaagccagggatgcctttgctcatgagagtgcccatcagggaaggagccacaggctgacagctcttcaaaccagcggctcttggcccaaagccagacctagcaggacccagccaaaggcaccctgggagcccagctgttcagtcccttgcctccccacgtttcccagtgcaccctggaaaggtgcctaacctaactccagccagtttcttataaaaaggagaggagaataaaaaggcatcaaactgtaactgtttaaatatcataaaatatcaaactaaagttaaaycaaaccttaaaaaactccactacataatggaataaggctgtttgtaagtgggtcatcccaagtaatagatggtaaaaaaacacaataactatgctgtcatcaatgaaaacaaacaatccttatgtaaaaaaggtaaattactcaataattgttcagcccaaatctgtaaattatatgctcttagccaggccctgaagctcctataaggccacaatgacactatatatattaattccaaatatgcctatggagtaatacacacctttggaaaaatctggacaaagcaaggcctaataaatagcaggtggaaagatttggtatgtggggaactggtcaaacaagttstaaaaagccacctgctcccagcaaagatagccatagttcatgtaaactgccatcagaaaggaaacactatagaagctttagggaacaggcttgtggataaagctgctaagcaagtctccctggaggaagaagttaaactccggcctaatcccagatatcccaaggtggtattaaaaccccaattttctaaagagaaaaaggaaaagctgggcaaaatcagggccactcaaactgaggatgggacatgggtgctccctgatgggagagaactaataagcaaacccataataagagaactaacaaacatccactctgcataagggaagtcactggggtcgcccaggccatgtgtgatccaatactcaagaattatgggtgggccaggcatggtggctcatgcttgtaatcccagcactttgggaggccgaggcaggyggatcacttgaggtcaggagtacgagaccagcctggccaacatgacgaaaccccgtctctactaaaaatacaaaaattagctgggcatggtggcaggcacctgtaatcccagctactcaggaggctgaggcaggagaatcacttgaacccggaaggtagaggttgcagtcagctgagatctcaccattgcactccagcctgggcagcaagagcgaaactccgtctcaaaaaaaacaaaaacaagaattacgggtgtacgggaattgatacccttgctaaacaagcgtgtgaaaattgtgtaacctgacaaaaagtaaacgaaaaaatggtcagaaaacaaactactggagaaagacctcctgagttaaggccatttcaaatcattcaagtaaattttacaaaaatgctcaaaatagggagactaaagtatctgctggtaatggtaggccacctcttcagctggatggaggccttctccctcccaactgccactgccctgaatgcggtcaaaataatcttaaaacaaattatacctaaatttggcctggtagaaggtattaattcaaacaatgggagcgactttacctcaagagcactaaggggaattacggaaagtttacacattaaatgggattaccacaccccttggcatccctcttcctttgaaaaagtaaaaagaataaatcaaagtctcagaaagtatattactaaactaatcttagaaactaaaatgcctttgaccaaatgtctcccaatagcactccttaggattaagacagcccccacaaaaaactggaaattgtccccttacaagttgttatatggactcccgtatttaggtaggaccactaactttcctactataaaactcaaaaaccaatttaaaaaaaaattgtatactggccatatcctccaccctgtcattccttaggttaaaaggacttctaactcaaaccctgtctctgaagttcacagttcaccacttccagcctggcagctcagtgctaattaccacttaaagaaaaacaagctcaggccgggcgcggtggctcacacctgtaatcccagctctttgggaggccgaggtgggaggatcacaaggtcaggagttcgagaccagcctggccaagatggtgaaaacacatctctactaaaaatacaaaaattagctgggcgtggtggtgggtgcctgtaatcccagttacttgagaggctgaggcagagaattgcttgaacccaggaggcggagcttgcagtgagcagagattgcaccactgcactccagcctgagactccattaaaaaaaaaaaaaaacaaacaagctccacccaaactgggaaggtccccatcaggtgctcctaaccaccaaaccaccgtgcaaatagctaaacaagggtaaatacattacactagggtcaaaaaactggaaaacaaacaaacaaaaaacaaacaaacaaaaaaaaacagaaaaaaatgaaacaaagggaaaagggtaaatgggaagtgtataaatcacctaagaaacccttaaagctaactctaaggaaaacctaaaaggaagctataagcaggctccgtcattgggggtggatgcggttagaattaattctactaccaggggtaagggggttcacaattattaaatggagcctgatagaaaaaaaaatcccatcaaactaatagtcagcagaattaaaacctccaccccccaaaccataaagttcaatgcctgccaagtcttacagtgtgaaaatttaggaaaccaaaggcagctgtcacaagcgaacaaatatctatgtcctaaaacaggttgctattgggaaaagccctgtgctagctgaaatggggtctggtaaaccacccaatttcaaggctgggtgagtcactcttccaaaaacaaacccttaaaaaagaaaatacatttgtataagggccctacgccacctaactgtaaaaatttagaatgcaatcctatattaattaccataaacaacccagctactctaaaccaggaagcttggaggtatggattaggaataaatatctcaggaagggatcctgtaggacggttagcttttaggcaagtcaccatctccaccccaagcccacccaggattactgtcactccccatcccactacttcctttaacccaccagacaaccctaagagagtaaaaataattaaaataactaacttaaggcaaatttaaaaagttaagactgaatatgggggtgtaaatgcctgggttaaatgggtcaaattttcaatactagctcttaataagagcgactgttacgcatggtctgctgggcggcctcaggcacagggtagttctgtttcccctgaaatggaataccaatcccaaaggcaggcattgcatgttggctctgtactaaaacagaaatgcatggggaaataagacttacaaaagcctatcattgctctttcctgccttacgaaggtcaagttctagagcaatccccttgttctccatagggaatataaaccactccttctgcctctctatgcaggggcaaagttcaataagcctatgggaaaactcccaacttgtacacacatcctaaacgttactgatgagtcaaacaaaggcgactactcggctcttcatatgccctgggctaatgtctggtggtactgtgggaagagaaacctcagtaacctgttagtatccaattgcaccggaacttgtgccttacttagttcaactggccattccattcaccttgacattccataaaaatccccaagaatccacatggccaccaaaggtggaaaaatttaataagttcttttaattccaacatttatggtaactcaataggagttcctaatggagtatctaataaatttaaaaacgaaagaatacaaaaataaatgtggaaatgggaacaataagagtaaaaagaaaaagaagaaggaattaaaggaaacaacgcatacagtggtccatttccaagacaaagtgccttaaattggcttaggtcagcaaactacagaagaaacaggaaatactaggcccctgcttcgatagctgatgcctgcttgtcagcctccccaccttccccctcttccccgccccttagttgccctcacccgaaccaaagaagtttagtctaagatgagtttactagcctacagaatagcttgttttgtgggttcttatcagcctgcccagctacttaggtcataaatcaaatacttgaagagcccctgagctaactagaattgcaatgcattgtgggctgcaacaaaatgcagcaagacaatctaaaaaaaaaaaaaaaaaaaagcacctgaagcccctacccaacaatcaataggcgacatttgggaaaattgtgaccccatgtgtccagtctataaggaaacgggagagggacctgcccactaggggataaattgcttgttaaaactgtgctggatgtgcttgcctatcaaacacccaatcttgcaaaaccatcattgaaagtctcgctttcactgttctccaagtctctgagtccattgtttgggtttaaatgggtaagtttgtttctcagaaggtgaaagagtgaactattcaaatatggccaggtgcagtgcctcatgcctgtaatcccagcactttgggagaccgaggcgggtggatcacctgaggtaggagttcgacaccagcctggccaaaatggagaaaccccatcactactaaaaatacaaaaattagctgggtgtggtggtgcatgcctgtaatcccagccacttaggggactgaggcatgagaatggcttgaacctgggaggcagagattgcagtgagccaagaccatgccctcgcactccggcctgggtggcagagtgagactctgtctcaaaaaaaaagagaactattcaaatataagggaaacagctggtgcatagtctctaggtggaaacccttagtttgtgggtgtcagatagcagaataaagatcagggtgacagaggctgaagagcaggagggggctgggaaagttgcagggccttgtgggtatgcagaggatacaggagtttgaggatcaaagtttagaactctggagcactgaggggatggccattgcattctgaatcttcctacttctccatttagcatatggccttcctttgcttctagagattgccttttctaggcttcaggacccacagatattccttgggaaaatggtcttttagacttgttcttctctctttcccatcattattggaatatgctttccccctccttttaggagtgaagaaacctcatgagtgagttcacacttagatgtttatatgacaagtaaatgcttaaaagtctttgatttgagagtttgggaagtgatagaaatgatagaaagggaaaggctgtgtctagatttcacaggccttaagtctaaggattgctgatttcggtggtttaaaaccaccaaaataaatacatttgtctatttctccttgtgattctatcagatttttttctccaattgttttattttgataaaatacacataacataaaatttaccatcttaaccatttttaaatacactgttcagtggtgataagtacattcacattgcagtgcaaccatcaccaccacccatctccagaactcttttcgtcttgcaaaactgaaattctacccatcaaacaccaccaacccccattccctcttccagcccctggcaactactgttctgctttctgtctgtataattctgacgatgctaccttttataggtatagtcttaccgtttttgtcttttcgtgtctggcttatttcacttagcatatgtcctcaaggctcattcatttgtagcatatgtcagatttttcttcctttttaaggaagaataatattaaagtgtgtgtgtataccatattttatctattcacctatcaatggacacttggtttgctttcccattttagctattgtgagaaatgctatgtgaacgtgggtgtacaaatatctctttaagcatgtgctttcaattattttgagtatatatctagaaatggaattatgggatcacatggtaatactatacttaattttttgaggaacggtcatactgttttccacagcagctgtgccattttacactctcaccaatggtgcacaagagttccaattttccactctcttacaaacacttgtcattgtctttcttttaaaaaatatatattagccaacttctgggtgtgaagtggtatctcattgaagtttggatttgcatttccctaattattggttctatcagtttttgtttcatatattttgtggctctttcattagatgaataagcataattccaaacataacaattggaattgttatgtcctcttgattgactcctttatcattatgaaatgatctttttctcagtgatagtatttgttctgaaatatacattgtttgatattaatatagctattctaggtttcctttcatcagaattaacatggtatatatcttttgtcatctttttacttttaagcttttattatgttaaagtaagttttaaatagaatggcatatggctgtttgtaaaatctaaagtgataacctctaacctctgccttttaattgaagtgtatagaccatttacatttaatgtaattattggtgcagttgggttcaaacctaccatcttgctatttgtttctctattacttatctgttctttgttatgcttatcttctttttctgcattttgggggcaatctataactttttgtacttttacaaagtggccacattagggtttatggtatatgtattgaacttatcatcatctaccttcaagtaatattatagcaccttatatatagtaatccctcttagctgcaggagatataatccaagacctctagtggatccctgaaatcaaagatagcactgaaccatatatgtactattttttttaatctgataaccaagacagttaagctactaagtgactaatgggcgggcagcatatacagcatgaatatgctggacaaagggatgattcatttcctcggtaggtggaaagtgagatgatgcaagatttcatcttactactcagaatactgtgtaatttaaaacttatgaattgcctacttccggaattttccatttaatattttcagacaatggttgatatctggtaactgaaaccatgaagagcaaagccatagataaagggagactactgtatagaaaccttcaacgatatatcaccattcctccccttttggcctttgtgctattgctgtcattgattttattcctatgtatttataattcttacaagatttttaaaaaatttaaatagttaatgatcttctaaagggatttaaataataagaaaaaaagccttttatatttacacatagagttaccatttccagagcacttcattcttggtgcatacccagatttccacatggtattgttttccttctgtagtatgcgcctgtgaatgataaaatctttcagtttttgtatgtctctaaaagactttactttaccgtcatttctgaaagatattttcactgggtatagaattctaagttgacagttttttcttttatctttttggtcctctgaagatgttgctaccttatcttctagcttgtgttgtttcttatgggaagctggctgtcattcttatcttagttcctttgtaatatatctccccatccccctctacccctgccacttttaagattttccatttatcagtggtgtagagcaatttgattatgtaccttggtatagtttttttactccctcacgattcttgtgttcagggtttgttggggttttcagatctgtgggtttatgattttcatcaatttggaagatgaaactctaaagccgtatttctttaaatatttttgtgtctcctcttccttcaggtgctacaattacgttcatattaggctatgtgaagttgtcccacagctcaatgatattctgtttaacttttgttcagtatttttttctctgtgggttttttggatgatctttattgccttgtgtcaagttcactaatattttcttctgtaatgtctaatctgctattaacctcaatcagtgtatttcctttttatttcacatagtttttatctctagaagttcaatttcggtcgtttaaatatcttccatatctctacttaacatgctcaatctttcctccagcttcctggaggaaatagaatacagtttaataagtactttaatgtcttatatactaatttcatcatttgtatcatttctcggttcagttttgtatgattgattttttttcttctttataggtagtattttcttgcttctttgcaagcctagtaatttttgactagatgccagacattgtaaattttacctcattgggtgatggatatttttagatattttatgcttctaagctttgttttgagatgcagttaatttagtttaatccttttagatcttgcttttaagctttggtgggatttgaactatctttggagctaattttccactattcaggggaacaacaacaaaacacctcttctgagtattcatgaattatgaagtttttactctggctggggagagcaagaactatttctggctctgtgagccccacagagaagtccctgtgtcttttcagtagttcttttccgaggctgtggtagttttttcacatccatggtttgatcagtctcagctgaaggcttgcagggaactctttacagatctctgaaggctcttctctgtatagtattttaatctacaagactctgcattgcaaactttatctgtcttgctgtccccagattcccaccttcaactgagagagattactgggtctgcctgggttcctgttctctgtatggtaggctggataatccttctaggcagtaagctggggtaatcttagggtttacctcatttatttgtcatctctcagggatcatggttttctattgcctaatgttcaatatctcaaaacctattatttcttatcttttatctgtttttttaactcattgttgggttgcttgggagtgctttaaaaaatccagtttcttggaatctgtattggctaatatgaggccacctttggagcagacccgcatattacccagtggctgacgttattccctctctagccagaatgccagtattttcagtgagtgtgtacattggaatttctggttaaagaagtcagtcacttcttctaaaaatatgagtggaaatataatcatttggagtagatgggtttgctagaattaggtggaagatgtctagaaagagtctatggaaaccaggtgagaatctagattaagttggtatggctatgattttggccagcaacttgtgattttctttctctcttataacatgattttgtagttcatttttctccaccttcagctcaatggccagatgatggagcctgagaatctatgaggagtcagctcctggatcctcaccagttatgctctatgggctgaatcagtcagtcagcgtctctgaaccatggcatcattacctgcagagagggcttgtactacacgggtgcaaagagatggttggaaaatgtctaacaaatacacttagatctgtatttgaagccacttgtagtgtgtggaattatggatgcttaataaatgcattctatgtttgcaagatatgttcttctcctagaaatctccttatctcccaggagataagacacttcttggtaaagacattttgagtaccactgaaccctccaaagagtattgagtattattgagattctgatgattattattcccaattttgcttttcttctgccacctctctgccctctcaagggaagtgaatgctctctgatcacatggtgggaaagggcctccttcactcgactataataataaatttatgaagggcaacattcacccagttgaagtgtaagtgtaccattatcacatctttcttatctagctttatactaagtattaagagggaaacacagacatataaaatctggttactagtctgaaagaatttacttcttgttgtagaagtaacacctacaattgtgagataatcttcaggagacaatttgccagcaaaataaataggaacatagcccatagtttcagataagcagatgccataggaggtcaaaataggagcaggagagacccaagcatcagcggctggagaaaatgactgattttcaatgatggctaccttcctaaagatatcaatcccataatgcccagaaagctcagaggacgaagggcagaaccaaaggcttgagagtgcacaatgtgtaagggaggggccagggccaagcagccagcagaacagggctctacgggcagccaaagccactgtgtcctgtgccacgaaaggcccagagagcatctaaagatagcaccctggcacagagtcatacggcgagagcgggaagcctggtactcctgtaccacacgctcgaatttcctctgaatatttacacgctcagcgtcttccagtcatcaccatagccccacaaaagaggcgggacagaaaatcattgccatttggagaagaggaaaccgaggatagggaaggctcaatggcctttgcacagtgacatgaacagggaaggagagaagcaagtccagaacccaccggtgctgtttctggctgtgtgcctacgaagcgggtacagggaaaactcctctgaggactccagcctggggtaaagagagtcatgaacatagcataggtcccacagggatgatttgacccaaatctggaactaaaagtgtagtctaactccaggcaaggtgagggtaagagaggacactggctgtgtgtttctacacatctgcccataaaagagagtggagagggaagccagggctccgtaacccccttcaagtcaaaggaggggaggaggctcccttgccttggggagggaagagggaggaagaggaggggaatgcatagggaagtctgcttttaagcccattaatgaggaagagccaagcatccaattaacttgacatctcttgcagccaaaatatctgaggatataagaagcgaatttaatatgtggaggcttgggagacaagtgactaatagtggaaaacagccccagtttatttaaaaaataggtcaggcccaacaaatccaatagattccctctcagcacttacggatccaggagacagagggagtgctgtgtgggtgcaatgccattttgatttgaagcagacattgttgttgtaccaccaagagacagccagggctggcaggaggcgcctgtgcacagcatgcagctgctgagggcggccttcgcgtcaagcgtctcagtgaccctggtcaggacagcgagtccctaccagtgaccggcccaaggtcacgaagcctgaaggtggcggcgcccacacccaatcccagcccctctactctcagagctaaagtgctctctgtggccttgggtgcctctcttccagatgtccttggcccggctctgggaatcttggttggctctgagatggcagcaccaggctgccatctgagagctatggcagagctcagggcttcagcgaggaagagagaaggcctgaagctgtcctcggcactgtcaggacagggttcctaggcaccagctggagagcctgttaacatgcccagtgttgggtctcagtcccaccctgatttcattggtctgcggtgggctggagatccaccagcgacggccgacatggattataaaacagaaacactgtttgaagtcggagcccaggttgtttctttcagaacgttaatttctagagatgtttatagatctcaggaaaaagtgtgtcacagccataaatgtgatagtagtagatgccctaattcctcttagaaatttatattatataatatttatataatatatttaatacatatactataataaaatcatttattttagcattttaaaggcttaaaagtattgcaattaagaattctctttatgtaatcccagcgctttgggaggccgaggcaggtggatcacctgaggtcaggagttcgagaccagcctggccaacatggtgaaaccccgtctctactaaaaatacaaaaaaattagcctggcatggtkgcgggtgcctgtagtcccagctacttgggaggctaaggcaggagactggcatgaacccgggaggcagagcttgcagtgagctgagatcacgccmctgcactccagcctgggcgacagagtaagactccgtctcaaaaaaaaaaaaaaaaaaaaaaaaaaaaaagagctctctctttagcttatctgcccaaacctacttgccatggaacctttttctaggagtaccaattatacagtatacaatgtgggaaaatgttactctagaccagtggttttcaaactttatggtgtatcagaatcacctgctgggacccgtcccaaaatttctgattcattggtttctgtccttcaaggcctgggaatctgcatttcttaccagtccccaggtgatgctggtggtctggagaccacacttcaagaaccactgccgtagacccctctgcaagccctggctcagccgagggtcctgggaggcctcccagagtgggagggtggagactgagagcagtgggcagcaggagctaagagaaggggtttccaggaaacacagccttgagaaggcttgactctaaggtaagaaaaccctatgtagggatgggctctgccaagatcccagagttagagtcagagattctataaaacagggggttccaaatgggggacagccgaccctctgtgacaggcatcagtggcttgcccccaacatccaggcctggaaaaggcagatctggagagcgtctgtgcctacgaagccaagtcttgtgaagggcatgaggcagacgactgaagaataaaccagagcaagctggggagcccgggaggccacatgcagaagacaacaccgtctcgcaggactggcaacacctagatcaagcttgtccaacctgcagcctgcacaccgcccaggatggctttgaatgtggcccaacacaaatccacagactttcttaaaatactatgagattttgtttggatttttattttttagctcatcagcaatcgttagtgtattttatgggtggcccaagaccattcttcttcttctaatgtggcccagggaagcctggacaaccctgaccctcctcccctttgcccccagactctgggcttccagccccgagggtaagaagcagcaagctagagctacctaccctagcacagtacacccctctgagggggctgacttcatctgccagccccgatgataagacaggggtgcaggagagtagagagagggtgcatgtagggctgtcttggccaaaggcaggcaataaagctgtacttttgctttcttaggtgataggagaggtcccaatgcccagcagagcccttgcttgtcttgctgctgcctgacatttcacataagaatgttctttttttctgcaaacctctggtccctatctaaaggcaggcagatggttctggaagagctaaccctttgtgtaattatgcagaacgggagccacagcttagatcacagcctggtgagtaaacacaggttgaagagaggtgtggtgagtgtctaagggcgacactgggcagaggggctggcacgaaggtgggcaaggagggaagaaggtgaaggcggtgggcaaaagagtggggtgaggcccaggctggaagcctcctgccacccctactctgtcccctcccactgcgatcctctttcttccctccgtgggccctccaggccaggcaggcggctgctgaggacagacgactcaggttagaaaaagctctcttgacatttggagaacagagcaggatttggctcctctagtggagcctcttgttctcagggaaatcattttaaagcttgggctggtgccagcaggagccatttatagcccaaagggcttaggttcactttggctgcctggtgcagagagtgctggcttccctctcccctctgcaggctgccttcccccttcagatgtccagcaccttcactctccttccttaaagcttctttttcctctcctctaccacctctttcctattctcttggaggttccagttccagatccacctccggacctagattcccctaggtgagcctaaacaaattcctttccttctgtgggcctcagtctctccatctgcaccctgacacctattgtctgctctctttaaactctgtcaccttggagaggtgcctgcctgtgcctacctccactgaagcgctctcctctgtctagttattgcctgttgactctctttctgccctcaacactgggcttcctgcctgggccagctgtgttacccttttctgagcacagggcctggctcctggcagtagctcagttaagcttggttgggccgaactgagctaaccatggcatcagtttcaagagcacaggttttggcataaaacagatactggttgacatcttggctgtgctgcttgctatctctgggccctggcaaatgactggactttgtgagctttagtttcctcatctgtaaatgtcagttactatgaggatttcacgagatggtgtctatctataaagtgcttggcgcagcgcctggggcgcagtgggcccttagtcaatgttaggtctcatcaccatcatcatcctctgccatctacctgcattttcaagggatgtgggttaggtcaaacatgctcccccaaatccccacccctgcttgtggaaatccgacccacccttcaaggacgagctcacaagctcacatgccccttcttcaggaagccagcttcctcctgtctccagctctgctgcgtccataacctttcatctctgcatttagtgggcccgaggcctgttcaccccagtagagtgggtagactaagacaatcgcactttatttattagggagaaaaactgtgctgaagctgccctgggtaaggccagtctgggggcggaacactgtgttgggggagtcctgatcagccgctggcgtggtgagtcgaaggcaaatcacaagtaktgacagtggagggtgattctcaccatatcagggaggcagacaacatcrggagacctccagcaagtaacagggccctgggcctgggcctttggacggaggtggggaaagagcaaggcagggtgctttctctgccctggggcccaagaacccaacaggacaaggctggaggcgatggtgcagaaacaggtaccagaaccgactccagggcagagcaggcagggccagacctccagggtgatgtgggcacaggaaccctggaagggactgggggcactggaatgtccagtggggagggacttgggcacagggagcaaattggaggtgagaaagctgcagccatgagcagaccaagacgctgatgttgagagtccagctgcccatccgagtgtgattccaaatccttttgctgacttctcagactatgtatacaagattggagtttgaaagtcaccttcactcagagactctgcttgcctggtgtggcttagggaggagttgagccttctgactttacrgaggagaccactgtcatcccccaagacctatcccctgtgctcctcaagtctcaagagccttcagttgtggctgaacaatcatgtatatctcttggagatgcatctggattcctataagtgttccaatttgcctgcataggatccatagaatacccatatgtctcttgtttctttcacagggctggcacagtgccttgctgttgtagaagttcagcaggtagttgtagaatttaaaagcatcaccccatgtagctgaatgttcagggatcacaggccacggctgcttcccacccactcccagccttcagggagagggtatgcctgtcagccaatgggcagagtgccaggctgcagaccagggtctgggccagtcatttatttgtccccatgacctgtggctattgaaatgaatgccccyaaatccatgcatccttttgcctcctgcatggcacacggcagacacttcataagctggctgttggggagagtctcagggagccccatggaaaagagaaccttggaatcagagttgaatgacagcttatgggtgctggargcccctgtgaccttgaccgtgcacaatgcccaggccagctaggactttttcctctccttaatatatttaaatggagtcaatactggggtcagcttcatgcacacagccttcttcagccctagaggtgaggtgatctgcacagcttcctgagcagggtcctccctggtggctgaggtgtggagggccccagccaggctggatggaggttgactttgtttcggagcccttgcttggacaccggagtgcaatgctcgggccacacatccttggaggaagggcagcctggaagtggtggaacaatctgtcatgatcatatttttgtgtaatcaaacactcttcccataatacctttaatggccgcatagtgttctattgtgtggctacaccacagtttaatgtctcactttgtggaacatttcagttgactcctaccttttgtcactaaggacagcattgtcatgaaattctcaacagctacatcattatgatgatccatgattctcttcttatggtaaagtccacagaacttcaattgctgggttaacggatttgtgctctttaacacttcaagtacattttaccaaacggcctttctaaaagtcttgacctattttcattcccactagaaatgtgtgaaaggacctatctctctgcaactcttacatatgcagagctgtggttgttttggtgggagaagagcttatctggtatttaaaagctgtaagttttctatttgaatttgaatttacctgatttctaatgaggttaaacatttttgttgcacatcaacctgccatttgtatttcacatgtacttgcctcatgtggacagattatccaatcctttccccaatattacattgtgggtgttcatctatttttgtattggcttgtaagagctctctacgtattaagggcattaacctttgtctgccacatatgttaaaacgtacttctcggtttatcatttgccttttaattttgtttatgatatttattgtctggaactgcattaatgtcttcttgctagacatcttctcttatatgactcaatgacatttcaaactctgcatatccaaattgaaattcattatttccccccaccccaacctgctctgcctgctgactggcttatttttgttaatgtcaccaccatttccctagtcacccaggcttgaaatgttgaagtcatctttgattccagctcctctctcttcccctacattttgtcagttgccaaagcctgtagagtctatttctgcactttctctggcaggcagcccctcggacaccccagtagttcaggctctcattatttcttgactggactttgaacatagcctccaaagttcatactttgcctctcttccattcccttcttttccttggcccctcctgtgtgctgctaccacatctatcttcctaaagaggagcccaaacacagaagtcactgcttccctggttacaaaccggcaatagctccccgttgtcttttgtatttaattacgacctcttagcctggccataatttcctttcaactgaatctctcactgtctcagccaagctgctcccaaacaaactcactgctctcccgccttttggttgctcaagccgtctcttcctccacctgccaaaatccgttcaaaaagctcccacctcaccccacctcctgctatcccagggcttcctgactctctgcattaaagtgaattctctttcctgtgaacctccagaacaatttgcttgaacttctcttgtagaacaaaccttattccagcatctatcagagacaataagggtcttagaatctagaaaacagggtcctgggagggcacagttcccacacgtctatttcttccayaggacctgcacgctgccttgctgttggagatctgtgcagtaggcagttgtggaattaaaagcaacaccccatgtcgctgaatgttcagggatcacaggccactgccgtttcccacccactcccagcctccggggagtcttagcctgtggagtcccaggaagcacatggaaaagagagccttggaaccagagtggagtgacagctaaggggtgctggaggcccctgtgaccttgaycatgcacaatgcccagaccagctccgactttttcctctccttcacatatttaaatggagtcgatattggggtcagcttcatgcacggagccttcttcagctttagaggtgattctgcagcctgcacaggagtgtgcacttgacacagtctatttttagcctcccagagaccgtgaccaacatcccaagctgagagtgggcacacctgctgcattctaatgaggcagccccactcgcctttgccagcccgcccgggatctcaccgacgtgaaatctsatgttgctaaactgggaagtctgcttatttcccaagggcggtagcctagrtacactgggaagatgggaccatcccactgcccccagctcactcccctgcagccctggacacagaacagtcttgggactgcgcggagtgattccacggaggggttgaaataacttggctttcttgatcttgctgtgtcctaggattcccctgtttctcttgctagaaaggagacagtaagtctgagctgacccagctcacagacaagaaaatcgagacatagaacaaggacatgatgtatgtaataatcataagcacttactatgtgccagcctgttctaaagtctttccatatatcaactcctccaaacttttggacaaatttttcaggtaggttttattatgatttgtgttctatagaggaggaaaagctgaggcacagtgatgacaaattatttcccaaggtcacacagccaacaagcgctgggtttcagagtcaggcagtgtggctccagggtttgtactttcagccagttcgctatctgcctcctagtatctatttttaattttactagagccaggataggacccaggagcctggattcccagccctagaggactgactactagataatactcctttttttatttttctagttcagccctgctttgaggcctttactgtgccttgtacatctgggtctcctgcactccaggcagaggaggtctcctggcataactgcttctgttgcagtgtttgagcttctgggctccaattgctgtctctgggctccagaagctctgtggacccccatctccttctccctgctccgcctagcctgtggaggaccagggagcagacagtgatgggcagcagcagtgggtgtagagctgggctgggcctcaggattggggcacccagaaatagcaataattggttgtgtggaggccatcagtgtgggtatccacagtgctgaattcagggtagaactgtgaatcagaaactagggggcaagacaacaggtaggagacaccagaacctaagacatctgcattttgggggccgtatcctcttctagcttgatgctgcctgttgagtggagagaagcccatgggttcacgttcctgaggatgcaggtgggacttcgtttcctctaacaaactcttactatatgcctggcccttttctaagcactttgaaatacaaacttgtctaatcctcaggacaactctaggaggcagggaccattttattcccattttagagaaaaggaaactgaggcactgagaagttcrtaagtttgcccaaagttgtatagctgggaaatggcagagctgggattcagctccggaatctacactctcaggcaccatgctgtgctatgcatctttccctttattgaatgtttcctatttgccttcaaaggaagatactattttccccatttcacagatacagaaactgaggcctgcattgctcaggtcacctagctaataagagctgaaggtgggtgaaatctaggtgtgygtggctcctcggtggactgccatctctggacagatcacagccatgagcccaactgctgggagctggaagggctcacctacctccctttcaggaagggctgctgtggctgcttgaggccgggctcagggagggggaaggaaagaggaccgcaagcctccgagggcgggaccccgttgtctctcctaacacccgacccccttctcttcccctcaggtgaacagccccccctcccagcccccccagcccgtcgtccctgctaagcccgtgcaatgcgtccatcatgtgtccactcaacccagctgcccaggacggggcaagatgtccaagctgctgaacccagaggagatgacctcgagagattattacttcgactcctatgcccactttgggatccacgaggtaaagtgtcccgagtgggtggctaatggggcgaggctgactctgctgttctgttgttttcagaggcagcatagtgtgttcaactccttaccatggtaaagggagtgctcccagtgttcctgagtcctctgaccctttctccaatccggggggcccctctgggagggggccaggccaggcctggagcaggggagcaggygaaagtgtgtgtctgtatactccacagccagagagagcacacaaggtgcttacggtccatttgttttacattccagctcccgtgtctctccccagccataaacccagctcatccattgtgggctggatagcgctggtctttggaccaggagctcaaatgctgcagtcagagtcctgaggcagcaaggacctttcagaggtcatgatgtgcattcttttgaccaatgagcacctccgggggaagagctgcaggaagctttcttgggagcttggcccaggtctgacaccctgattgattgtctggaaattcttatgtctaaatgccagtttaccccatagcagggaagactaatgttgactatggaacagaacagaacctcctaacaagaggcatcctggccatagtgggggcctaatggtgcccctactgtatatctttcattataatctccagcactctctccagccaccccaaataaacaagtaggatttactgagtgcttgctaagtgacaggcacagttctaagcacattatacgtatcatttcatttaaactctatgaagaaaatatgtccgtgatcctcttacagcataagaaaaaattgaaaaaggaacaaaagtttgcttgctgtgcaaatcggttttcaaaacaagtcttgaagatcttccttccacgtactcactgctgtaaactcttcctatgtggaaatgatgaccctgccattgccggaagggtgtttagtaataatagccagctcttttgtttgtttgtttcgttttagtgcttactacrtgctggtgttgttccaagcattttatattattggttcatttattcttcaggtcaatcctgcaaggttggtgttattgcttgtccccattctccagatgatttaggcccttaagaatcaaatcaaccctcattcatccttgacggtttttttgtgtgcgtgtgtgcgtgtgtgaaaggccacaagctagtagatggcacagctagcaatcaaaccttcaccttttgttcctaaccatcatgccatacagcccttaaaacaagtttcctttctttccatctggaaactgtaaaaattaaattgccatatttgttcctgctggttcttctgcagccctacatggaggtagagggtggaaggaggccccccagttacttctagactcaggggctcagcctcatttaatccagggaggctcaaggtttgggtccctgagaactgttcaccatgtaaaaccattaagcctggacctgcaggggaggaggactggggcctgtgttcggtccagaaggtcctggcccaggagggcctggacagctgagcctgcagcttctgggagataaaatgccatctcagggcagatggatgaactcttaccccttccttgaccctgctctccactgggctagggattcctggagccccatccttggcctgtgagaggctcttgggggcaaaagagactctgcgaaggccccttcctcaagaccttgtccctaattaaaagtcatgttctccatgtgacaagttctaacaggcctgtggctctgggtacccatttcaggacagattcttgggaaaagagagcagttccagggaccccaaaatgtctcctcttgggcctgcccagaactcccccattagaaaccaaacaaccatgaggtgcacctcaagctgggtctgcagtctcccctccccactcggagcctccgtgatcggcttcttggacacctccctctgagttgctaggttcctgctgagccacacctttggcgtttagagtgtgctccactaggctattaccgatctctataattcctttgggacttggtgtccccagcctgttacctacagcttggcacattgtctggagagcaaaggcttgttgacatggctgctaatccagtcattcaggcgatgcctggtcagcaccatgacccagcacccaggggagaggacatcaagtttcaccaaataaatactagaccagtttccctcaattgtgtgtacttatggaaaagtcaagcttgtgcatacgtatatataaacatagtgcgggctgagcaggggacttagagtataagacctgtgagtcatagatcacattcctgtcctgggagagtgcttagcagccttcccattgggaaatacttctggacatctagcttaaatccctcctgctgctgctatagaccatctcataggtcctttaatgcaggaacagctaggtaaccttccttccccccgaggtctccttttaccctgttttcagtttcccagatcatctgcatgaaaggaggtggggggcacgtggaagaacttttaacaccattcttcgcagagagaaggcctacccagttcttgttatcaagcaccagggatctctgttccatgccagatggatcgtggtgatgcccttgcctccttggtctgggcaagacccatatttctgcatccayctggagccaygctggccatttggcagtcttctccccatcattaacaagaccctcacacggtggggagcagccccaccggcctgctgattaatagccatcagtgagtgttgaggaaacgtggtgcggatasaytgggtttgattgatctgtaaatacaaacaagaaatgctgagtacaggggactattggggctggagagcacagcagggggtgactctggacacttctgttctcatcccatgctccattcagagacaactctrtccccagcctccagagggcaggggctagcgagaggaagaccctggccttccaatttaggcctctctgggaaacatggaatcttgaacaggagctgaagtggaagatgtgtgcttcctgaggccgccacctrgagaggaggtggtaggctccatgacctcccagaccccagctctgaaatctcagcgtctctaacagtcggcactgggcttggtgcctcagccacgagaagaatctttgccaatgcggctgtccctccagcaccctgagctctgggtgccaatcccactcccggccagctcccttcctttgacactctcgctgcaggttctgttgaaacagactctttggggccttatagtccaacaatttgtcaatgggcagtcatatatttaataggcaggaaagccaggacacaartgaatccacagctagaggctgggaactgttttccacagggtggcatgttccttcctgaaatrtcttgggagttctttgggctcttctcccaggaaggggatagaggacctcttcttttggcaagtcaggtaggggaagccttgctaagtcacaacttctgttctcccagaacttgtaccttccaacctaactcctggggcctgggacctccaggaaaggagacttggccaaaaaagcgacaaaggcaatgaactaaagggtgaccactggggggtctccccattagcaaacatactctctgttaggttttgaagggaaggcaagggttaaagaaagacacgcccacagaaagagtgcagctcgacagcaaatacaggcttcatgtccagcataaaacctacagaagtgggggaccgcctaatgccagagccccctgctacttacaggctgggggtacttataggtatgggcgggaggggtctgggcagtgtggctcgctgcctggcaggatattaagatgttcccgtgatgaggcggttctggcccttgttccggcaggatgtcgtcatggtgttccttggacttttgtccccagcaagataccatacggatgtttctttagttgggcctttgtttgccttgcggtcaagtggttaggcaggatgtctctsatggcctgaacccccgtgaaatgcttcactttgaccaaggtctgcacaatagctgggagcttacaaaatggtgcagtttggacgaacaggctctccgggggtactcagccaatccacttccatctactaaaggcacttcagacttttaactgtggttatgattgaaacatttctgcagcctttgtcgttattttgcctccattccctgctcatctcagctatttccttgcatggatgaaggaaagggttgtagttatcactaagagccagaactagcattttcgtgaaacttactacatttgtgtaatcatcataacaaaccctaggaagtaggtgatgttattaccagtttccagatgagggaactgaggcacagacagctgaaagctggtctgggtcagagagctcacaaacagtggaggtatgatctgaatgcgggaatttgggatttgaatgctctagagtctgtgtayttaaccactgtgctgtatggttttccggcttactgagcacctgctatgcgccatgccccatgcctggttctagatataccatctgtcttgttgtctttggtccgagatctcctaaagcgaaaggcttcagctcaccttcaaagtatttaaagccagaattgaactgaatccaaccaaacccccaccttattcaacttctaataagatcaaagatatcagccctggggcagcacaggaagtgatggctgggcttcagaatggttcttgcctccttttcaccttctgtatctcacctgaatctcctctgtgactcaccctaactggaaacataacagaaagagaagttgggaaatgtagcaccacctggctgaggtgacacgttacaaagcctcccaacgtggtacccagaactccagaaaacatggagccaaacctacagaactaaaggaagaaaaagggaaatctccagtcatagttaaatatttttaacacttctgtcttggtaagtgatcacacaaatgcacaaaaaaaatcggtaagaatgtagaaaatttgaataatacaatcaaacaacatgagctaattgacatttttagaacatttcatccccaaactacagaagacatgttattttcaagtgcacrtgggaacattcactaagatagatcctctgctgggtcacaaaacaaagattaaagtcatgcagagtatgttttttgatcacaatgaattgaattagaaactgagaacaataaactatccagaaaatctccaaataattggaaagtaggcagcactctgctaaatagcccatgggtcacagaagaagtcacagaaggaaagagagactatcccaaactaaatgatagtgaaaatacaacatattaaaatttggagacggaaattcaagcaatatttagagggaaatttacagcttcaaatgcttatggggaaaaaaagtcataaaatcaatgaccaaaacttctaccttatgaagctagagaaagaacaaataaaactcaagtaagttgaagaaaggaaataattaagatgaaagcagaagtcaatgaaatagaaaccaagcagtggagaaaaccaacaaagccaaaagttgccttttgaaaaggctaattaaattgataatatctagttagattaatcaagaaaaaaagagaaaacacaaattaaaataacataaatggaggcaaggacctcctgacgatcacacagatactcaacaggcaatgggagaatattatgacaatgtcgtgctgataaatttgacattttacataaaatggatacatgccttgaaaaaataccttgtcaaaactgacataaaatgcattgaaagctaaaataaccctttcctaattagagaaattgaattcatatgaaacttcctataagagaactccaggcatatatggttttactggtgaattataataaacatttaaagaagaactatacctaacacaaacttttgcagaaaatatatgagcagagaacacttcctaacttatgtaatgagcccagtataactttgattaccgaagaaaaggtaagacaaagttacagatcaatgtttctcataattatgaatatgcaacaaaatattagcaaaaaacacccagcaatattttaaaagggtaatacatcatgacaaagtgttcatttaacattaaaaaccaatctgtgaagttcaccccattaacaaaataaaggagaaaagtcatataccatctcaataaatgaaaaagcatgtgacaaaattaaataccaattcatgataaaatctctcaccaagttaaaaatggaagggaacttcttcagcctgataaaagacatttatagaaagcctaaattatacttaatggatatattattggaacaaaggaaggatgtctgtcctctgtaattctattcaacattttactggcagtctttgccagggcaataaagcaagaggaaaraaccaaaaaataaaaggcatacagataggaaaaaagaagtaaaattgtctttattcacaagcgacaggatttttcacacagaaaaataaagaaatctaaaaaaaaaaccctactggaattaatatgtgaagagagaaaggctgcaaaatacaaggtcatgtatacaccaacccattgcaaaatgaaaaattttaaacaccatatacagtatcacaaaataaaatagttgaatggggccaggcatggtggctcacatctgtaaccgcagcaccttgggaggccaaggtgggcagattacttgagcccyggcattcaagaccatcctgggcaacatggtagaacaccatctctacccccaaaatacaaaaattagccagtctcataacccagcctcaaartaaataaaaagataaatttttttgaaaaactaaataaaatagttgaatggaaatgtaagacctttatataaaaatctatacaacattccagagataaatgaaagatctacataaatggagagctgcaaagtgttcttggattataaaactcaaaattgctaaaatgtcagttctccccaaattgatctatagatttaatacaagtctgatagatgccaggagcctattctgtatgaattaataagttgattctaaaatttatatagaaatgcaaagggcctagaaaaatcaaaataatcttgttaaagaagtacgttggcagactctcactacgttatttcaaagttaatataaaggtgcagcagtcaagtcagtgttgactttgtttatcagtggaatagatcagagaggccacacatgtagagtcaattgatttttggtaaaggtgacaaggtgattaatggaggaaatgtttcttggaccatttatttgcaagaaaaaatgagctcacacccctaacttacactatacacaaaaattaatttgacatgtaaaagccacagccataaagactctggtaaaaaacaaaggagagtgtctttgtgacttggggcagacaaagatcagacagggcacaaaaagcacctatcataagtgaaaaaaatggaaaaactggtctttatcaaaattaaaaactgctttaaaaaaagaaaaaagaaaatgaaaaggcaaatcacagattgggagaagacattcacaatatatatgcagtatatctgatgaaggactagcttccagaatgtataaactgcaattcagtaagaacaagacaaacagttcaagacaaaaatgaacagaggacttgaataggcacttcacaaaagatgatacatgtgaatagccaataagcacatgaaaaaaaagatctacttcagtaaccatcagggaaatacaattaaaactgcaatgaggcatcaaatcagtttacatccactaggatggctaaattaaaagatcagtaatgctaaggtgcctggctgtgaagcaccttgaactctcacattgctggttggagtgtaaaatggtacaactagtctggaaaactctttggcaatttcttatgaagttgaacatgtacctaccctaagacccaggaaacttacttctaggtatctacccaagggaaatgaaaacatatcctttgctattatgaataaatagcaaaaaactggaaagaatcctaatatcccacaaacaagtgaatggataaatacattgtggtatagtcatagaagggaataccatacaacaacaacaacaaaagaacaaacctcggatctgtgtaataacatacatgaatctcaaaaactttatgttgcacaatttatataaagttctaaaataggcagaaggaagctttggtgatagaaatcagatcatttgtcatcttgggagaggctgaagattgactacaaaagggcatgaaggactttctggggtgatagaaatgttctagattttggttayggtggtgcttacacaggtatacatttgtcaaagcccttttactgaaccagaagcttaaaacctgggctttttgttgcatgcaaattataccttaatagtgttgatttctaaaaaaaaattcaccccaatacttttgatgatgaattaggtaaaagcgtttgctaataccttgaatggccaaagatccctacctcactaccatacacagaattaacatgttctccttgggtcagagtccactgtaacaagtaatcttgtttctctctcactgcaaagccaatatgctggacagagaaacacattttctagtctttttttttttwaaaaaaaaggcaaacaaaacaaaatatacactcacaaaaacctctttgaatgacgtgttcaatgacaattctctcaccatgacagaaagttctgcttcgtgtttaacttaaatctcttatgctatgttgtactgatctttcctttggtcctttagtaaatcagagctttcccaggtctgaacatgagtttctcttctgatggtgaatagctatctttctgagtagagttttaaggcaggggaagtttggaatgatgctgttagcacatggcccagctaccccagttttgtcctctgtggctctgcctgatgatattatcgggtctcctgaagggtcacctggggtggtccaggggctcatagccatggtgtacacccaggtgtcttgaattcactgacatttcctttcttttccctccatcacaggaaatgctgaaggatgaggtgcggactctcacttaccggaactccatgtaccacaacaagcacgtgttcaaggacaaagtggtactggatgtggggagtggtactgggatcctttccatgttcgctgccaaggcaggggccaagaaggtgtttggggtgagcacgccgcttcctcctgcatgctggcttccacagagccagcctcttgccctctgcctccaccygcccttctagaagtacaaaatttggtccatctcttttgctggggtcacaccttcgaggagtagaagaaatcaggtgtgactctcaggaaggggagcaggctgcctgtcccctgtgcatggctcctggatccttacaaccactgacatttgcggaggaactgtggctttcctgagaccattccaatgtcatcatgacctttcagtgcttagccccaaggtcagcttcagaggcagtgcaggtggttactcgggggagctctggtttgaatctctgcatttccattcactaggcatgtgaccttggactattcacttccctgcacctcactttttctccatctataaaatgagcttaatagcagtcccttgcccatagggtgattgtgaggattaaatgagtataatacatatgtaaagtgcttaaaacagtgcccagcatatggcaaatgctcggcgtctattattatagttgagatggggccctagagataatgggaacatctccttcttgttttctttagagggcaagtcggtcaacttaaattctgttgctttggctgtggcagcgtttccaggctagatgtggaggctgaccctctgggaagcctcctacctatcccctggctctcccaaggcagctttgcccagcctgatgacagagggcctgggaaggtccagagctggaaagaaactaaaaagaagagctgcgagatgctggctgatatttgaaaaatgcagtgggcccagggctggagcacaagcattcatcttggtcaaaatgaaaggcaaaccacaatgagattcccagtctgcatgtgagccggcccatttgcagaggcctcagcgacctgagcagcattcagtgggtctttgctcccatgcatttggttgggccatcccatagccagccctggggaccccccccccgcccactgactcccaggttgactagatccccctagatcctcctggccacctgctgcctccagaggtctgctcctaagtcacccagcagggcagcattcctcctccaagcctgacttggaaaacccttgggccatggctgccragggtcttctggaagcttgggctgccctcaagctgcctcaggtgcagctttgaccaggaaaagctgtgacgttctcagccgaggcacttgctgagggcaggggcccatccggaggcccaagggcaggtcatgtcatcatcactggtataactgctggttctccaggatggagacctcaggcaagggtcttagtgaggtcacagggcatcagagctggacttgagtcctctggtgacccccacgtgctttctttcccagcaccgaggccccgtctcagtgccggccttggtgggggacagggctgagcatggtgtccctggcgcctgagtcatccgggggctccagccaaggagctgtcaggaggaggctcccacttggcgccttccagctgcggtgacttggcgcgatctgtctgcctcccgcccttttctctaacagctcttttataaatggctccaccacatttagctgggctcctttccggatggctcatttcacagtttctcctgttccagacccccttccacccactgctgtcctccagtggggagacgagatggcgggagagagagacagagagagaggragggaggaagaccatcgtcccagagtggagacaggcacagagaaagagacagatgtgacaagagcaatggagaggagacagagacagagaaaggtgcagagaaaagctagagaaatgggagaggggcctggaaaagcagaaagaagacaaagtagaaagcacaaaagaaaagaatcggcagaggctggtggatcacctgaggtcaggagttcaagaccagcctggccaacatggcgaaaccctgtctctactaaaaatacaaaaattagccgggcatggtggcgggtgcctgtaattccagctacttggagactgaggctggagaatcgcttgaacccgggaggcggaggttgcagtgagtccagatcgcgccattgcactccagcctgggcgacaaagtgagattttgtctcaaaaaataagaatcagaaaagtgaagacaggtggtaaagagagaagagggaagaaatggaagaggagaagatggaagaaaggaaaatgaggagggaaggacaccgccccgcactctgagtgttgagcaagcttcggctgagtttaccctcacacactcacgtgcatygggggcttcgacttctctcgggaggacactgaggcgcagttaggaagggcagtggccaggcataaatccaggcctggctccgggtcgcatgctcctcatcactcaacatggtcgcctcttgcagatcagatgatgacatggccagagggggagaagaagaggagggaatcacaccccacagacagtgcagcctgaaggccagggacctggcagcccaggaaagggctggttctcctgggacctgcaccctggctggagtcggcctccttggatgcagctctaaccaagtgaccccttctgaccccgtaggtgccctcacccttcctcaaggcgtggccagaggcgtcagaaactccctcagtgcccctttgcgagtacttctcaagggaatggtccctgccygaggcctgggggtagtctgaggggcccccaagtgtggaggtgagtagagcccagggccttagcacaggccagcctctgtaagagagccggctccggaggtgaggacggctcttggcagctgcccctccatgtccagaacccctggcagtgtgcctgagacgctaaccctgggctggagcttggcttccaaccattcccatgagggcctgctctcagggaaggtccactcatctctcaaataccttggccctttgcttaggaggtctggagagcctggaaagaygtctgaattaaaaggaataatttctttcaaagatgaagcggcgagagctaacgtggggggtgggaggggaagagaaagatcttaaaccagccctgaggtcttgacctggctttttccagatggtcccatcctggcacgcggctcgtttaccctggaagggctgggctgcggtggggaggatcatgtcgagggaggctcgcaactctggcttggatctgccttcccgcgtcccccacsgtggggaggacgtactgcctcctgccattctctgctggccaggagcatgaggtctgccagccccttttgagtctccagcacagagatcaatccctccatcacgggtggtgactagacatcagtcttttcgcaaaggcagcccaatttcgtggaaggccgctggccttgaggtgggggggctgggtttcggttttcagtctgccacaaagttgtgatgcagccgtgggcaagtcaccacccctgtctgggcctcagcgtctctatccattgaatcrgtgtgggtcttgctgtgattttttttgacgccttgctcctttgtcctatgccctttccagatcgaatgctccagtatttctgactactcagagaagatcattaaggccaaccacttggacaacagtaagacatacctctgagtgttttctcctggatggaggggacgggaagctcacactttcttgttgggatggcatagcgggaggagcgcagagcacttggacttggggaggtggtgcacccagctgaggcccccgccagcaagactgcggccatgggtactgatgttccccccgacaccaggccagctgaggatcacagccaccccctctccgcttttggcaagccctgcttgtagctaaatcccgagttgccagaccctttgcttgtccccagctgtgggcaacctattgccttctgcaaaatggccacattcctcctcctcctcctcttcctcctcttccctccctctccatgagccccgacccaatgtttccccaccacctgcccaggggcatcatggcagaccccaggctgtggtcctccactgcccacgagccctgtcactgctgggctgttttgggaatgaggctgcttttgggagtgggcccttcttcagctggagtctgattatagagaggggcgtcccttcccttcctcccctctcacctttcccatggacagcgacatttcccagtccctcctctctggagcccatcttggaaacagacccgcaagggtccctgatcaggagacgtccttggagcttgcatctgacagcaggattagatgcagtcccgagccctgtgctcagtgctggggagaacatcagaaaggcagacagggcactagccccctgtaggcatcctgtcctactgcgccggggctgcagtgaggccgagagaggaactggtagacaggaagttgcaatacagacagggaggtgagccacagtgagacagaggccgcctgcagcagagggctgcaaagggtcagctccaaaaggcagagctcactgcagagttccaaaaggtgggaaggctggagctgggagggaaggacgttcccttgaggggtctggggcagggggaaaaagaggccaggttgggaaggaatctgatttcagtgtccctcctgagggagcctgggcagggagttctggcaggtgggctttgtcaagtccgaggcaccgaggagtcagctcagcctcccctctctgtgctgtgcgaccctttgctctatggatgcagcccttgccatgctccctgctgacctgccagaattcctctgccctcctagagggtgcctgctgccctgtcacccctctgggtctgacctgagtccccaggcccaggtggtacctgcctgcacacaacactacaaacctgtgtccatgtggcttcagccctgccacctgtcctctctggtgcttgacctacttgctgcagactctttgcaagggcaggagcattactgactcaacaaacttctctgcaaaccaccatgagccaggctctggggacagagcagggaacaagacaggtaaagtccctgacctcatggaatccacattccatttaggggtaggggttacagataataaataaagaagcagacactcaaagaaaaatatcaggtggtgataagtgctttgcagatcacaaagtcagctgacaggayggagagagaccccatggctgcgttaggttagctgctctctgagcaggtcacagtgaagctcaaatttgaatgacagaaaggagccaggctgacaaaggtgaggggaagagcatctcagacagaagttacagccagtacaaaggcctctgggatggactgagcttggcatgcccagaaacacaaagaagatcatgccgtgtggccagggcatggaaagcacagggatcagagagggaggaggggaccagatcacacaggatttgtaamcaggaaaacaaggttagattttattctccaggtgctgcagtctgttggaggatttcaagcaagggaggtggcttctctatggaggatgggttggaataagtcgcaagcaagaagggtgtgagcagacacacgggaagaagctattgcagtgctccagtgagaggggctgcagcaggaactgaggcagcagtggagctggagagaagtaatccctgtgggacatgcttggagatggaggcacaggacctgaggrtgcattgagtgyggggatgagaaaaaagagagaagcaaggattctttttgacttgggcaactgggtggatggtggttggctggaggtgaagtactcatgggggtggcaggagtgagaaggaaatcaagagctcctttttgcatgtgttaggtttgagatgcccatcagacatccaggtaggtgcgctgagtcagacttggatacgtgcgtccagaatttcaggaagagccagaccaggagacttccacttgggagtcatcaacctataggtggtatttaaagccagaggatgaggtcacttagggatggtgtgtagctagaagaaagaaatgggccaaagatggggctctagggcactacactgcaacattcggaggtcaagcaggggagaagggcagcaaagaggtagagaagatgcagtcggttgaagggcattcaggagagaggaggaccatgaagcccagggaggggggcttgctcaactgtagggaatgtggagggatctggtccggtaagaacagagaagtgaccaccattgactttggccacatggaggttaccagcgctcttaacaagcacaggctcaatgtggggctgggagagaaatccagttagaataggttcaggaaagactgtgaggcaaggaccagaaatgatggaatagaaaaatggaacagtagctgtaaaggaaggtggcattaagggaagaagtttttttwaaaaaaaaataggagatatgaaaacgtgtatgtgattcactggtgtagtagagggacagagaaarattgcagrtgcaggaaaaagtaaattcagcagcaaagaccttgagaaggtaaggtgtgtgtgtcaggggtggcttttgccctgcccagtggaggggtggtctttgccttgcacaggtggaggggtggtctttgccttgcacaggtggtggggtggtctttgccttgcacaggtggagaggcggcctttgccttggggcagggacagttcagccatagaagtgggggaaagtggggagtgtgggtccagatggaggtgccagtggtgggaagcccttgttttgctgctttcatttgcttagtgaagaatgagacagttgcatgccaaaaagagagaaggtgaagggaggtgagtcctggaatgagagggaaggagggagggcagcagataggctgggggagtgaggattgctgcgatgtgtctgatgcctgtagagatgtgtgaccatagaggctcagtgagtcccatccttgctgttgtgtgatctttctcttaccactctcaggagctcgagtgcgattggagtagaaggttgccgggatcagggctttgctgggagcatgcagcagagggagggggagctggaagttgatgacagtgatgggccgtgggatctaagctgggccaggaaggaagcggagaagggtggtggtggttgtgacaaaggctggggcgaggggcgggcagcatgtctagtggccacaagtggagctgcgatcctgaggcccaagtagggggatgctgctcagaccccttggcctctggcttggtgtccagcctttcttggctcacccagcggagctgggtctcttctgtgccctcctcagagaagtgcttgacccgggctccctatctgcttactaaagacagataaagaaaactggtcgattctttctctgggagggtgacacagcctggcctccttctccccaacctgtgaaatagggcagatggttttccccattaacaggtgtggaaactgaggctaggagaggtgggtgactgagccctttgctaaggtgtgtttstgtggatgcagaagcaccaggagtgctgctgagcctgaaagcctgttgggaggggaggcagtgtgtgggcacagcaggatcagatgtcctctcagtggtcctgagtctcatccctgagccctgagaggcttccaaacagcacctagaccattcccctccctctgcacaggtttcacctgtgccgtaattcctgacctctgacccagcccctgactcttcgtctccctctcagtgccagcccacccccagtaaatgtctggggctctggaaacacagcctccctggtctccctcctccctaggcttgcaggggctactgccctgcagccattcatagcagagtgtggggtgggccggcaggggaggtggctaacttcccctgaggcatctctgtcctgcttgccaggaaaggaaccacacagccccctcatcatcctgctctgtctcacaccatagggctctccccttcctccccttcctccccttccttctcctcccctttcccttctttattttaacctttgaaatactcaatatacagaaaaggtgcgcacacagccgggtttttatggaatcctttgagagtaagtggttgatgcaatgctycgtcatccctgaatacattagtgtgcatttcaaaccaacgaggacattttctacaagccacatgcaaccatcaaagtcaggaaattaaaacgtcatcattacctaatgcccagatccttttcatgttttgtcaattgtctgagtaacatcatttgtagcaaaaggatttcgttcagaatgacacgttgcatttagttgtcatgactggttcccttcaagctggcctgctcagactttccttgactttcatggtcttgacacattggaagagcacaggccagtgttttgtaggatgtcccccagtttgggatygtgcgctggttcctcgtgattggattcaggttctgcatcttgggtagaaatctcacagacaggatgctgtgttctcattgcgtacaatttcggcttgtctcattactgacagcatcacttaggccacttggggaaggcagtgtctgctgccagccttcgccatgggaaagctgctcttttccctttgtaattagtaagattttctgggggaggtactttgagagcatgtaaatatttcattattcaccaaactaacatttatctgkctatctatctacctatctatctatctatctatctatctatctatctgtctatctatcctgtctatctaatctatctaatctagctgtctatctgtccatccatccagccagccagccagccagacagccagcgttcatccatctactgatctgtccattcatttcactatagattcctattttatgtaataggttacagctgttatcactacttgcttcgatactcaaattgtccctgatttggtcactgatgccattccagctggcttctgtatccctttgaaatgccgttttcccttttcccgagccttcttactttccagcacaagacattccaggcttgtcttgtgcctccatgcctctgttctggaatcagtcatttctccctgattccaattagtggaccacagcatttagaaactaaggtcggggctagatgctcgttgattttagaacgttgatgctcccaggctgtttcactggggagagctggggattgtgtgtctctgagtgagtggacacatttacacaaactttattactgtatctatttatatgtattgtcaagtaggagctcacatgatacttcagtgttaaccaataccatggagtttcctctcatttcctccctttccatatttctacctcctttctctaccagaaaaaccagactcttattattggtaatatgtttgcttactactcacttataatatgtttacatacccctgaatgtaaccaatctcccattgtcaccacctcctgccccaggcagatgtctgtcaccccatgctgggatctgacacccttgctgggcagcgtcccacatgggcaccctcctctgcttgagccgggctgctgtggtccatgctgacccgttgtggcatccgcacccctaccatttcctgggtttgctcagccccacctcatggctttagcatggaatcgtttatgctctgggttttgatggctcagacttgattctatgctaccgaggcaaaggcttgaagagtgcaaacctttgtccccaagggaatagctgccctcgtgcccattcctcccttcacacacctgttccagggaggagggamctccaggtccagggacctccataaagctgagtggtctttactttttcctcccagggtttgcaacaggtgggtagagccagcgaggccacgcagggccctggctgctgcacctgctcactcacttagccttggtgtgtgtactcagaggaggacagcttggctgcacggatgcttccatggaaatgcttttgaaatgctgcaacagccagccatgtgggtctcaggagcgtaggtgtagagacataaataacaacacggggcatagaatacctgcttcccagaagcaatcagcctctctccctctccacctccgtacagctcccgtgatggagttattcacatgtagacacacacccacaggaagccacctgcggcaggcacgcagccttcacatggcttcttccacatgtgtggcccacacgcgcgcttcagtgactcctctttgacttaagcactaacaactattatttcctccccatctgatgaggaaaccagtgggctgccgagatgcttaaaaaggtagattcatttgtgaaggttgacataggagctcagaggttgattgcattggtttaactctagaaacaaaaaatgtataacccgtttacttcccagaaaactcaaggaaaaaagcatgcccctccttgtccttctcctacttttgcatgacctaaagcataaatgtcatagctacaagaaactttaaggtagcatgacatgaggtagtggcaagggacagctgggcctctgcaacttaatggtagggaggactttgtcaaatctcttcccccttctgagcctctatttgccccctttagaggagayaggccagtgcamagctcgtaaggttattaggggctcagagactgtggaggtcaagtgcctgatatagggcctcacatacagtaggtgctcaaatgtcagctacaggtcatttcaggtgtaaggktctgcaccttgatgattcttggccacacactcccagccttatataagtgctctgacagtaatcctctgtgctttgcaaccacccagtcctgggatgattctcctggtggggattccacaagtgctacacatccccagttccttcctcttttgcttaggagggcagtggttggaacattctcctctggccatgttttagcagctctttcaccaacagagggtcgtgctaagaattaaacacagccagtcaatgggaggggcccagatgctgcacttgtggcaatgcacctccagtttctgcctgccagcggttgtggaaaacaccatgtcacactgttcctagctggagaccaaatacaatctgttgtctattcacatactgctgccaagcgatacctcctaacctatatctggttggtggatgttttgaatcaatccaaaccaagagtcacatgtttttattcatattcaacaccaagttgttagagttggtcttctatcacaaatgactaagacgccctgcagatgatcactctcctggggtcactgctcccggtttgtgatgggtgtcctacggtgagggtggaagctcctacaggctgctctacattaggctcttaaccagctccttggaatagggtcatgcagccaagtcatgaatccacacagtactttgtcatcttctcccttaggatgccatggcrgtggggccttgtaaacgtccttgttgaagtcccacatgatatactgcaagcatgggctctggaatcagactttctggctcacacccagctctgccagaattaggctgtgctcttggatgacttagtttatgtgccttagtttcctcatctatgagacaggaattagtggtcatacattccagggccattgtggggatcgcatagttgctgtttgtataactgtggcactctggagtcagcaccttacaggatcctgagagctgactgtgaaagtttcagtaaatttgcagaatggatgccatcattggccatggtggaagtatctataccacagaattcagcaaaggcgacaaaccagggcttctatctcctggagagccggttgttaagtatctccagcacaccactgtataaaacacaacagcatccggtgggcactaagcaaccaataaacattagcggttgttatgattattccgtttattaacttgactaataaccatatcaaaaaaagaaatgagaccaatcatatgtaattatttttaatgagcctgtagtagtgactgctggcaactgctacttccttccctaacagctcgagaaacaacccattaataatcttcaaagtgagtttcatgtattcatcctttcgagtattattgagccacgtactaggtcctgtgtcgggcataggggagttcgtggtgtgactagcacagacaacatctttgctctcataaagcttacagtctcgggggaagacagacatgaaggcaagcgaacaaacaaaatcacaacatcatcacaaactgtgaacrtgcttagaaaaaaacagcatggaataattgagaaaatggggatgtgttttttccaattgggtggttgcaggggcatgctggctgtcacacactgcctgccaagagccaattgcgtgcgctcatctcttctcaactctgccttgaatgacatcatctgtgtcgttagcttgaaattggctatggtggaagtatttacaccacggacattggcggatgctacaaaccggagctgttttgttttcccttctggagacctaaaggtgaagatggggccatgctgagagcagtgggaagagcgttttacctgcctgtatacattccctcaggtgggagatactttctgtcccatggaagcttctgctgcagggagagagtgaaaccattccagatagagaaacttggaatggttttctgaatacctgagccctggggaagctttggttgccctttacattcccattgatttcaaccactctacccagtaccagtgccttcttgataacccctgctcccctttggccaagcccacatgatcatctgcttgtggccatggtgctgggtatctgccaggctggaccacaggtggggttctaagtggtgggtgatgatctcgggtgggaagagtcctggtattgttctgattcactgagtactccagccactgcctaagggaggagagaaaccaggcagggtctctggccagggaatggctctggcaaagctagcagggctttagagctccagccaagcacgttgggccctgagccctcaagagagccagagcgggctagaacatgaagccaagcagattacacagtgaggacaaagcagaccctcgagtcctatgttctcgggtgagtgggggatttgggcagggagaggggtactatattgtggaagcgaccaccctgaggcttcatgacaccsggggctcccttatgccactgcagcaatagggtcagtttgctgcaggacatagtcccagtcccaccattcatggagggtagagatatcgacatcctttttcccatcactcctgaccagccgcaggagaagkgtaggttagtcctttgccttctctgatttcttttctctcaacatcccaagcagttgctccatgtccacaagaatcccaggtggtagggaggtcagatatacacccatttgccgggtgaggaaaggaaccacggagaggcacaaacatgcacaacaggcctaggttcagcccccacaacttgacttctctaaactccagttcactccttaggcaaaaataataataaaaccaagcacacaagttcctaggaggattactgaagtaacatacggaaaatcactctgcaagctgctattcaaatgctagtaattttttactgtcacaattaggactagtttgaatatcttttgtctcttaacccaatgccccccsccttttttccttcaacattgctcattcatccatccattcattgagtaatgattctgaatgtttgtgaggagtcaaatgctccgctatatcctggaaataggaagctaaaatagacaacgaagagaaggaatgcatacgctggaggtgagccgggccctccgcaggtgcaaggcagccagcatgggtgtcaccaaaataggtgtatgagcaaggaccaagggagtggggagggcgagcgaagggctttgctgcagtggggttggcaggggggtcagggggcttcataggctcataatatgttcccatgcctgtgaccctcatgcctcctcttgtgtggcacaggacctgctctctgaaagagtgaggacctaaaaatgatcactaacttcagatcctayrggcatcagctgaccctgatggatgcactggaggctcaaatgaggttgagctggcctgatttgtttaaaaacaaaaatgaccattaatgagaatgactagatttctgtaagaaccactcaaaccaaaaagaaaaaattccactcaaaaccatttttaaaaatctggatgtctcacttacaaacttgaagctacaggagaagttttcccaatttagagtctattgctccctgctgtgcatttagttctgattaatcaytctgtaatttaccagccagagtcctgtcatagttcgttgaacaaactttccatcatccttctggaataaaaacatggatccggacrgtgacctcagtgcaaccttgagttgatgcagttttagtgacttggggtccagattgggcatggagctctgcagcctacggctgctcggaatcttaatatcaatagcttagacccccttgaaaatcctttgcatggaggagaagggaagactgctgctgtgtgtgcccacacacttccttgagccagcctaatgccctatgttggccaatagcccctagtaagttggcataygccccaccatgacaggtagcattttgtagattggaaaattgaatctggaagtttaagtggttgctggtggtgactacagactgcaggaagaatattcatggtgattcagctggacagttgtatttggctgcacagaaagaatgtgacctcttaaaaataaaaaataaaaggacccaggaagtgttgaaaatgacagtcaaactggaacttggaggcaccatctttttttattgatgccagctgtctccaccagtgaatcttgcagaatgccttacacataacaagtgctcagtacacatttgaagaaccgcagctttctggcactgcaaagaatttcagattcaacctcccttctttttttttttcctaatgaggaaaataaaagagaggagatgtttgattgagattagctgtcacctggaacaagagcgtaagttgctgccttttaggattccagcataaagttgtgcaggttgagcacaaaagcaccggagaaaggggataaatggagtctaaaagccagtccagcactggattgaagggagatgggtccttttcctttgacaaagggctcatctcctcaccaagccaactgtgggrccatgtccacactgagaaatgtctgcacttgaatagatgtagaagggtgatgttaagagaacagaagtccagactgttgaggattttatagggttaactgattccttctgcctttttgcaagcagagattgtgatttttgctattctgtgaccccctrtatctagctatcatctatctgtcttctatatcgtctgtctatctatcaatcatctcttgtaatccatattgatgaggttacagcaactaattgataagagggctaacacagagaacatgagcagcagtaactctctttgggggacacctgaggaatatttcatacatacctgtttgttagacttgatgatggattactccttgtctgtttcctgcagctcctaatagagtcctgtccacaaaaattgtcatgggtggagccttgtactaaacactcagggtagaggtcatgaggccccggaggcaggagaaaacatcttctagggctacagagaggtcatgatataaatgcaggaggaggaactgacccatagccacacagacacaggcagacattagggaagaaccttcaagaaacgtgcaaagaaaaaaaagtargggaggccattaaagacaatttttaagtttacaaaactaaggcaagccaggctttgcatgcaaatgattaggcaggtgagtcatgcatatatttgtcagttctctttcaaaataagaaataaattaggcacaatgtttgcattttaaaaaatcctttactttgccactctatgaattttcttagtgcaccctgggccctgctctcagttgagttcctgccctggggtctctgagacccagagaaacttcaacacctacccctcccactcccaccaaaacttttggagaatagctcttcctgctcatactttttaatggtaggggcttttgagcagtaaccagtcaggagggccacccaagactgaacctcactgtagagtgaccagggtcaatgcatgtgtacaaagtgtcttactccttgtagagcaggctgtatccaattaaagcttgattaaataccacatagtggagagtaaactgttattagaagctgctaatggacactccatcacctgcattattcactgtgaagaaactaaataaagccagcaaacggtgtgctctttgccatccaggagcctcagtccaaattaattttcatgaaactcagattctaggcagatgtggttcttttgatttttactcctaagtacaggccattgtttgtttttcccagcaaagctcaggcattgtgtgagtttttttcagaggatattgcagaatgagagtttcagagcatgaatatatgtaacctttcaaaggaaatgttcagaaagaacaaaccaaccaatacatcagcctgccaatttaacagtggtatctaaactagcttgctcagatctttacagcaacaaatacaaaaagggactccaaaattatgtgtatgtctatgtcagtttatcaaaaactcaactaagaagtgtctcctcccacagaggaaactgaagttcttgaaggtgactcataagaagaagccactggggacaggggctttgaccctggccctatctgcttcccctctccatctgtggatcaacaagcaggaatatgtcagataatgtccaccttctgttgagctttagctatgggcctggcactccacatgtgttatttcatttgatcaatacaatcaccctctaaattgatattgcttttcatggttgttcacttgggaattggagtttagttaggtcaagtaacttgtctaaagtcgtacagctaatggtgagaagatctggcacttaaacctaggtttccctgactgcagagcccatgctctcatcaaaatatcaatttcctccctcacaaacactagaagggcacccatttggtattgagcctggctgtgaacaaatgcaaaagcaatagaggaggcatctatgctttctttgagtttgaattgtcatggtaacctaacataggggtgggggccttgagaagagttttagagtcatgtcatatcagatctgggctctgtttccactgctgctactcaacctctctaagcctcggtttccttagttgtaaacaaaaataacagttgaccccgactaccacaggggttaggggtgccaatcccccacacagttgaaaatccaagcataatttttgactcccacaaaagtaagctactatcagcctactgttgaccagcagtcttgctgataacttggtcaattaacacacattggctggctgtggtggctcatgcctgtaatcccagcactttgggaggccgaggcgggtagatcacctgaggtcaggagtttgagaccactctggccaacatggtgaaaccccgtctctactaaaaatacaaaattagccgggcgtggtggcacatgcctgtaatcccagctacttggaggctgaggcaggagaatcgcttgaacctgggaggcggaggttgtggtgagcagagatcacgccactgcactccagcctgggcaacaagagtgaaactccgtctcaaaaaaaaaaaaaaaattaacacatatctggtatatgtattatatactatattcttaccataaagtaatccagagaaaaggaaattgttaagaaaatcctaaggaagaggaaatatatttaccactcactgagtggagtggatcagcatgaaggtctctgtcctcattgccttcacatggaataggctgaggaggagggagaggaagggctggccttgctgtctcaggggtggctggaagaggtggaaggggaggcaggyacacttggtgtaaataaaaaaaaaaaatctgcgtgttcgtggacctgtgcagttcaaagccaggttgttaagggtcagttgtaatgtgcttacctcacagggctgttggaaggatgacgtgataccacrcatataacgggcttagcgctatgccaggcacatagtaatggctcaatttattttacagggaaaacatgcaggtagttttcaattatgttggtataaactagtttggtaaagggtgagctacatcatatcctaaaagtagaatcagaatagggctgaaacctggagatctggccctgaagtgaggtgcttgtggttcctgggtggggtccctgcaaagtatggccctggggttcttattttccagtcatcaccatatttaagggtaaagtggaagaggtggagctgcctgtggagaaggtggacatcatcatcagcgagtggatgggctactgtctgttctatgagtccatgctcaacacggtgatctttgccagggacaagtggctggtaagtgtcctgcatgctgtccccgcgttggccggctggctgtcctgctcctctacccaaggcctrcagcctaggaggcatacgaagacttcagagaagactgaggccaggaggtcactgccccaagcccctctctctagagcagatctgtatcagggaacagaatggttgcccygggtccagcatgtgtaaccatcagagtggacttccgtgggtctcaccgcagcctcttttgcrataacagacatccgttctctcttgtcgagttaaaggtccgtttcggtcagcaagtacttaggacttgcatggctgccagagccaggtgtgctattcatctgggcttctccaggccaaagtcgtaacatctctcactgctcctcactggatttaccttcacctcacctcatttgtcctattgactccacctaggtcccttaaattttccttgctccaaaataaaaattgagcactgctgtcctagccctcaccccagacaaggtgacagtccactgcatgagagatggtggcaagggggtgcttgtctggtgactctrtgtgcagttcaaaatgtgatgtctttgtcaggtgaatagattacgagacccatttccccacaattcatcaacagaaacctggagggcttatgtttccagaccgggcagctttgtacgtggtagcgattgaagacagacagtacaaggacttcaaaatccactgtaagtcccctcttrcttctcyggtggacttccactgcacaattggggtgggaggcactccagtgggcccgagatgagcaggcagtgacatgaacaccattgctgtccctgaagaggagcttatctgggaccctttctggagtctgctctctaaatgtttctatctagtcccaagggtgttaggtctacagacagaaaataagccatatggytgggatgagagaaatgtcctggggtgaaagaatgaatgcaatgtgaattaaaaattggactgaggcagcagaagctgagtttttgcagagatcagcagggcaagtggcttgaaacctgtcaaggttcagttagcccaaaagtccaccgcaggggtctgaagtagcaggtctcttgccaggccaattgttttgaatcctgcctccattccattcaaacttatcaaaataatattgattctcttatgcaaatacatattatttgaggttcttttgaggaatagatagcagagggggtgggaaagagtggagattttgctttgaacaatcaaacgaaaggcgagtgtgcatgtgtgcatgaggcaggggctcgtatctaaacatgtattcttaatgccttatcagctaggcgtgtgtggttctctgagaacaataaagccaaaaaacttctcctcccccgcaatgttttacctggtctgaaaagggctgttatcctatttctcgtaaagggtgacacttctctgtgacacaggcctgatccttaatgagattataccaaacatgtttttgtaaagttgaacatggctgtgtctcctcaaccagaaccaaatacarcaaaggagcaaagaacccctcaaacaggcaaacacccaaaaatccaaattaaagcaagaggcagaagctccaacctatccatcagactgggcacatctgcggttcctgccccaacagggtggtccattcctacttggcaagattactgtggaggggttcacagattgartagaagaataaatgcctccaagaggctaagactccatccacagttcaacaaattgwggctctgtggatttaaacaattgccatctaatcgtcgttagtggcactgatgaaaactcggctggactctgctatggatrtgtgtatttgtgtgggttcatgcctttctggaaatataaactcaaagtgtgaagttcagagccaggttcagaagaagacaaaagtgggacagctgtttgaagctctgtgccctggaaaccgtctctggttgctgtctgcctccagccaatctggtgtgatttccactatttgacctcctgggggaaggaggcaaaataccaaatgaggacagtgagaggcaggggggcccaggttaaatgctttgcacactgccagccctgggtttaaatcttggctttgccatgtcctaactgggtaaccttgagcaaattatctaatayctttgggcctcagttaarggataattttctcaatcccacagacttgtcatgaggattaagtgagatgacatatattaaaggacgtgacagttcttggtcctataatgggactagatgggaactagtttctgactgtgtagctaagcccctttctgcccctggctctggcaagtgagcctgactgccaagcccctggtggctcagaatctaggacagatgtactctcatggaagattgcagacacaactccacagtgagtgttgatcaaatgcatgtataaataggacatattttgccctggagctgcattttggagttcttgctgtgcaattgtactgaatagtgttttgaggaggaaagcttctaggtacattcttcattgtcaagttcacttagatatttattgagctccaacccgaggcacacctctttaagaaactttctcatggtttccacaacaaagatacctgtgtcaggagcctttgcaggtatgcacattgcaatgagccagcctggggcagggaggggctcctaaggcactggccccagactggagatcatgtgatttctttgattctcattgcagtgttcataccttttggaaaaggaaaaaaaaaaatctgaaagttagcaccatgttatcttgtgcttgttctagagtctctgaaaaataccccaacctcctccccaccccaaaagaacaccaagaaacagacacttaaaatgtatttaaaatacattttctatttacatttttgaaaataatctatttttttgtaaaggaagcaaacccacttagaaattcatttcaaataaatggagactttggttactatgagttctaaatcagaagtaaagcacaaaggttgctggttgctaaggcaacaattgtaagcaattttctattggctcaagaaccagctaagaaggaaaaattttgaaatgaggcaggagagtgagacatgttcagcccctttcagaaagtaagttgttagagggagagctttctttcctttcctctcctttccttttcttttatttccttccctctccttcccttccctcccctcctttcttcttctttctcaaccacacacagcaacatgggagtgcaagaatgaggtcagtgcagaacctgccctccatttgctcaccaatgaatagagaccacatagagacagagataaatatctggcatatactaggctcacaatacataattttaacgaaggaaggaaggaaggaaggaaagtgaaccagcagagggatgtgcaaggtgtagtatttaactcttagagaggagcaatcattttacacacattttctactataaaggaaatacacagaatttcaaaaatggaaggaaactcggtggatgttctattcaatttcatgcacaacccatgaattgtacccagtgcatgaatctacaccctgctgagaatgagagagatgggcaccagtttcttggctgatgagaagactgaaagaaagacctcatgcagaggtggcagtgcttatagcttgatggttgaagggcggccctcttggatggctcagctgctgtctgtgggcttcacttccactcatgacatccagagtttcctctggttccagcycattttatgcaaggattccactttsttcatgagmgcctaaaatgtgtcaatctagtgtaaacactttcccttctgcacagaggagaatctgtaagtagcatctggtggcacttgttctatttttctctgacctcattctgaggcagtcccattagcctcatcagagaaactcagatggttggggctggggtggtgagggaggatgtagctacagctctctgcaatcagaaatcacatttctcccctggtacttaattttctttcctcagactgtttttgagatttctgtctttattgattttctgcagtttgattctgatgtgtctaggtgtgtttttctttttatttatcctgcttggggttacatggaattcttggaactgtggatggattgtttcgttagtttagaaaaatttcagccagtatctctacaaatatttttttctgcctgattatctttctccccttcttcaggaactcccattatatgaaataatgtttgatattgtcctatggagcttggatcctctatttttttcaccccttttttctctttgtgtttaagtttggatcatttttattgccccgttttcaactttattggttattccctgatatattcattctgttaataagttcattttaaaaagtcttctttccttatattgttatttcgatttctarcatttccactggcttttttaaaaagtttccatctcgctaatgaaattctccattcattgatgcacactgtccaccttttccactagcttctttaacatacttagtatagatactttaaagtcttgttggataattctaacatctgagcatctctaaatttggttctatgacttttttcttatgatgataagtcatatttttccctttctcatgtgtcttataatttttcattaatgctgggcattgtgagtaaaaggaccagtagagacaggtgaatcacacctatgtccagaaaagagcattgcctctgccaggctattagaatgagggtgtgtgtgagtcaatctagtctgtattaatagtagatttgggctttgttgttgctttaattacatacattatgccatagtatagtcctttttaggagtctgttttcatccattaacaaaagcttcacaggcctctctgatattattttttaatttctagataatcatgatatttcttgatgaccaatggctcttaccccacatacacttatttggcatacagcatacaaataattattgcaacaaataattaatgtgatttatttgtatcctactccatctctgctccacttctgataaaaagggctactgggaaataaatggccagcagaaagaagaaaaaaaaatctaatcccttgggtgatctgtgctctgaatgattgaaggtggggcagtccagctgaggagataagacccaaattaacccatataaaggtaactaaaacaccaggcattgcaaaacagtgcaggcattaaatgtttgggaatgaatctcaattcaaaaaacattatctgtgagcctattctgtgctaaatgctgtactatgggtgttgagggtacaggagaggttatrtggtcaggagcgtttagagaaggtctcacaaaggccatgagacattaagatcaccatttttgggacttgaagacagtaaagatcatgtaccccaaaggtttccaaatggttggaattgtctgtatagatttgtaaaactccagctccctggctctcaaatctggagattctgattcagtaggtctggcgtgggccctggagtctgcattttaaaaactgttccaagtgattcgagaacacagaaccactgaaccaaaatccttataagtaagcccagaaaaaaggattgatttgcacatggccgcacagcttgcatggcagcaaagccagagctcaaaccacataatgataaccacttttatgtatcaagtgctttctgtgtgccaggcaatgtcttatgcactttacrtataatcacatttaatcctcatagcaatcgtatgggattaccatctttatcatcatttccattttacagaatccttagaaaccaaggcttagaaaggttatattcgtgcctaagattacacagcaaatacgtggcagagctcagatttgaactccaaagcctaggcctttaaccattacatgcattgactctcaggcttttgcttagcactagcagtgaactcaaactcccggcagagtccagggrgaaaagagcaggtgcatagctgcaagtctcttgagaaagacacagaaggcaatgtgttttggcgtgtacgttttatctggggagagggtggatagctatttccacattctagaggggagtcttctctgaaacctgccctgttgccaactaagcagcctcctccccacgaagtaggttttaattgggagtttggcaccagcctcgggtgatttaatgggatttgatgggcatcttttcctcaaactggaatttcacaagcactcatcctctgggattaccttctctgccttcttttcgcaagaaagaagctctttgtgtgccttataaaagaatcagagtcaaaggagaaaagctgtcgctgaccgttcacacctcctgccgcacacacccactctcctaaacacacacaggaacatacgttccctaaggtcctgtttgtttggtgaatgttttaaaataaaatttaatcctgtaagattttagagaaaagcatttctacttcaaggcattttgaaacccattgaaaaaacagatgaatgagattcaggtgcccggaaactaaagagtctgctaaagctgtcctctctgcactgtagggagagaaatcttgcattcctggttgctgtcacggctgggccatggcaggtgaaggatttaggggacatgctgggcttgagccctcgcccccctgtttccctgatgtgtgatcatgggccagatattatatgagagccagatgccaacttctcccagccacagttttctcatctgcagcatagcaatatcctcatgtggttgctgggtagattaaatgaagagtctggcctggactgactgatcaatcaatgactgcaattattggccaggcatggtgactcatgcctgttatcccagcactttgggaggcctaggtgggcagatcacctgaggtcaggagttcaagaccagcctggccaacatggcgaaaccccatctctactaaaaatacaaaaattaacccggcatggtggcgggtgcctgtaatcccagctrctcgggaggctgaggcaggaaaaccrcttgagcccaggaggcggaggttgcagtgagcccagattaggcctctgggcgatggagccagtctctgtctccaaaaaaagaaaaagatagcaattattaccatattaagggtgatcctgggccatcagacttgaattaatttctcaccaaccccctagatctttctccctcccatacaaagtatcttatgagtagcccaaaggggacaaggagcacggctgacaaggagagggtttgtgctccacttgggggtagttcctaatggggtggatccttagtgagtgcatcttggcatacaaggaaggcagagatgctcctggacccacccaggtgagaaaactgaggttcagagaggttaggtcatttgtacaaaggctgaccagtaagtggtggtgctggaatwtaaactgtagttgatttcacgttaaaagcccatgattctctgtgctgcattaaaggttcagtggatggggacaggaaaagggagagagatgggccttctaggtcttctaggtgtggagaacagctcgagacagcataggaatgggaacgtagaagacagataagggagttcataggagacgctgctggcttggggaggggacaggaaggaagagtcagctagcctgggttctagtctttgccctgctgcactctagctrtaggagcttggagcagtttcccagcctctctgagctctagtttacctaacaacaaagtgggacttaccttttcccgaggtagaaatggaaatgggagtgagcatttggcacattgcaaagtgcccccaggtgagcagttctgcctctatttcgatgcaagggaactcgagctgccactcagccctcaggcacgctgtgctctaggactcaggagggttgggtgagcttctgggggtcctgcgcctgccttcacgtcttgctctgctcccacagggtgggagaatgtctatggctttgacatgacctgcatccgggacgtggccatgaaggagcctctagtggacatcgtggatccaaagcaagtggtgaccaatgcctgtttgataaaggtctggacactcatccggggtggacctgggtgtgctgggagccccgctgtgccaccctggagtccaggcaatgccggctcctgcacagcccccacctggtgaggcaaggctgccttggccagagcctgtgatgctccctaagctcaagtcaaaagctggcagtccgcctggacacagccactgagagagtggctccatggtggcacggatgtgggagggccccagcacaggggccctggtggcgtgcagaagggtgggggtgcagggaagagaggggcattgcaggagaggacacctggaagaggagagcgtgctcaggtttggggcagttggtccattcagaggtagacgtctctcttagggaagaaatccaggacctcagtatgctgtgtaatcatcatcatgctcttgcctccacacacacctttgccccagcggcctgccagatagagcttccagctgccccttcctgagcgtccctgttcatgctctcgcctccacatacacctttgccccagcggcctgccagatagagcttccagctgccccttcctgagcgtccctgtttgtacatgctctaaaccaagtgtgtccaacctgcatcctctgggccacatgtggtccaggatggctttgaatgcaacccaacacaaattcgtaaacttaaaacattaagagacttttttgtgggatttttyttttagctcattagctatcattagtgttagtgtattttatgtgtggcccaagacagttcttcttctaatgtgacccacggtagccaaaagattagacacgcctgctctaaacacctttgcccgaggcttccttcagtgcagatgaagaacagctgctcagcgtctttgccacaccaatccctagtatattcttattattaaaaattcaaacatgtccagttagatagaataaaggtgaaaggtgccctccgcctccctccagccccatcctcctccagaggtaaccactgttcacaggctgggttgcctcttccagtcctttttgtatgcatttgcattatatatgctaatatattatgttgaaccatataaaactattgatatttgacagttttttaaaataaagagagacatcaatttcatataattcaagccaaaaaaattttttttgagacagaatctcactctgtcacccagactggagtgcagtggcacaatcacagctcactgcaatctcgactaactgaacagtttcatgtaccacaagctattttttttttgagacaggatctctttctctctctgtcacccaggttgaagtgcagtggtgtgataatagctcactgcagcctcactgaggctcaggtgatyttcctgtcytagcctcctgagtagctgaaactacggctacgtgccaccaggcatggctaatttttttttttttgtattaatggggtttggccatgttgcccaggctggtctcaaactcctgggcttaagtgatccacccacctcagcttcccaagtgctgggatgacagacatgtgctaccacgcccagcccaggttaatttttaaattcaaaaatcagcccacctgagtctcatcttgctaacatgccggcctactgtgctcctgcacgcatcattctttttctgaaagtatcggggcagggtactggactggaatatttatagtaggataaagggattggagttcagggccactaaggacgggggtgggggaggtttctgaaagactgacacaactgctgctttgcccatgtgagaactgtcctttgtcctggacacaagccttgctaggaagaactgcacccgttgggctggagtatcactgtggactttagaaaggtcctcacagggcaaataaacctagaatgaacctcatcagaccccatcagatgccccctctctttagtagcatcctgcctgagaggtttggctttgagtctaagcctcagactctccattcacagggttctcactacttcattcagccttttctgggtccaggcaggattaattgtgagcaaatgtgyccttttgtttctttctaccagtccctctgtccctgaagcctcttcctccttgccatcctaaacaagaacaaggaaagtatgcccccagcaagaagctcacccatagtacaaggcacttctgtaaatgtagaayagatagaagtccactagtgcaactgaatttgccaaaatgacatgtggcagtgatatttaccattaggcatctgcacgtactggcttcagcttggggataaaattccttcartattcttggaccccaggttgctctctgcccctgacccaggccccattggcaggtgtagccactgcatttctgtttgcactgccggacacgtcagccactgtcctggccctctccactccccaggcaagaactagcaggggcctttcagttggttagacctgagcatatccaggggcaaagcagccaaggagcggctggaggggtgtgtgttccgtacactccttatgaaaactcccggggctctggttctgtctcaggactcgtgacctgtgatgattttctgtcccacgctggtccctttcttcctctgtgttcctgagaaggatgacgattgtctgtgtttgcttctgcttccaggagagcccttccgccagctctctcctgctgatgtgctaggcaacatcttgccgagcctgttgggaaaacacttgcccttcttcacacacttaattgctattttcatcgctattaacattgcagagtgtgacactttattataattaaggttctattttaaccagacttctgctccgagacatccatttctaacattgtttagcggtggggatcgcagcggccaggggcacttctgagtaatttatgctggtgaagccctctgcttcaagcgggtcacctgaggccaagtcagtgggtctccctggggtctcagagctgctgtttctgctgcagaaaagaggaagcctcctagtcgaggggctgggctctggggagtcagggtaactggggctgatttggttgggggttggggaaccwgagcccagaggacctttgtgtttttgaagcctagctacagctgatcccatcctcacagatggcctggacccccattycaaaagaccacctgcccttattgttgccattataatgtgcggcttcaatacttttggtcctaaaggcttttgttctatcagaggcctctattaagatgcaaatgtctcagggatctattgaaagctgtcagctacaagagttgatagctgacattttgttgatggacatctgacagcaagatcctttagaggtggaattcctgccagatggggggtgcgtgtgcgtgtgtgtgtgtgtgtgtgtgtgtgtgtgtgtacgcgtgcgcaygcgggatagaaggagaaagtaaccacgtctagattgtaagccataaggaatcattgaaggttatagatccagagactgacacagtctggatgaacctgagttacgaaagaggggcctaggcaaagaagtaagtcttcamgcagggagacctgttctgagaagaagattgatgagtcaacacatattgctgtgtattaggtgctgctgtgcactgaggatacacaggacaatgaggtgtaacttctgccactgaaggcttcagtgtatcggccagggcaagggcgaaggtggtgagactgcgatatgagccagaagtgagattggaaggccatgctacactggtgacggagggaaccaagaaagaaagataccagggaccttggaaagagcctggagcctggctgattggccctgagaaggtgatggaaaagtcagtaagggtagacactgtgatgccattaacaacaatacaggcaaccaaggcttgtccgaagagtttttgagctggaggacacctgtggacagcatgtggccatgtggctgggagggataatgagcattatgaaggctgacatatactcagtctaaaacgtttcctagatttgagcaatggcccacgctaacagatgacatgtaatgaaggacccctccccttgagggatgtggtggaggaaggggcttggccgacctaaatgcaagctgarccagcagtgtgctccttgggaacacaggctgctataagtatgtgccaatggaaggacgtggaggacctgatgtggtcagtataactctcagttttgcaagtggcaggacccacccagaggagaaaggccagggtgatgagcggtcagacatcacgacttatgaggaatgaataaaaagccagagatagcttgcattggagaagaaaaggtttaagggacctgtgtgaattggaacacacatttggcttcttctgtgggtggaagttacagagggatgagtgtgaactttcttcattagttttgargaaggacctaatgactggagatgccaggacgtggactgatctgcctggcagatggtgaattctccatccctaaaggtgttcagcaagcactaggtgggtgctcagcaagcactagatggccactaaagaggaggttcttgccttggataaaaggctcagcttaagaagatgggctttataatcccatcaaattctgcatgcttgaccaagggctcaccattcaattagttcttgttccccttctctgggctctagaaacacagtgtaattggcatttgaatgtgacctcaccaagggcctcccacattcccctaaacctacaatctcaccttcttcccaatcaacagtcagagagcttcagcttccacagaagatgtcatggctacacaccccagatcctaggaggactctgatctcattggttcccttaaccactttttctctgtccatccctgtggagttaggacttctctttgaaggccccaggatagtttgcgtctgtttttcctttatttatcctggaaatacattgagacaaaagccatttcatcgctttgctggtcttgttttcctaccctctggtccctctctcctaattcctactaataattccatcttccaggcctcaggaggtccctgtggaaccaaccaggcatacagatggccttctggctcttacagagttttcaggacagaggtccttgctgcgcaaccttgactaatgggaagttcttccttgggcctcactagaatctgtcaggatgcctcttgggccctagtaggtttgccctgcctcacggggccagcaagcagcaggccagcattcttccatagaaaagaacagcacagtgcagacgtctttcaattccacctgctccccatgcgagattgattttcagccactttccagttgaaattcttaagagttattagttcttcrtgttccacgttccccagccagaactgaaaattctcacttcttattttccccttttatttatttttgaaaacagtccagccttgttaaaaatggccagcagaactttcctaagctctgtctgtgactttgtgggctcaggtccttactcctaatgtcatccttgatgcctcctattgctgggaacttgcgtatcaaaaaattggggaaggagtagtctggttcatctacatcactggagggcctgataaaacacagattgctrttttggtccagcaggtctgcccccctcagaatttgcccccaggtactgttgatgctgatatttcagggaccacattttaagagcgatggatggagcagtgcctgggtggaccactcgaggctgctctgacaggtgaagggatgcattgtctaattaaccctcctgttctctcccttccccatcatccccctgtagccccaaaccctggaagatttatcttccgaattctgctcccctcaggttttgattcaaatccatttgcaccattgcttgagcacactccaccctagaaaggatggaggaggtgattgggagggcggtggggagcctgggaaatcaccccaagaataaagatatccctcagagagctgacagaccacagtctctcacagaacgaggctgctgaccgggacccagacttggtggaggcgataagttcccggcattctctcttctctgggctgcaggaggtggacatttacacagtgaagacggaagagctatcgttcacatctgcattctgcctgcagatacagcgcaacgactacgtccacgccctggtcacctattttaatattgaatttaccaagtgccacaagaaaatggggttttccacaggtgagctgtttgttgcttcccagagcctyctccctctcccatgcttcctcaagtctttgtggggtgaccagagctggccttgacttggggagaaggggctgggtgttagctgggtgacacctatcaaccctctccagccatggaggaaccatgcatccctatatttgtgctgtccaaggagaaggtaaataatgttgtggttgttacagcacaagttgagagtgtgttggatgagggagaggcaggaggtagggctcatggaggggccccaagccctttcaaaggcatatttgttcaggtagcattttctgagcacattctgtgtggtgggtatggatggagttgaataagcctagtctgcactgccatgcctctgtgcaggacacagcctgtcttgcagcagcctgcacactggtctctatgtctccttcccttctcccttactttcacaccaacccatccttcattaaatctctgttggtgttcccccaagatcaccccactgctactcccactcccaaatcccagccccgcttacgaggtgcctcgctgcctgcagtagataagcctggcaaatggggatcccatggcctggccctggcccactctccagcctcattcctcaccacccctcttggccgagccctgtcccgtcgctgctaccccacaggtggcccagctacaccgagctccttgctgacttctaaactcagtgaggcctcttcattctctgggccatggcttctacacacaccagcccttgcctatccaggtgtgccctggaggtgggaggggccttagtcagaggctctcatcatcccctcttctcctgtatcagtctgtgagggcagccataacaaaatacccaggcttgggggcttaaccacacatgcagttctggaggctggaagtccaaaggcaaggtgtcagcagggtggatttctggtgagggatctcctcttgccttgtagttgtccaccttctcactgtgtcctcacgtggtctttcctctgtgctcatgagcccttggtggctctatgtgtgtcctaattgcctcttctaaggacaccagtcagattggatgaagttaatcacctcttttaaagcccttttcccaaatacagtcacattctcaggtactggggattaggacttcaacatgaatttggagggggggacaattcaggtggtaacaccacccctgagccatctcttcacctggtttcctgtctcagctcaggggttacctgatccccgctttccctttgggtcaaggttcgatgtcctcagggtgaacctaacatctcgtgcatgtgcctggcatggtgatgtttcaagtgagacacatgcacaacagcaagaagaaatcaggacaaaagagtataaaaagtcaaagaaagcattctcacccccaacccatcccactcccactcttcagaggcaaatattattattaatgatttcttttgtatcattccaccaaatttcagtgagtgcacaagcacatgcrtatccatagatgcctcttttttggctttttattttgaaataattatagattcacaggaagttgtaaaaatagtacacagagttgtgtgaaccctttgcccagctgccccattgatggtgtcttacgtaagcatagtacaatatcaaaactacacctttttaaaaaaacttaggttggatcctaccctccacactgccctcagctaccttttctttatttaacaacgttatcttggtgatactctcatagcctcacagagatacctagcttctttttttaaacaaccacacaggattccaacacagggcttgccattatttattcagcattttcaccctttcttgcaactgtcagtctcctgcatgagtagggatcatatctcagtgatctctgcattcctgtcttctaaagcacagttctaaacaaattgctctaagaagtgtatgatgatatgacccctgcccttaagaatgtgttcctattgagtcttcctgggaattgggagcatgtcatcagggggtgaggaggtgagtagttgtatgtctagtagggggagtgggaaggtgagttctaccagaaatcraggacatgattctttacttccagaagccatgaagaaaatgatgctttttttttttttttttttttttttttctcagagacaaggtctcactctgtctcccaggctggagtgcagtggcacaatcatagctcactgcagccttgacctcctgggctcaagcgatcctcctgccttagccacccaagtagctgggactacaggcacatgccaccatgcctggatactttttaattttttttttttttttggtagagatggggtcttgcctcattgcccaggctggtctcaatgattctcttttacctatggaaagagagggcaagagacagatttatctcttcatagaaaggcttttcccagaaccagtgcctcctgattactaagattgggacttttggtctccgtcagccaggcagtgctggtgctttcctgccctgatctgggtcattatcagctgctgccctcctcacaggagcagtacatgtcttcccagtgggcaggagcagccaggagggggaaggtggattttactttgatcttgaaggattgggaagactgtgcctagcaatggtgagagtaggggtagtgagggagctggggaggagccttcttggggacagtggctgtgattggaagctaaggatgaagtcataggagctggctctgcctattccatcaccaggatgatgtctaacccagagcctgccctgctgatgagaaagtccatgggcaaggatgctctgggaaaagttctaagtttccaaaccccaggctctatccctgcagctctcagccatagttttattttccttgagatgatctattaatatttctagtctccaaagtcaagcagacagcctgctggaccctgtctagagatggctccctggctctggggtgttagggatgacattcttcatggtcccatgtggaggagcctggattaagctcacatccagaatcaagacatcggctctgggctgcctgaaagatggcgaggatttgccctgagtgttgaaggctctaacccagtggctttccttcctagtctttsgtcacacccccaccacagtcctacgtggctcaaagaccaaggatctaaacccagttgtgagcctactcctctttttgcaattatagtgttatgcctcctcccttttgcacagaattctacaaacttaggttctgaaagacatttggaggtcctacagtctccagtttgtcatgccttggggaagtggttctcaaagtgtggttcctggacgggtaacaccagtatcacctgggaaattgttagaattgcaaattcttgagcctcaccctggacctcctgaatcagaaactctgggggtgggggccagccgtctgtgtcttaacaagacctccaggtgattgcgatgcatgctccagcttaaggaccactgcctctgtgcaagactgccctgaaccagagggttgagaatttgaccaatgttgactttcttctggaaaggctattccatctcctcactcaggtataccctcaggcctcaccaagactctttgctttctggctgacgtagatccctcttcttggcacatgcctatatgggtagcaatgggggtgggagaatactttgttgagttgctttctcagccaccttcgcgtgtcagcgtgggggctctgtttctagcaggtagcaaacttctttcccagttcatgtgggttagcagtggggtatactcagaccatctatattctgacaactgaccgagtaaccctttctgtttttatggatctcagatgcacagacttagattaatcctaattcttggctcatgccatatgtcattattggaccattcatggttcactttttttgctaatttatatattaattatatataattatattatatattaatataatgaatatccatgaactcaccacataactcagcaactagaatataaattaattactattaactagaatgtaaatagtaactagaatgaattaataaatactaacaaaataaattaataaatactaataaatttattagtattactattagaaggtaaatacattagttaatattaaaaataaattgtttttaactaaaatataaatattgactagaaagacatggtaataactgtaatataattataattaaatgtaaatcaattaatgcatatttgcattaatttgcttacacttattgattcgagctatgccctgactcaatgactgaaatgctgccaacacctctgcatcttcctggatgccccaccccatcccacctcccgtatcgcctccagatgaacattatcctgaattttgtgttccttattcccttgctatttatgaaaagttttatcacatggatgtgtgtgcctaaacaaggtattgtttggtctcagctgtttttgaacttgatgcaaagtgtagcctgctgtgtgtggtccctctgcatcaacccccaactgagtcttctgttctcagcccagtggtagcgcgctctgcgggccacttagaaacacatcccataccgcacagcctgaaaaatgatcccttctaatgactctgacgtctctgcagctccaggcagaagctgtcacaaataggcacagacagccagggttccaggctgtggcagccagtgggcacggtgccccccccaccacaacacatcctcagtggggtgggggtagaagtgggaactggggcccctggggctgctgtgtaatccaggaaagccaggtagcaggtggaagggcaggagccccagcagaagcaggcctgggtgcaagccctggttttttcaggtatcagcaaggtaggcagatcagacattggaaaggactttgggcaagtttactttctgcgccttgggctcaggcagctcctttctgccattgacatcctgtgacattgagtcattttcccacattaaagamgcttcttggtgcatagtcctcaattctccaaaaggcctatgaattctctagagaatataattccaaacttacagctagaaaaattatatcccagaaaggacgaccagccacttagccattggtcagtgagatgggaagcaggattccattccctttccaaaagcaccaggaaaactctggtgagaggccagtccctgccatttgtaccctcagctccctgtgttcccaagccccatccttggtcatagtgcccaccctacttctcactatttgcctgaatgtcttctcactgaggctgtatgatcgggggaggaggggacaaagtggtgttcatcccgtttgctgttccccaattctacagccatacccggcctgtggcaggcatcctaagtgkaagtctgtggaatggtgaatgaatgcactgcactrggaatgctgcaggcagtactggtcatgctcacttcaaaatgtagaagaaaagctgcctaaagcctagaatcagagagactgtgatggggaagggaactgtgggagggagaaaaggggtatgtggggccagaatgctaagagcagggaggcatcttcagaatggggaaggctgaaagccagttgtacaatctggatggtcatagatggggttggggcaggggaagggaaagctttcctccctgacaaggagaactctagatgttgtccacaaccctttcctgagcgcccacccttgtgcacggtgacattctggatgttttccaagacattctccaccagtagagagaggcggcatatctttgcagaccagagccatagttgatggactaataaaatcatataccactctaatgaccaaagacttgcctgatgcaatggcttagtaagtccctaacatgggcctaatatgttttaggtagggtggccatgtaacgcatctttccattaaggacacgtatgcaggtgaaagggagacctattaatcattatgccaggaaaacagatgtgaactggaactgtcccaggcacagcaggaggtttgatcacccttagtctatgatcctttccctttctcatctcatctcatcctcacaatacgtcaggaggtgaatatcatgagccatattctgcagatgtggaaaaggagccccaggtcacatcgcatgtcagtggcaaagtggacactggacacggggctattgtcacctaattaatgtctttcccactctaccttcccaaaggaggtcaggagatgcactgcgattcagccatggctgtgtgtctacgtcacctgcccctccacgccccccagaattactgacttcaaatctcttggagtagaatcaaaacattgacttttactcagcttctcctgggcactttgatggagaatcaggattgggaaaactggtttagacaattactccatggctaatgggcccatcatggaaacgagatgtttatggatgttcttaaccctttgatgttgatatcaaggaaaataatcatcttcctccaactcaaagtcggcatgttttggggactaccatcagaggcagaccccatggctgacaaatctgggccaggaagtctctgggggtctcataaggcatcggattaggtgacaraaggaggctgcttgaaatccctttgcctgaaggtctttaggaacaggagagagacacctgtctgagctggtgtaggtggaagtgggggcgagagtgctgtcagtcatacactgacagtctccacacataaccaggaactatcttttgactatttagaggtagctggcagagatggttgttgggagcargtggactttgtctgcagacagcagtatgccctgaaggccagaaaggctggatgtgttcaggaacccaggcagggtctgaaagggatagactgcacattcatgatcctccttccctttccaaatgtgcaggctgcactttctccccatgaccttgagtttgcatcgatttcccaaatgcacacacggagggctacttgagtctctctccaaaccactgacatttgatcaagccagttcattgtgaagggcagagaaagacagactcttcagtgctgttaaaattggccttggggttttgaaagctcttagaggtcacctggtctgagtcagtgcatgatcaagccccagttggcgctgtgtgaacacctgccagggtggacctcagrtggctcatatgattgtgggacagctctaattcttggtaaattaaaaatctgccttctaatcatgcctagtgactagcctttgttctgcccccaaagccatgataaggccacatgtaagtctttccatgtgacagcttttgaagtgttttgaagacccttatcttatccccaagtcttctcatctttatccttagtcctaaaaaaaaaaaaaaagaaatcctggtagaggaatgcaacagcccaaaccaagaggaacttcctgtaataagatgggttcttctgcagtctgtagattccaaaggcccccagggtaactggagtacattgaactccagtacgagtacattgaagcactacagacatttgctctttgggttcttaccatcattcatttattcaatactcgtagatctaccaagcacagaggcaggcaccgaggaagcaaggctggcccggtccctgccctcatggagcttgcagtccatrgaggatgcagacaaacggggatggggggaaggcatttatcttgtgtgacaggcaccgcaataacaggagctcagggtgccttgggagctctcagtccaggttttgcgggtcaggcaaggcttcccagaggaaggatgaggaagagagaggctggaaaggagggagaggaaggatttcagagacagctgctggcaaggacggtggcctctgaggcagaactcctcacatttaactggagaatatatcgtgtgctgagaggggagggaagagactcaatggcagatatgggggaggcgcaagtaccactatggctttgggtcatacaggatgaatgagctgtgggccagcattagggctgtggaacaagaaccatccctcatttctttctgatctggttaggaagatacacctgaaaccctacagcaggtctgggccaaggtgctaggtttagttccccgtgcacagagaagcaggcagggaaagctctttttttttttttttttttttgagacagggtctcactcactggtttgcacccaggctagagtgcagtggtatagtcacagctcactgcaaccttgaactcccaggctcaatgcatcctcctgcttcagcctcctgagtagctgggaccacagatgtgtgctaccacactcgcctagttttctcattatgttgcccaggctggtcttgaactcctgggctcaaccagtcctcctgcctcagcttcctgagtagctgaggttacagctatgagccactatgtgtgcccagcaggaaaagctagttgtaagattgaggaccaagtacctgccatatcagtggatctggggaaactggtttagctgtggagtttgcatgaatgatgtcatttaaggggagataggagggcctactctacaaatctcttccccatactgtctgaagatcttcattctgttgaactaattaaaaacagcagcatgttcagatgcatgtatgtccatgcatttagtgggtgacagggtattcctcatccatcccttgctatgaacttgtagtatcgggttgtttstcttctgatccccagcactgaggagatggggatgtgatgggaggagaggccactgggactgagagggagttctgatggggcttggaggaaggctataaggactatgcacctgacccaacaagagtactggggtgggtggtttcagtgagtcccaggggaagcccagcaacttctatgcagggtcccagcctcatccctttggagacttcgtctctgactctttcttcccacctcccctgttctctcacycctcagcccctgatgctccctacacccactggaagcagaccgtcttctacttggaagattacctcactgtccgraggggggaggaaatctacgggaccatatccatgaagccaaatgccaaaaatgtggtaagtgccgagggacataaggacataagggagaagggccccacagagctggctcgctcaggacccacttgcccgggttcttaagtgtctcatgaacagtcagaaacttactgaggcaggcagtcggtagccacatgtggacatgactaggcctaattgagggactcaggcttgacccctcaaaactccgcaaatagaggttttccctgggtccaattctggactgccttggctttgaagacagcttccagctcttcctgtgaggggctttcaaataaatgggtcctacctcatttagtaagagctgggccaggagataagctcctggtggctggaggatgtttggcgtgcatttcttcagctggcctggtgcgagggagacttgctggcactttcggggcagccccaggtgtgggcatgagcgctaaaarcgtctgcagagtgctctgaaggtcacctcacagaacacttaaccaccccaatcagtttacttccaggaygaactcggaacgttttgttattagagcaggaaggatttagggagaaatggaagaacttcctgtgaggacaaggaggcagcagaatggattcctgtgggctgttcaggggaaccccttagccagaaagccttaagacgctggtgctacccatccctgtggttccaggagcaggtggtgccagagagtggggctgtggcttcrtacccagacggccgcctgacccttcgctctctctctgccttgcagcgagacctcgatttcacagtagacttggattttaagggacagctgtgtgaaacatctgtatctaatgactacaaaatgcgttagcacacgtgggaagctgcagagagcaacgagaaaaggaactctcacctcgatctgccgtgccgtcccaaagaataccstttgcaggactacacacttgaaaaccagagttttcaactctgccttgaagattggtgaactccccagggctcccgtgggctctgccactggacagaaggcctccagctcctccgctctgccctggtagcccttcacgaaggctttgtgttgccaacaaagagcgacctggcgtgctgtggctgggccccgagggtggaaacgtattcgcgtctccccgtctcctccttaactgtgactctccgggtcttctgagttttgcatgctgcgggtgtctaggacagattgcttccactagaacctggagacatagcatctttgatagcataagccagattatctgtgtgtgcggtggtgtgcgtgtgmgtgcatgtgtgaatgtgagcagcatagttgatatttacccacaaacacctgtatatgcgtgcatatacaaccaagtgggtagacctaggtgttctctcagaggggtgtgtgtgtgtgtgcgtgcgygtgtgcctagaatatatattactctcagaggagattctgttgcttttgaataggaatttgttttgtgattagttcgccccttccccaccccttaccagatgttaagcagctatgaaacattctctgtactagttctggtctccttttgactggactgtggctctgaaccttgagcatagtaccacggactccgtgggcgctcaataaacacacatgagaacaaactggtgggatggctggttcctggtgctgtgaagtgggagggctggggggaagccagaggccatgatggagtggagactcaagggcagcagcacctacgtgggttcacgtttgctccccagcagggaggtcagggctggtctaagagcatctcccccatggactctgaggggtcctaccttagagggtaaggaggtcatggagctggggtgggggacaggagctaaccaagagtgtgccagaatggcaggccatgcatagcctggagactgcttaggataatgtccagccttggtccgggcgtggtaacagcggaatctgtgaaggatggaaatgcaatgtactttgcagggcgtggtggartgttttgatttggtctggtcttgggctatgctttagcttccaagaccatgattctcatctatgtcacctacctgggaagagacattccaggtgggggaaggaagaggggccatttagagatgatgggtggagctgatgggatccaggaagaaggaagatgcaggggagacctcgggcctggctttgcgtggttggggagtgctggtgatggcagagcccctggataatgataactgaacccaatagcaatggcctctgcacttccataaacttctgatgtccatggactctgtcaattccatgaagccttgggagttacacgcagaggccttaccccagccatttgctagctgaggtgggccaaggtctcaagtcccagttaatgtgccctcccctgccctgcactgattcttccaagcctcaggcccagaggctaagactgtcttttttatacctagagaaaaacacagtgaaaattatttaatgctttttgtgtacatgtattgggaagaaaaatagagaaacttaagagggcacagaagcaagtgtattagaggagagaggagattgaaggaggacattggagtggggactccctcgggggcattcgagaactcaggagttggtttccattgtagtgagagttggggtcccctggattctgcctactgacctggtttaactttgggcaggaagctcattcaacctggtgtaggatcccatccatggtcaaccagcaaaatcccacattgtcaggagcccagtggagcggtcaagatgatggcctcctgggagctccaggcatttgggtcctgcaggcatccctgacactctgggacctggggaggctgctggggcaggaggcttaggggaggaccagaatgagcaaaggcccagcaatctttcgggcctctctgaccatcagaggagaagagggccatcccaggggcctatcctgcacccacccccatctttagctttctggagtggtacaagccctgggctgccccaccaccacccctccctgcccctgggctgcagaagggaagcctgtaatgcataagggatcaattccacagcagcctcctcccacctgctcaggcgaatgctccagtgggaattatttccctccgattcagtgggaaataagcaatctctgctttgaacagcctctgaatggaagtcagtgcatgagatgcggtctcgaatgacaacagagatgctataaagatgacttcactgataaaacctgttttttcctcgactctttgcctcttttacatttttgaggctgtacaaaaccctttagagactttctcgcctgtcactcttcccctgctctggggaactttgcccttctattcccaactcccttctcccaaaatgtggtcctcttttgtgattgcatctgggcttgtctgtacagaggccactctgtgcttgttccgaagtccacggaggcatggtttctctcccctcctaaaccacaagctccaagggcggagacctgcctggagagagcagggtgcgggtggctggtaacagagtggcagctgacccagcacttgcttgatcccatggaatgtgcccatgagcacctgccccccacccaggacctgcaggctccagcctcttctatttgtgctccttgggagatgccaatattttttttactttcataaaaaccaccccatggaggccatctaccctagatacacccaagcctctgtcaactctgtgggcggaaatgaggccttagccaggccctccatggacccatctccgaaggctccctctccccttgacgtcatacctgcaatcccacctatagactccacctcacttcagacctcagtagtggcatgaaattaagccagacatcttggcccgtctctgcaccgtgttcacctggcctggaatctgtccctggcctaggggcagttctgatcacccggcatgtgccctgccttgatctccttgatctcacatagtatggggactctgtcttgtttttgcaaatcccctcactaccacactgacggccccagcctggttttaggagccctcttcctgaagaaacatttttcaggacccctgctacctgcctgggttcctgactagcatctctttagatatcttgtttctgagtacagctctacctgggggcacctagatttccctagaccgccaggctgtggcatattatacccagactcctattttgttgtctggtgacttccaacataagtctgacttcccgaggacaggtgatctcctcagtacgtgtctaaccgtagtggatgtgctgagctccaggcctggagcctccaatgtccccgtcccattggaagcaattagtccatattcagcaaaggctcagacacaacacattccagtattggatacttaataggctccaggcactgaactaggtagcagcagtatagcagagacagcaggcatcatggaactctgtggttattagtgtctagctaggctgggcctgctcttgcctaaatttcaagaaagtaagttccctctgccattgcctaccagctccagctctacccatctcatcccgagggccagccacagttcttagcccagctctgcaacacaacctctgtcagagggggtggtgagccatgttgcttgttggcttatctcagtcactaagccctagaaacagaaagagaacgtgcttgaatttcctgctatctgtgaattccatggtggggtggggggcagcctgtcattttcagagaatgacagtgctccgggaggcccagggccctttttaaagctggcagtaagtcatttctcacaacagaagtgccaaagagagtgtgccaaccattagctgacacttaaggctagagagcagctggagcaaacggggcagagaaagccctagcatgcgggtcaccagacccaggctcctgctgtccccatttccaaaggcaaccatcagccgccacacagctctgctgcatgacatgagttttggagccaaagaacctagtcaactcccggcactgctgcttactaacgacgtgatcttgggcaagtcactgtgagactctatatcttcttctgctgaaaaggagacaactcagaatgaaatgaaatcaatataaaatgtgtttaaaaaaacaaagcacagtgaaattctagtgataactgctgcttcaatagccattctgctctggattgcaattctgttcttgagaagcacatttagatgacgaagtggaggcccatgggtctgcaaaggccctgagggcagcaggcaccacagttggagccaagggcagcagcggcccaggctcctgggctgcagggcctggcccagagtttggggcagcacttcaggtgactcacttgcagagctttccaaaagccctgggcagaagtggcctgcttcagggctctggttcattgactcagggcttcaaaagtggcttgtggagatcttaaagcccatctcctagccctctggcatgctgtgactaactggcacccatgtatgtccttccatggcaccaataggtgtatgtctttccattggaatgaaaagatcctcagttggagagaagccacagacccacctggggcactcgggcagggcttcaccttctggctgcctccgcatccatttcaaatcacaagaacttgctggtgaccttgaaaccgtgcctagcgtgctaggcccagtgcctgctttgcataccagggagaagagcagaagataatccaaagtgttattttactttggaattcaacacatgctgctyttcctgggagaattattcctttagtcatatttagtttcagttaataatatattgaatttgtattcttggagaacctattctctttgatgaccggagttagtggcttggaagcacattctggggaccggccaggggaatggggtggggactaggctgagaacctaatcttgatggcaataacagccgcatcaatgcttaagacttgtttggctacatttatcgggaaattaccaaccaaatccccactgtcagaaattgccattaatatgtcagaggcatgcaccactatggcattatgagtcagaaggcaacaggagaacagaactgtaggggtccttctctgtgctcagggaaggactgggcctcccaagaaaacatctgtgcaggaatgaggagcaaaacctagagatgtggaaatagtgtgttgcacacacagctgtatggtctgtatggtctgtatagtgtgttgcacacacagctgtatgcgtgtcaccacgaaacatggaagatctgtttggaggcaggagggaggtacactcactcagcgcctgttacctgcatgctgggcacggcgcgcagatgatgctacttctttttcagcatgaggccaggttctggacccagttggaaccaggagtgctacatgagtggtctctcctgacttcctccatgtcatgcatatttcttgggtgcctcctgtgtagcagacttcttgctaggtgctgggaacgcagcactgaacaaaagagatgccagcctactgtcttggaatttactggctgctggggaagcagacactaaacaagagggataaatattatgaaaaggaagcagaggctgagggagtaagagactgttatttagagactgagaacaagagagcttccctgaagagaggactttaaacagagccttgaaaaactggaagaggaggggagggagagatggagggaggatccggcaaaaacagccagtgtcagggcccagcccgaaggagtccagagagcttggcacagctgaaaaagaggagcccgcagaggaccaggggagaacccagagaagggaggcctgagatacagtctgggttccatggtcaagggccttgcaaactatgtcaaggacacattttccttaggcaatgagaaaacactgaaggattttaatcaggaaagtgacaagacaagatttgcatgccacacatgctyaccagctaacgagctcaatttggcagttgtttcccttgaaaaatggyaatacgcttaacccactgcctacttcagaaaatcaaccgcagaacaggtcatccgtagcagcggcagaacctctaggaaccatgagtgaaggatggggactgaggcttcttttggttgctgttgttgacaatggcttgaatagattgctgcgttttaggattgccttgttcacccggaggaaatctgcaaccggccaatttgtgcaactctgagatcatttgcatcgtcctttctggtgtcatgtcatactgttcttcccaggaggacagcctcctcctggctcagagtatgtcatcgcctgggagggggaaggcagttggaagggttggtgcaaggctggatctgcgtttggggattgttcttgctgcttcaagcgctgggcagctgtttccaggggagcagaatgcttggcatcactttcaactcacggaacatattcttgaagcacctttcagaggctccgtgggttgtaaygggtttctgatatcatgacaactgctttttggccatggttggttagctccgttggatagagcatcgaacttcaagccaaagtcacaggctacatagacacgcagctctgtttca

SEQ ID NO: 95200 - DNA, 17861 bp, Homo sapiens
agatctgatataccataaatggacgtaagaaacatcactttgctttcttcccaaatctaacaaaatatgtctctaagcacctcttcccccgtgtggtgaggcattgttagttttgttaaactttttaagctgatgtcctgtccaggagcttctaggagtctcaaaaaactacaaagttcagaaaacctggggaagaccttagagcttcagcctgtcatggtcatgcctgagctattcagacagtggttattgcccaagctgacgtggtcattcaaaggcaggaggctccttttccaagctttgttgatgcccaaggcagggcaatttgtgttcaatttctccaacaactacatgccatccaagagacttcttgccactgccctggaccccacatgggagtgagatgcagagtgctaccagtcttggaatctgctaccattatcaccctagatatgaccaaatttgcctcgttaatacccagcggcctcagaaagtccctccccagcttatcctctctcagtggaacttgttttccaaacaacagcctggataggaggtagcattctggaagcatggcaacttgtgtttcttccaggaaatataaatgctattcttgcaagagttttaaatctttttttaaaaaactgtgtaataaaagtgaccctaccaaaagaacactgtactgagatattctttctagttaatttttacatggcttatatgttatctgaatgctgctcatgaagctctgtgaaaatatttcgcttatttccattgaaatttaagagaacacagatctgggtacagatgagctgcagaagaaagatgatgataaagtaacatgactgcctcaacaaatatgacagagttcatatatgcagatgaatgaggaaggcttcaaaataatcacccttactttagtaattccactatcgattaaaatatttttggaacttctctcttagagtccccttcaaggcctaaaacacactcctctctttctccctccctttctttctcttattttctcttatctccctgagatattcgttatagcttatgtcttattttgttttgcctctgtttcctttgagttcttcttctcgaaatgtttcttttgatattaatgtcactctgtctttcacaatagtgtctttcatcaagtatcctccactgattgtgtaagagtaatacaaagcaccaaggagctgagcagaaaatctgtaagcctgggtacgtctcaccacaggcaattgatcaagactggccatttcactgtgggccccaaatattaatatctataggtcttttctcctggttcagacatttactccagagaggatcctattggctcctgcctgggaggtggttttggcagccagacatcaaggagctcagttcaggcaggttgagagctgggtgactggcttactgctcagaatgcagatttgcatttaatgcccctattttcattatggcattatcccctgtctttagtcatgccttgagtcctaagtccagagtctttggttcatcctctccaaagagtgatcttctcatccttcttctagggtgggaaaaggcagcaacctggtttcctggtctgggggagaaaatctggggcttaactgttccatatacagatttccaacctgtcttcctgtttatagcactgccgtgcagtcctgccttcagaattactgagtttttttccaggatctagggcacaaactagtttgctttgtattgatttccctttttccaggcactcaggtgtcagctttctccattatcctaagttagttactactcaaccactctgtattataaacttttattgacatttctcatctattatcatctcttctgcttttcctttgcccttattggtttataccttttcaaactccttttgttgatactttaatggaatttggaaagtgaacagagagaaacctgtgtgcccatcccaccactttcaacagaaggcctagtggcttatgattgtaatcacagcactttgggaggccaagacaggaggattgcttgagcccaggagttcaagaccagccttggcaacataacgagactctgtctctacaaaaaatgaaaaattagctgtgtgtggtggtacatgcctgtaggtgggaggatcacctgagcctgggaaatcaaagctgaaaaaacataattgcactgcttcactccagtctggacaacagagtgagaccctgtgatatagtttggttatttgtgcccatccaaatctcctgttgaattataatccccagtgttggaggtggggcctggtgggaggtgtttgggtcatgggcgcagatccctcgtggcttggtgctgtcctggtgatagtgagtgagttctcacgagatctggttgttgtaaagtgtggcccccgccaacccccggcaactctcttgctcctgctccaccacgtgaaatacctgttcctccttcaccttcctccataattgtaagctccctgaggcctctccagaagcagatgctggtgccatgcttcctgaacagcctgcagaaccatgagccaattaaatctcttttcttataaattacccagtgtcaggtatttctttataacaacataagaatggcctaacagagctgcgtgcagtagctcctgcttgtaatccaagcattttgggaggctgaggcaggaggattgcttaagtccaagagtccaagaccagcctgggcaacacagcaagactgtgtttctactaaaaatttaaaaagttggccaggtgtggtggcacacacctgtggtcccagctactcgcctgtggtcccagctacttggaaggctgaggcaggaggattgcttgagcccaggagttcacgctgcagtgagccaagattgtgcccttgcactctagcctgggcaacagagcaagaccctgtctccaaaacaacaaaacaaaacaaaactggcctaacaccctatctaaaaacaaaacaaaacagagggctatagcacattctttagaatatcttaaattatggcaaatctccatcttttcaggatggttttagttttggggaatagtcaaaagtgtgagaaacccttggtcaaattccctttcctaggcctgaagcccccaacactcaccataaataattatttttctctatcttgagaaacaaataagttgagtaaatcatgactattgcccattgtaatacaacaaagtaatctagggtctgtaagcaactttcctaaaaagataaaatgcatacattgcatcaaaaagaacatgcagtacatacaaaatttctgaggaagaaaaattatctctgccctcaaatcatgcttacttgctattttatttttaaatagattgctcattaaacctacctcaaatggaatgacaggattataaatggatgttataactgcccttaacttcttccccaggggagataattaaggggatcaaaaacacttcttccctttgcagtagtcacatgataacatgctatcactttggttcaggttggcaagcaaatatttgcttgttccacttccaagaaagtataaggtcataactatttaaacatttgaaaacaaaaattaatcttatcagcataaggctgaaaccagcatatgtaataactggctgttctttagtattgagttgggaacggcataaaggggaccaaagactaactctttttttccttctttctttcttttttttatttttgagacacagtctcactctagttgcccaggctgcagtgcagtggcacgatctcagctaactgcagcctcaacctcctgggttcaggtgatcctctgaccctcaacctcccgagtagctgggactacaagcacatttttaaatttttttttatttttagtaaatatagggttttgccatgttgcccaggctggtctccaactcctggtctcaagcagtcctcctgcctcggcctcccatagtgctggaaatacaggcatgagccactgcgcccagccaagactaactcttttaattggtttctgtctctttgggtcctgaaaatctgtctcactatttattattattattattattattattatttgagacagagtctcactctctttcccaggctggagtgcaatggcacaatctcggctcactgcaacctccgcctcctcggttcaagcgattctcctgcctcagcatcccaggtagctgggattataggcacccaccaccacacccaactaatttttctatttttcgtagagacggggtttcaccatgctggccaggctggtctcgaactcctgacctcaggtgatcagcctgccttgggctttcaaagtgctgggattacaggcatgagccaccgcagctggccattttttttttctttcttttttttttttttttttttgagacagagtctcactctgttgcccaggctggagtgcagtggtgtgatctcagttcaccacaacctccgcctcccgggttcaagtaattctcctgcctcagcctcccaagtagctggaattataggcgcaccaccacgcccagctaattttgtatttttagtagagacggagtttcaccatgttggccaggctggtcttgaacgcctgacctcaggtgatccacccacctcagcctcccaaagtgctgggattacaggcatgagccactgcacctggccctatttattattgaagaatcaaaattaggcctagcctgaaaaatgagattattcttgatttttgaacagggtccttgaactgtcatttaaaaccaaatctggtaatctttagaggccactgatgaaaaataagggtaactacaaagtgatgacactttgtgtggctcagaatctgtcctcttaggcagatacagaagtgcagttctttttgagttctggtagcattgttttaaaagctgtgcacagcctcctgagattgctattttcaaaggtagcatttagttggatatatgtttgggtaggttttatttttaaaatgctgttgctttctaatgaccccttatgttctaatatggaaaggggaggcaaagtattgtgaaaagtagttggtaaagtaggccggatgtggtggctcacacctgtaatcccagcactttggaaggccgaggcgggcggatcacgaggtcaagagatccagaccatcctggccacatggtgaaaccctgtctctactaaaaatacaaaaattagctgggcatggtggtacatgcctgtagtcccagctacctgggaggctgaggcaggagaattgcttgaacccgggaggcagaggttgcaatgaactgagattgcgccactgcactccagcctggtgacagagtaagactccatctcaaaaaaaaaaaaaaaaaggtagttggtaaagttgttcacatgaaccttatttataatagtaaaacactgatttataataataaaaaatttgctatagtaacaaaaagagtctagagtaagaaactagctgagcaacgtggtgtcacactatacacccattaagacaacaggcacatgtgtcatgtccattttgtggaaaagatatgtaaaataattttaagtaaaaaagataaatataaaaaagtgaatgcatacaaaacaatttcacaaaattgaatgttactcaaaaatcacagctcattttaagctgcacaaaatagtcatttttttctttataattgctcaaattcataatcaaacagaagaaagttcctgtcttggaagtagtgctatgccccaattcttccagagccagtactttaaacaattccatttcattattttcctgtagactaattcttaggacatcagcatatctctcttcaagcattaaaaaaatctctttagagtcagtggatcaatagacagttcctgttttccacacaactgaaagggtggagcccccaaaccacaaggggaagaaggaagttaaaagatgttaaatactggggccagctcaccctggtcagcctagcactctgacctagcagtcaayatgaaggctctcattgttctggggcttgtcctcctttctgttacggtccagggcaaggtctttgaaaggtgtgagttggccagaactctgaaaagattgggaatggatggctacaggggaatcagcctagcaaactgtaagtctactctccataattccagagaattagctacgtatggaacagacactaggagagaaggaagaagaagaaggggctttgagtgaatagatgttttatttctttgtgggtttgtatacttacaatggctaaaaacatcagtttggttctttataaccagagatacccgataaaggaatacgggcatggcaggggaaaattccattctaagtaaaacaggacctgttgtactgttctagtgctaggaagtttgctgggtgcctgagattcaatggcacatgtaagctgactgaaagatacatttgaggacctggcagagctctctcaagtccttggtatgtgactccagttatttcccattttgaacttgggctctgagagcctagagtgatgcagtatttttcttgtcttcaagtcccctgccgtgatgtgggatttttatttttatttttattttattttattttatttttaaagacagtctcactgtgtggcccaggctggagtgcagtggcatgatctcagctcactgcaacctctgccttctgggctcaagtgattctcgtgcttcagccttctgagtagctgtgactacaggtgtgtaccaccacacccagctaattttttgtattttcagtasagatggggtttcaccatgttggccaagctggtcttgaactcctggcctcaaatgatctgcccacctcagcctcccaaagtggtaggattacaggtgtgaaccactgcacccagccgacatgggatttttaacagtgatgtttttaaagaatatattgaattccctacacaagagcagtaggaacctagttcccttcagtcactctttgtataggatcccagaaactcagcatgaaatgttttattatttttatctactctacttgattaactatctttcattttctcccacacaattcaagatgtgccatgaggaaaagttattttrtagtttagtacatagttgtcgatgtaataatctctgtagttttcagattgaattcagacatttcccctcaatagctatttttgaatgaatgagtgaagggatgaaatcacggaatagtcttgttttcaagattctaacttgatatccaaattcacctttagatattataagaaaatttctatcagaaaatccttatgtttttctgattaaaaaaagcatttttccatcagcctatgtatctgctatgaatttacaaaatctactcaacagctctgttgatttttctgttcttggctgaatgttgcctgagggatgggagcacgggaagggtaaaagcaatggaasaaacatgtattttaatattttaaaagtatgttatattgttcgttggtgttacaagatgatttgcattacaaaaggattctcttacaagtcccttatcttaacactaaagtgctaagatattttataagtaaatctttatacttataaaacaaatcagtaaaatagaagtagctaagtagaactgattttgctatagagtataagtcacttagtgttgctgtttattactaaaaataagttcttttcagggatgtgtttggccaaatgggagagtggttacaacacacgagctacaaactacaatgctggagacagaagcactgattatgggayatttcagatcaatagccgctacyggtgtaatsatggcaaaamcccaggagcagttaatgcctgtcatttatcctgcagtggtaagacaagctaatatttgaccaatctggttatacttacaagaattgagaytcaatacaaatgaaaaagccttgaaaggttcatgagggacctagaaaaactacatctcaacttccagaaagtcattattattttcctcataattccctgagtaagaaattaaagaagtggtatcataaaaggttgatgttttttaatatacagaagtttctggaatgacctattaatttactgtcaatggccttactgatgctttgtccagaacaatgccattgctcctgcttactttggggaggttttgggataatttagttgtatggtcctttttcaattgttttacttttttttttatgaaatgttctaaatgtatagaaaattagagacattagtataataaacagccatatgcccattatgcactttaaaagttgttaayattttgccatagttgcttcttctatgcctttttttttttttttttttttttttgctgagagttttttgtttggttttgttttgttttattttgagacagggtctccctgtccccaggctgtagtgcagtggcaccatcacagctcactgcagcctcaagtgatcatcccaccacagcctcccaagtagctgggactacaggtgtgcaccaccatgcctggcaaatttttgaaatttttagtacaggcaaattctgtgttgcccaggctggtcttgaactcctgagttcaagcaatcttcccacctcagcctccttaagtgctggaattacaggcgttagccactgtacctggctactgctgagagacttttaagtgaattaggaacatgatgatattccatttctaaattctttagtttacatcttcaaaaaatacagttcctgtagaattattattgtaaataacaaattaacttaaggatttatttatttggagtgaaacaaatattttactgaactcataaaaatagaaataccatgtggaatcctcagtgtcaaaaatattgcagaaatcttgcaaagttgatattattaaattgttaaatattaaaattcccaataaagaacattaatcttatttytaaaatccagttaattaaaaaaatttatattatataataatatttggtcattaaataaaaattagaaaatacaaataagaaaaataacacccataatcttactacccagaggtttataaccatgggtaaattctggtatatattcttccagaatgtatatcaatcatgtgtatgaatgttaaattatatcatacacatataaacccacatacaaacatgtaaatactgtgtgcttttgcaaaaattaaattgtattatacacacggctttacaatttgcttcttatcacacaaaattatttgcatgtcagcaaatacaaatcggtttttaatgatcttttgctccattttccagatgagaaaaaaatacaaatctgtatcatcattttaaaagaatgactagaattttaatatatgaatattctataatttactgatccaattgttactattgagcacttaggttgtttccatttttccctcataaattgctatgaatagctttttgtatacatctttgggtgcatttcttatttcttttggataaattttcaataatagaactgctgagtaaaatatcactaggtgtttttttacagtgtctagtgcaaagaagacctttaatcattttgttaatacttccagagcttccaatgactttggtaaatgamgaaaaaaatgcttcatttcatgctgaatgggagagaatgaagagagttttccccaacaatyacacatatatggactcatagaaaataatatcttaccattctttccacagcctaacagaaaaaagctggctaaacctaaatttaaaataaaatatctattaaagtttttattccttaccacctgtctttcagctttgctgcaagataacatcgctgatgctgtagcttgtgcaaagagggttgtccgtgatccacaaggcattagagcatggtatgttttaagtgttaaaagggaaaactatcttactctactgttgatatatacaatgagagcagacttttaaagaccaaagtatgctaatgacacctcaaaattgcagcttttggcttatgctaaatgatgtattacctacatccttgaagaaacaatctactttaactgatccagaatcttactcttttactcctcaatttattttaggggatttctagagttttaagatgcttcacactctatcagttccttgtcatatcttgaaattctttttagaataagtaagtgtgggccgggcacagtggctcaygcctgtaatcccagcactttgggagaccgaggcagatggatcacctgaggtcaggagttcgagaccagcctgcctaacatggcaaaaccccatctccactaaaaatacaaaaaattagctgggtgtggtggcaggtgcctgtaatcccagccactcgggaggctgaggcaggagacttgcttgaacccgggaggtggaggttgcagaggattgcgccattgtacttcagcctgggcgacagagtgagactctgtctcaaataaatacataaaaaataaacgtggaattcactttgcagttgctgctgtacaacgcacattactcaatctttatgttcggcattctatgctctactgagaaatttgggtaggagtgaagtattttgtatacatatcttcatttaataaatagcaatagctgggtctatcttactattttatctattgataaaatattttgtttccccaaggagtgcgaagtatgtatattacaatgaagatatgttttaacctttcaccatttgcttcatctttttctacagggtggcatggagaaatcgttgtcaaaacagagatgtccgtcagtatgttcaaggttgtggagtgtaactccagaattttccttcttcagctcattttgtctctctcacattaagggagtaggaattaagtgaaaggtcacactaccattatttccccttcaaacaaataatatttttacagaagcaggagcaaaatatggcctttcttctaagagatataatgttcactaatgtggttattttayattaagcctacaacatttttyagtttgcaaatagaactaatactggtgaaaatttacctaaaaccttggttatcaaatacatctccagtacattccgttctttttttttttttttttttttgagacagtctcgctctgtcgcccaggctggagtgcagtggcgcaatctcggctcactgcaacctccacctcccgggttcacgccattctcctgcctcagcctcccgagtagctgggattacgggcgcccgccaccacgcccggctaattttttgtatttttagtagagacagggtttcaccgtgttagccaggatggtctcgatctcctgaccttgtgatccacccacctcggcctcccaaagtgctgggattacaggcgtgagccactgcgcccggccacattcagttcttatcaaagaaataacccagacttaatcttgaatgatacgattatgcccaatattaagtaaaaaatataagaaaakgttatcttaaatagatcttaggcaaaataccagctgatgaaggcatctgatgccttcatctgttcagtcatctccaaaamcagtaaaaataaccaytttttgttgggcaatatgaaatttttaaaggagtagaataccaaatgatagaaacagactgcctgaattgagaattttgatttyttaaagtgtgtttctttctaaattgctgttccttaatttgattaatttaattcatgtattatgattaaatctgaggcagatgagcttacaagtattgaaataattactaattaatcacaaatgtgaagttatgcatgatgtaaaaaatacaaacattctaattaaaggctttgcaacacatgccttgtctgtttttatttagactcctatagtgtctctgaagaaaagaatacagatatttgaaaaaatatgatttggtgctcttaatatctcttatatcgtcacttacctcacttaaatagtcagatattgctggagaaaaattcacaagcatgctgacaggtctcactttaaattcataaccataaatctcaaatgagccctcaagtctgcctgaccattttagttacttctctacaatccttccatttttatgtccctagtctccaaaatgactgttactattttacttttcctcttctctcttcaaagcctcaagacacacattcagcctcctcctctgcccccttatcctccaccctcctctgctctcagcagataacctggcctcatattacacttctaaaacaaaagcaacttcataccaagctttcccttctacatcccaaagcagcagtcataccttcccacaggcccatccttccttccttccctcctattatcaggatgaagagcctctgctcctgccaacagcactgactccacatgcagtttccctcccatccctctcactactccaagtcaggctgtttcctgcatccctagtttgtcccttttagctggatcacctccatcattctacagtctgccctagtaaccttccatcttacaacaaatactccactgaccctacataatcctccaactgcaactccattctctgctccctttacagcaagacttctggggaagtatgtctgtacttaccaactccatgacctcacctcccagtgtcttttcaaccctctctaatctggcttctatcctcacccagctgaaactgctcctccaggatttctcccatgattcctcagtgctaattccagtgatcatcttgttcatctcagcagcatttgacaaagtgaaccgcttcatacttttagcagttttttaatcccttggcttttccttatttacatcctacctcactgactgttctttctcagtccttcttgctcactctttctctgctatttaatttctaaatgtgagagtgcctcagggctcaagtctataataattttatatactacatattttacttatttgtctcttctcaccaaaatataacttccaaaatgacagaggtttttccactttttaaaaaaacattgaaataaactcaatcttttaaaaaatataaaagtactgtacaaagatcttttatttttcagaactgttttgagagtaaatagccaacatgatacccaatggccctgattacatcagtgtgtaattcctataaagacattctcctgcataaaacctcaaaacaattatccaaattaggaaattaacactgatacattactaccacctagtcatcagattccactcaatttcatcgattgtcccaataagaccttcataacaaaagcatctaattcagaatcatattgtatttggttgtcatgttttttaagtctctttgaatctggattatttcctcagttgtttctttctggactttttatgaccttgccacttttgaagaccacagactagttatgttatagaatgtacctaaggtttttctggtgttctctcgattccattaagttatgcatctttggtaggaataccacagaagtgatgttctcactgcatcctttcaggtggcattcagtttttgcagttttgatttgccccattattgatgatgttcacttggatcacttgattaaggtgaggcctgcaagccatcttcactgtaaagtatttggggaggaggtgccttgagactactgctcatcaaattttcagtttgtttgtttatttatttagaggcaggatttcactctgtcgcctaggctggagtgcagtggcgcgatctcagctcactgcaacctctgcctcccaggctyatgcaatcctcccgcgtcagcctcctgagtagctgggactactcgcacgcgttaccatgcctggctaatttttgtatttttagtagagatggggttttgccatgttgcccaggcttgtctggaactcctgagctcaagcaatctgcctgccttggcctcccaggtgctggattacaggtgtgaaccaccgtgcctggtcatgcatttatttattatatcagtatggacccatggcttctattttattcaaatcataaggagttatagtccattactattatttattttgatgttcacactgtcctcgatttggccagtgagcccctgcaagttgtcttctgtgccatttcgacatatttccatcattcttcaagcactttcttgttttctggcacaagatattctaaggctcaccttgttccttccttgcttccaaaaatggaaaaggcatttctccaaggagccctgattcctcaaagtgcataatagtattaaaaaaacaggatctgggcactagggtatcactgtttccaggccctatcagtgaacagagctggaagatatatgtatttacactatatttatctctatatctatctatttatattgaaaatcatgaatccacaccaatatctccaattctaatctcacaccacaggattcactctagttttcttctttcgcatgttttaactctcttctctgacagtaagtaacttagcatccattatactcattatccttaaaatgtatccttagtacatttacgtatttgatgggtttgcctgtatgtaaccaattccccaactctgcccaagtgctctccactcaggctctgacatccctcagtgggttgcttccttccccaacacctggacaccctccttaccatgatacatctctgattttataatatgctgaaccactgtcctgataggaagaatagaaatttttcactcattccacttctgtattctaaacacctagaagagtgactggaacatggtacatgctcaatcaatatcagttgatcgaataaatctcttgctgattatttagtatgttccctccaaactgaacattctaagctttttgtttttgagacggagtctcgctctgtcacccaggctggactgcagtggcgcgatctcagctcactgcaacgtccgcctcctgggttcaagcgattctcctgcctcagcctcccgagtagttgggactacaggtactcgccaccacgcctagctcatttttgtatttttagtagagagggggtttcaccatgtcaggagatcgatctcctgacctcgtaatccgcccgccttggcctcccaaagtgctgggattacaggcgcgagccaccgcgcccagcctttttttttttttttttttttttttaattaactcttcaaggccacatgattccagtacaaccgcttgcggggttccaagccacttcttggctatgtaaatgcagcacatagactagccatgtgagggcagcagagggccactacataggtgcaacctttggcttcaaaattcttggaccattctgacgtgattaaactaaaaacgaatgagtttatgcatatcgagataccctgaggtgtacaaaggatgagtcaaggtagcggagagagagttgaagagtgacagctgagaaacagagataggacatgtccaagaagtgccaggataacccaacaacacaggctgattgaggaaactgccagagattagacaaagtagactgaagagggaaagcaatgtttgttggagattttgctttagtttttgataaatatttcttagtcataccaattgttttaaatataattacgcccccaaaccaaatttctactcttattctggcaacagaataaaaatcaatatcaatgtttgatcattttcaaagaaactcagttcctatcttggttgaaatgcagtgacatccatatgacaattgagctcttcatgtggcactaatataactaagccctgagcacatcccttgcacttctatttagtgaagtcttttaaaaagtattttctttacagttgttaagtggaattactaaaaattacaatcagcagtattttctactcttttagcttattttttaaaatatttatctccatgcttttcaatattacacctatattgcttcttcttgatttttccattttaagatactgacttcctactatggaagttaaagattaagctctatttcctcctcctccatccccatcaagcatagtacccttctccaaagcccatccttctaaatgtaattctttttttgagggggaggggggatcaatactcagtttttttttgttttgttttttttttttttttgagacggagtcttgctctgtcacccaggctggagtgcagtggtgcgatctcggctcaaggcaagctccgcctcccgggttcacgccattcttctgcctcagcctcccaagcagctgggactacaggcgcccaccaccacgctcggctaatttttttgtatttttagtagagacgggttttcaccgtgttagccaggatggtctcgatctcctgacctcgtgatccgcccaccttggcctcccaaagtgctgggattacaggcgtgagccaccgcgcccggccaatactcagtatttatgtaacaataaatacaattactttcctttcttgcacaagattttgttttccctagaattaatagctgcataattcttacagccgcttagttttctgtgtacctgtcatgagttaaactccaaactctcggtcaaatctcctcttgattcaacgccagctggaattttgtcaatcccatccttctgaagcagtgtctcccaaagatttctgaccgaatctaatctagatgcgttgccgtctatgcctatacacagctattgttcccggagctctttcagtatcatcttgggatcttactattttctgtgtttgttatttattgtatttcctgcatttcataatttcctccttcttggcttattccctcattttggtggatcagatctacaggatcttcctggaggtactgagaaaggtaagataggtactattttttgtgtgtagtgatttagcacatctgaaactctattctattcacacactagattggtagttggatgagtattgaagactaaatcggaagtaattttccctcagagttttgaagacagtgccgtatggcttcctagattctaactgagcaatctgaagccactctgattctatagtctgtataacctggaagggtgtgggatctctttttcctcgatgttcagaaaattcacaatgatatgccttgacgtggatgctttaatatttgtgctgggtgcttagtaggatctttcagtgtggaaactcatctccttaacatctggacaactttctgaagtcatttattatttcctgcctttcattttttttttggtttggaactcctgaactggtcctgtgatgtgactgcagccgccaggcgcgtgcgcagtgtacactgcgtgcgcatacgcgagcccgttgcgcctgcgcgcggtgccgccgtcgcccctcttttmgcggcgttctccacctgcgcgggcctgaatggccttcaggagcacagtcggcctgaggagttgatggttactcaccgccgtgagcccaagtaactcgccctccttcggctagaaaccctccgcctgggcccgcgcgacaggagcgcggtctctgaggggagcggcgaccccgccagccccggtctctttccctggcggcggcggcttcttccgtgggacaatatgttcaagagaatggccgaatttgggcctgactccggcgggagagtaaaggtcagtgcccggaccgcccctcttccagggtggctctcccgccccggttcctccctgcgcggcgcggggagggcccactgggtttcctttcgcgccttttctcctcgggtttgaaccgtggtttcaggttggagagcgagtcagagccattgagcgaaaaaccggcgttcattgggccccaacttcctcgcgtcactgccaactcccatccr

SEQ ID NO: 95201 - DNA, 44753 bp, Homo sapiens
  misc_feature (1)...(44753): n = A,T,C or G
ccagatcttgaggctttaggacgtccaataaaaatatactgtgattggccaggcacggtggctcacgcctgtaatcccagcagtttgggaggctgaggtgggaggatcacctgaggtcaggagttcaagaccagtctgaccaatatgatgaaaccccatctctactaaaaatataaaaattatctgggcatggtggcatgcgcctataatcccagctattagggaggctgagaaaggagaatcacttgaacccgggaggcggaggttgcagtgagctgagatcatgccattgcactccagcctgggcaacaagagcgagactccgtctcaaaaaaaaaaaaattagaaaaaatttatatataaatatactgtgatccacatatgtaattacaatttctccagcaaccacgttataaaaagcaaaaaaaagtgaaaattattttaataatatattttacctaactcagtctgtccaaagtattatttcaatatgcattcaacataaaaattattaatgtaagaatttacatattttttgtcttaagtcttcaaaatctggtgggtattttctgcttacagcacatctcaatgtagactagccatgtctcaagtgctcagtagccacagggggcccgtggatgctgcattcaatgacatggatctagagaaactggtggcagggccagtgtggcaggaaggcagagggacgagagtgtgaggtgctgccactcacctgggccagtccatggaaggcggtgtaagcatgttaaggatsttgaccttgaagctgagccactgatggcataaaacatattaaaagtcctgagaagttctgcagtgaaagagcccgttcttgcttgtttaactcagcgttcccatttttattccatgtaatacctaacaaggtcctagggccacacattgggaaatgctgctctacttgactacacttaaaggaagtcttgctgctaatataaacttaagcaagagccagttacggtggcttatgcttgtagtctcagatactggggaggctgaggcaggaggatggcttgaggccaggagttcaagaccagactggacaacatagtgagactctgtctctataaaaaaccaaaaagaaaaattagctgggtgtggcagcatacacctatggttccagctacttgggaagctgaggtgggaggaatgtttgagctcagaagttcaaggctgcagtgagctatggtcaaaccactgcactccagcctgggagacagaacgagatgctgtctcaaaaaaaaaaaaaaaaaaacacccagaaaaccccctgaaaaacccttaagcagttggaggtttcaggcctctcaacttattgaggggatagccaaggctacatgttatccatgagaccagggaagcatagagatgccgcctggtggaagcttggcattccctttctaaactttgtaggcagcaaataactcaggaggatccaagtgctagccaagagccaaaaagtaagagcttttcttcctttaaggtcttcccaagtcttacctgcctctaatggtctgtcctatcaatttgcttcacttaatactttttctcttctctgcacttggaattcagagttgagtaaactgtgcattcatttatatttgtcatttctttttgagttttctacagcacctagaacaatgccagaaatgtggtaggtattcagtgagtatttgaaggggtcatgtttgtattagttttttcaggcaatggtatgttttttttttcaggtcttctactaagtctggtcctctcagtccttcatcatcttttctgtatttgaatggggagaggccatgggaaaagcaccgatcttggaattagaggctgggtgccatggcttacacctgtaatctcagtgctttgggaggcccagtcaggaggatcgtttgcccaggagtttgagaccagcctgagcaacatagcgagaccctgtctctacaaaaacataaaagaaaataaggtcaggcatggtggctcacgcctgtaattccaactctttgagaggccgaggcaggtggatcacctgaggtcaggagttcaacactagtctggctaacacagtgaaaccccacctctactaaaaatacaaaaattagcttggtgtggtggtgcgtacctgtaatcccagctacttgggaggctgaggcaggagacttgcttgaaccctggaggtggaggttgcagtgagctgagatcacaccactgtactctagcctgggggacagagcaagacttcatctcaataaataaataaataaataaataaataaatagctgggcatggtggcaggcacttgtagtctagtagcttgggaggctgaggtgggaagatcacttgagctcaggaatttgaggctgcagtgagccataattttgtctctgcactccagtctgagtgacagagtgagacgctgtctcaaaaaaaaaaaaaaaaaagaaagaaatggaattagtaacccaacattgtgttccatccctgactttttaccaactgtgtgaccttgagcaagtcagtgaatgtggctgggtcttgggatcattatctgtaaagtgagatggttgtactaaatgatctctaaggtttattttagttttaacattgtagatctatgctgtccaatatggtagcaaccagctacatgtggctattgagcccttgaatatggctagtccgaactgacatgtgctgtaagtgtaaaatacacactggatttcaaaacaaaaatgtaaaatatctcaataatttttttatattggcaacatgttgaaataatattttggacatgttgggttaagtaaaatatattattaatattaatttctttttaaaaatgtttttacttatttatttgggtagagatgaggtctccttatgttgccctggctggtctcaaatgcctagcctcaagccatccttccactttggcctcccaaagtgccaggattacaggcgtgagccaccacacccagccacttaattttaatttcatgtgtttctttttacctttataataggaccactaggaaacataaaattatacatgtgccgctatggactgaattgggaccccctcaaattcctatgttgaagccctaactccctatgatgtatttggagatggggcctgtgggagatcatttggtttagatgaggttatgaggtgaggcaccatgatgggattagagttgttattggaagagacatcagcgtgttctttctctctctctctctctctctctctctctctcctctctctctctctgccatgtgaggacacagtgagaaggcagccatctataagccagaaagagggccctcaccagaaaccgactatgctggtaccctgatcttggacttctagtctccagaactatgagaaaataaatttctgtttaaagccactaagtctatggtatactgttctggcagcccaaactgaccaagacatgcggtttgtattatatatttctgttggacagcattggtccagatatctgggaactcctacataccagccagccttctggcacttgtaactttctgtattgtgtctgtgagagcacaggcatggtctccaggccagtgtttcctccctagcagctgctcaataagcttctggcaattaagtcattttcttggttgtaagaatataaacagtctctggataatgtatgtaaaagaggacctcattaagagaatattgggtaacaactggaatctgcagggcagaagaaccaggcttggaggatatactcaggcagacagcaatgtcccaaatcccactgcagactagtctgggggtgactccactgctgccccagagaaccagagctggctgtccattggcagagtggcgtgggtatgtgcttccagcctcattagtttccagttcagagttcagttgactgagtttgaatcggggactctagctgcaagagaggctggggctgggaaggtgagcaattgcttttgagcttttttttagtggagagttgggtcttatcataagcagaagatttattcctttaacattggaagggtctttagatgctgggctgccacataaggatggaaccctttccttgtgttgtctgagaccttgaaattttgactgcaacacagcagaagttccatcaagactcctcagctggaactcctccaggcgagaggctcttcagatctccttgttcttgggaaggatgaagcagaacagttgacatcatacattctaatgctacaattataatttcatgatgtcctttgaaaattctcgcatgttattttaatgtggagacacaggagggcactctaaccaactagcaataaaacctaaatggtttcatagccttggcagttaaaaaatagatgttgatttgttgaacctgtaaaacacaggtttttcatttacttatttatttatttgcaaaggagtttcactcttgttgcccaggctggagtgcaatggtgcgatcttggctcaccacaacctccgcctcccaggctcacgcgattctcctgcctcagcctcccgagtagctgggatcatagggatgcgccaccacgcccagctaattttttgtgtatttttagtagagatggagtttctccatgttggtcaggctggtctcgaacttctgacctcaggtgatccgcccgcctcggcctcccaaagtgttgggattacaggtgtgagccactgcgcccggccgggtttttctttttttctaggcaggataactaactttgcaggactaccttccaacaataccctgcaaaataccctagcttccgtgggggtatctcacctataacaaaggctctcaagacacactctccacattatccagttaatgttctagggaccatggctatgagcaactcagaacagggaaggagtttttttcttctgatgtccaggctggagtgtagtggtgtgatcatggtacattgcagccctgaactcctgggctcaaggactccttccgcctcagcctcccaagtattaatagcttgcactacaggtgtaccaccttgcctggctaatttaaaaattttttttggtagagatgagtgtctatgttgccagggttagggaagaggacttttgactacagcttaccccctgcctcagccactagaccaggttgccaagagctcacatttaaaggtcaattggccaaattgaacctagagcagagaagagagacctggttgtcttgagactttcttcaaatctgcagcctgtccccatgactcagttttcccatctgtaaaatggagataacattagacctatgtctgtatagtttcctcatgaagagagagacagagtgggaacaacatatctgggggtgatatttaccatcgcacacagaccattgagttctatactaaaaaactaaagcccgcctgcgtcttgttaatgaatgatagcacacgggagggacaaagcgtgctctgctggcagctggagtaacaaaagtaatgaggcgaggtcggaacaggatctgctggctccggctcggtttcctcacacaggtctctccagctggatcctcgacgctagggaggaaggggcgcgggactgctgtgggggttttccctccccaggcaggggcaggacctgttccgggcgactgcagggttaagggtatcgtcttaaagagccggatcctcccggctggagcgaggctggatggcgggacgcagcctctcagcctctcgtacccgccctgcgtccgcagtggttgttggcgcagccgccccgtcggtgttccgggctcagtccccgctccccagcgccagacgcagactccgggccaagttctccctccgctcgctgctttctgccgcaggacccggatcaataaagggaaggagagccgggaggaaatgatggagaacagagagaaaggagatgcttgatttcactcgccaaggagtgagtgctcatcggcagacactgggctctggccacgcgtcttagactccaaatctcggctcactggtccctttgaggaggtcgcctggtgttcccgtagccctccaccccaccgtaggagagcgcctgccacgagctccgcgcctcgctaagtgctttgctacgtgaactcttagttttcccaacatccctaagccgccgatacattatcacccacgtattgcggacgagagaaccgcctcggagaagctggctggctcgcttggagttttgcagctagtggcggagcgagcattccgagcaggtactgtgcgatcctccagcgccggccgcagctcacagccccttagctccgccgggttattgtgcggccgcgccttctgcacctgttgcggccctcgctaggcgggaagggagggagaagaggaggacaaaggggatgaccaggtggctctcccccgacggactcccggcccagggagcggatagaccactcccagagagagtgtggctttgmgccttggagaggatgctctccttctccagggatcgcctccccagcggacgcagagtttcagggaaatgtccgcctccgccacttgggatggcagtggggagaggaggatctgggtgtccggaggagggcagtgggagaaagctggagctgctggagtcgcagctgcctgcggagcgggcccgggaggaagcggggccgagcgtgcggcgtccacgcggtgagtgtgcagcgctttcattcaaactttctccagtctcggttccggcgtcagcaaggtgtgaccaatcagagcccagagacgggaataaattatgcaaatcaccatctggcgatgggtcagatgactcccatacttttaaaaactacctctataggagcgtgacagcagcgagtccttgcctcccggcggctcaggacgagggcagatctcgttctggggcaagccgttgacactcgctccctgccaccgcccgggctccgtgccgccaagttttcattttccaccttctctgcctccagtcccccagcccctggccgagagaagggtcttaccggccgggattgctggaaacaccaagaggtggtttttgttttttaaaacttctgtttctkgggagggggtgtggcggggcaggatgagcaactcmgttcctctgctctgtttctggagcctctgctattgctttgctgcggggagycccgtaccttttrgtccagagggacggctggaaggtaacgtgaatttgtttttattccccccagccacttctctgtgctgggtcycctstgtcttgctgattcttcaaaccctccttgttcctatgaaattcttcctttcccactgcgctgcccattctctcctccaatccaccttggagtccacctgtctctctgctggtctgatgggggcattcccggcaagtcatgcaaaaggcaaaggctggcagggtgcgctggctcttgccagccctcccacccccacctccttcccttatacggctccctaagccagtgctggtgctgtccagccagccgagcggcctggcagcagctctgaaaccttgtcctcatgcctgaacctggaggtttgagaggcaagaaggctgtcagagctgtgtctcctggagctgccttttaatcttggtgtaggtgtcttgaaagttcaggtggcagggtagctggctttggtttgattcgtgcttgcagggagcgtctggtgggtcgcttgtgcttagaagctgccgggcctattcccccaggttgccagccttttcctcttcaacactcttgtgctcccccgactcttcctcttcccactcctcctccctttcctcctcctggcttttagcttctcttcctcttgggttctgtatggcagcctttgccagtggaggcagcttgccctgggggagccagagtcagtcagctctgggggagtcagaatcagagtgagaactaagtcagctgataagcagtggagggctggggagcctctaaactgaaccccatcatctcatcttctagtctgctgaggttgtgccaaatggtctgtgtgggcttgtgtatgtgtgggagggttactgtgaatgaatggaaagccttgctttactcaacatgtttccaactctggtgctaactagaagcattgcctagggcaggtctcatctctggctcctcacctgtaaaatgctaaagttccttctaacttctgtgttctgggcctctgagtatgtgtgagtcatttccttcattgcaaaaagtatttactgcatacctacttagtgtcagacactattctgggagcaggggagagagcagtggacaaaatagatggcaatctgtgcccttgtgacacttacatttcagtggtgggaagacagacagtgcactgattaaagtatcagtggtgctcagtattatggagaaaaatcaagcagaggaggaaggtggggcatgttggtgggggaaggtggtgcgattttatgatgtggtcagggaaggcctttctggagaagttgaccattgagcaaagagctgaagggggtgagagaaggagccatgaggacatctgggtgaggaacaatcagaaagtcccagaggctgaagtgacccaggccaaaagtagtaggaatgtacctagagaactttggggtcagagcaggtcagactctaagaggaagagtctttgtccatatgtgggtttatccgcagatctgtctcaggaatccaggagacttcttttctcctaggtttccccatctggcctctgcatgagtggctatctgggtagaaggtggggagttgtcgaactcattatgtccgtggttcaaatttctgctggttggggcttttgttcattactttcatgacggttaacctgacttccgctcatgtgcattcagcagcattttctggaaccttatccctcttacatctgctgcattcttccccctctctccctcctttcccctccgccctctccaccactatatctctttccttttggtatcttcttccttttgcttcttaactctgagataaattaactccaagatggtcatttggcatctttccctgctgggtgataggagagtttgatactctcactttctagccagttatccagtgatgcatcccaggatggctgaaagagtgctgggtggggtccatttatgactttctgaaacggtgtcatgatgacagcacctacttagtgttaagccacagtggccatcagtgacatgagctgcactttgggagcagggccgtctcctaggtggcactgtgcatgagcagtgaagctggaaggggggatttttgttgcttttaggagtttctccatggctttagtcatttacttaacaaaccagatgaatgcctggcacatgccatcactagaaagggcactgaggatgcctgagtttccctagatgggaacactaggggaagcctattttccagcaggtcaacagcctcttgcctccaattccaaaatccacaaactctcaaaattggaaaatgtgtttggtaacttgtttggcagcaagacctggccttacctgatctgaacttatttggcagcaaaaacctggcctgagataacaggaggctattggttatctttatatttgccctcaaatgtgagtggttatgtattctctgcagaaatattaggatgtttgatccagggggaatagcccaggccccactggcagcattatataatatatggtgtatgctccatgatgcctttctaaaatctgaaaacttctaaattctgaaactcacctggtcccaagcatttcagaaaaagaactgagaacctgtactctaaaagtaggaaggaagtagaactccttttgataggaaagaagagggaaatgcaagagagagatctatttatttcagagtgacagtaattaatactagtgactaattaatactctttaagtataaatgagatgtccttttttataaaatgttcacagtttttctgggaggtgaaaagggaacattcagcagatgtaaaaaccgaaacccagatggcttaagcaaattgctcacgattgaactagaatcagaccccaggtctctcactcygcaagtctgctagatgcacccacgctctgttctgtctccccagataagctccacaaacccaaagctacacagactgaggtcaaaccatctgtgaggtttaacctccgcacctccaaggacccagagcatgaaggatgctacctctccgtcggccacagccagcycttagaagactgcagtttcaacatgacagctaaaacctttttcatcattcacggatggacggtgagcccggggagggagctctgcggctttatataagatttgattccctttgttttggtcaattagaaagaattctggtgtttccagattccaaaccctcttcccccctttccttgtgggctgcttgtatttcagacagctgtgaagaatgtaacgggcattcactaaggggcaatctggactccagcagggtggtattaatgatggcatacaacgggctttcagaaagtggctctcctgagggcagcagcccagctccactggctcttaaggacccctctaattacacttaattacgctggtcaaccactgcctggagggggctgtcctgccgtgagagctgagcttaactaaagcaacttgactggctctgagaacctatgagtagccagctggcctggattgctgactgcccttggcatagtgccctcctgtttgcatagagatagccccgtttaaaggcactggggctctttatgtgccctagctgagcaattcacattgaaaagcccatgacaaacttcaacaaaaaagggctttagtgctcagcttcagaagcttttgaccagccaggaatttattcattcatataatgacagtctgtagggaaatggcactattaagtgagcagatttctgcctgggctaattggaaggggacagtcctcctcttaatgatgagaaattcatatctgttacatgcttttggggtctttaaatctgtcatccatggttgaggtcaggggcaggagagggtaggtgcctgcctacctagttgaatgaagagatgattaagagcctgtctaaccctgctcatcacacaacctacaatcagaatcatatgtgtgaatctttttaaggccccctgtcaaaatgcaaatacaagctgcctgcgacttacaagtaggttgcattccagaaagttcttttgtaatctgtttggaacttggaacagcagtttcccacagaagcaagattgtaaatggtgtttgggttcccaggctaggcacagaaaatctatctatttgataatgtgcttgtggataggtttacaactggacctagtcaccatttataactttgtttctgtggaaaaatacattctgagttgtaatttgggattccggggacagattttccctactctggggtcaagagggatggcagagatgggttgtgggaaggggtcatttgttaactctgcattcacctaggagacagcatctccctgcgtctctaagagagaagcaattttccagggcaaccctccctagctgcctttgaaggatggaccaggccacttgcctgcctgtaacagggactcagaccagcctcatgccagtatcacccttaacacgtatctcatagtggccctaacagacagtggggcaacagtataggacattagctaggaaagttttgatgggaaatactggggatgtaaggagcaatggaagacaaatacctgcgtagtgattctgcctgtgctggtcctgctcatgtgcaaatgtttggtccctgagcagccaatgtgcagattctaaaattgtctgggggcactgggcatggtggctcacgcctataatcccagcactctggaaggcctaggtgggaagatcgcttgagcccaggagttcaagaccagcctgggcaacatagtgagaccctgttgctgcaaaaagtttaaaaattacccaggcatggtggcatatgcctgtaacccagtcactctggaggctgaggtgggaggatcacctcagctcaggagttggaggctatcatgagctgagattgttgtcagtgcactccagcctgggcaacagagtgagaccctgagtcaaaaaaaaaaaattaattgggaagagggtcatatagaaaggaattccatattttttaggatttctgaaaccaagaataaaaaayaacttccacttttctctgcagatgagcggtatctttgaaaactggctgcacaaactcgtgtcagccctgcacanaagagagaaagacgccaatgtagttgtggttgactggctccccctggcccaccagctttacacggatgcggtcaataataccagggtggtgggacacagcattgccaggatgctcgactggctgcaggtactgggggatgagagggagtctcctgtcaccagcaggatctcaaacccartcttcttaagaaatgcaggtcatgcatctgttgccatgaacttctggagtctgataaaaatctttgagattaaaagttttattgaattaagtattgtttggaatacttgaaagctgggactttttgagagccttttaattattgatagatctctggatttttcctgttacttaatttgctgaaaattggccttatgggttgtttcttcctgatcttagaaacagatgcccttaggttggttggggatggccaggaaccaggccaggcttgtgatctgaaattcctacaaagactgctcttgtctctgaagcatggctgtgctgagggtggggagggggttatttcaaaaatgcagcctaatatctcttttctttgagayggagtcttgttttgttgcccaggctggagtacagtggtgtgatcttggttcactgcaacctccacctcccaggttcaagcgattctcctgcctcagcctcccgagtaactgaaactacaggcctgtgtcaccatgcccagctaatttttttgtatttttagtagagatgggatttcgctgtgttagccaggatggtcttgatctcctgacctcatgatctgcctgcctaggcctcccaaagtactgggattacaggcatgagccaccgtgcccagcctgcctgatacctcttttataatatgaagtgtggaaaacagatcttgaagtcttatatttacttttttttttgagacagagtctcgctgtcacccaggctggagtgcagtgccatgatcttggctcactgcaacctctacctcctgggttcaagcaattctcctgccttagactcccaagtagctggttttacaggtgtgagccaccatgcccaattaatttttgtatttttagtagagatggggtttcaccatgttggccagactagtttctaactcctgacctcaggtgatctgcctgcctcggcctcccaaagtgctgggattagagacgtgagccaccgcacccagcctatttacttttaataggttaataatctgcctgagatcagtggatttagctgggagaaggcagggcagggtacactgtcaaagcggcaccattatctgggcaattccggcctggccttccttgttcccatggaatgggatgaattctggcagaattctggtcaggattctcgagcagtccctctgtcctctacctaagctcttctatagagtttggtttccgagccatggggttacctccttaccccccagatgagtgctctgacaggggacaatgcgtcaagtctggggtcccacatgggcttgtgaggaggaggttggcagctcctggggctgggtggaggtcaggccttagagggcaggcagagggcrttctgctgagggctgtggttggcactgcagtctccagtgagtacggcagctttgacctcctcaccaycaccctcccctctcttagatactgccagaaagaacaggaaatgtgtagggaacagccacatatgcagcctccagtcataccctccaccctgtccccacacttggcatttgcagtgccaccaagtccttttggcctcccctaagctggctgtgacccacacatgtagcatcaccagcaaagccagtggggccctggggagtctctgtgcccacggcccctgcatctcctcctgctccgtgactgagttgttgaactgctggtgattctgggggctctggaccctgctcttctgctcacatactttggtgactttctataggagaaggacgatttttctctcgggaatgtccacttgatcggctacagcctcggagcgcacgtggccgggtatgcaggcaacttcgtgaaaggaacggtgggccgaatcacaggtgagctccacttccatcactaaagggctccctcagctgcgctaagccggaatgctcccmaatgaggcagcagagtgagtcatagaaagttagctttrgaaggaacctggaaagcatctaattcaaaacttcccaagcgtttttagtcacaagaaacttttttttttttttccaaattgaactcgcataggcccgcagtatatgagacacagaaaggggggtgctgtgggtgaagtggggtgggtatatggcggcttgtgttagccttgccagtgtgggcgttccccttccctataggcatctcagagtctcagagcaccagggaacacagtttgaaaaccataggcctggtccaataggtgaggaaacaaacacggagaggtgagacaacttgcccaggggcaaacagctaataactcaagagcggaagctggatagagccctggccccaaagcttttgggtgttcccttcaggtctccacccaaggactcaggggaaaagaatgaatagtagattttagtttgaattctgcctctgatttctatcttgtctcccaatagcctctttcccatgttaaggtagcatatttatgaatgagagctaccaatttggaaagggtggttcaactttgtaataaaaggaacctttctgatattggtccccagggggtcaacagaaaattgaattttccatgttgaaaactgcatcttagtgagcttttaacatgagagtttggattaaatcatttaatgattgtgaaaagtgtaaaaggttttctttctcatttttgggcccctcaagtatatacacagagattcctctatgctacaattaatggtaaatttgttgccctgaacttctatccttcttccagcattattttatttaaaattacccctagcttcccccttactcccaagattctaagggtgatcacctagaaggatagatctgaacaattcctttccctgcagtgttttcattttaaaacaaaactcaggctgggtgtggtggctcacacctataatccyagcactttgggaggccgaggtgggtggatcacgaggtcaggagttcaagaccagcctggccaacatgatgaaacactgtctctactaaaaatacaaaaattagccagctgtggtggcgggtgcctgtaatcccagctacttgggaggctgaggcaggagaatcgcttgaaccaaggaggtagaggttgcagtgagccgagattgtgccactgcactccagcctgggtgacagagcaagactccgtctcaaaaaacaaaacaaaactcaggtagaagagagtccttagctaaataacgatttggtaaaggtagaatttcagatttcagtgacaagctgatatggtagaattttaaaaagaatatttgtgaagttttcctggctctcctgaatcctgtccctgggcttgagtctagtatgtgcgtgcacacacatgagcatgcatgcacacacatgcctgttgatccaatgacttgattcatcccagcttgagagctttatttttgatttccaagactgtggggcttgagctgcccaaagygggctatgattgtgtggccacccatgactgctcattaaccccttgctggtgcaaagcagtttgactggaagccactcgggttccattgtctgagcgcctcttcctagcccctgaatgagaggtgtgatgtttcagatccaggcacctgagttcaaattgtagcacacaccacagtccaggcccagaatgtcagtaacgatgacaaactgcacatcttgcctttctctatttctaaatctgaaatgagatggggctagggagggaactttccagttctttccccctgcctgtttgagtggcatctgctggggtgagggcttttctcctgagggtggcaggagagccaggcagaatgctaattagtgctctgggatgtttgcatggagcatgatgcccacatgccctgagcatggtcccttccctctggcctttctctgtagagaaggggcctggcctctgtccagttgccaagcagcacccctgacacacgctgttgtgtatgtctgatgggggaggctgcgtcctctcctttccccttggtagacttctcatggacctgtggacaaggtgatcgcaactggtaagaggacagattgagacttgcatggggtcctgcgtccagtgatgccactatgctaaggccaccaggcagtccttagcctgggccttgcaagggtatatctgaaccccaatcttgcttggaccagagggtgtggatgggggtttgctagagttttactttcttaggcttctgagagaagcctgtgatactaggaaagaggtcatatatttatagttgaacctgtgccttgtttgctataatcaggtaagcaagcagatgaatttattcaagaaatgtgtccatatgtgcaggctagatgctagctaatgtcaaatacctcatgtgtggcygggcgtggccgggcgcagtggctcacgcctgtaaccccagcactttgggaggccgaggtgggtggatcacctgaggtcaggagttcaagaccagcctggccaacatgatgaaaccccatgtctactaaaagtacaaaaattagccgggcatggtggtgggtgcctgtaatcccagctactcaggaggctgaagcaggagaatctcttgaacccaggatgcggaggttgcagtgggctgagattgcgccactgcactccaggctgggtgacaagagtgagactctgtctcaraaataaaaaataaaaaataaaaaacaaacaaacaaaaaacacctcatatatgacagctactctatgctatctctgaaccacatagcaaccctgaacattctacggagggggaaactaggactcagtgattaagtaaagggcccaatatcctgggccctataagtagcagagctgggactcaaacccatgctgtcagattccagatcccatgcacctcactgctgtgccatgctgcctctcttctgtggacagagataaagtagccaggcatggtagtgcatgcctgtaatcctagctactcgggatgctgaggtgggagaatcacctgagcccaggaggtggaggttgcagagagccgagactgggccactgcactccagcctgggcaacasagtgagaccctgtcttaaaaaaaaaaaaaaaaaaaagtagccgttgaactacagcaggccctgccctgccgggccagaatgcacagccctggaagttttacatgtgtgcatgtgtgtgtgctccatttgctggacaaagcaactttggaggagtctatgactgaatggaagaagcggcggaggttctctatctcctctttatttaaggaggcagttctccctgtcattcatccctagttaaaaaagttaaatgtgccactgtacccctgaatctgtgggccacagatatgtgtcagggacagtcagagcagggcaggcaggctctggctgggtaggtgaaggcccagccttgcctgccagccagcctgtgaaaccccatcagctgcctgcattcctccagcacagcctggtttccatggcactgaccgtctggtggggacctttgttcacaccaagtaaagagcctctctcttgtattgattgcaaagcagaatgttgctctctttctctttcctccaggggacatggtgagaggcagggagaggccgctgtgtcagtactgcggtccttgcggcctctgaaatgggttgtcgtgggctgttctgggagcacactgcttttgtgccatctttcttttgggtcctgggctagggataaactctcaagcagcctgggctccctttctgtcttggttgcacataaagttatctaaatttggctgggtgcagtggcttatgcctgtaatcccagctactcaggaggctgaggcaggagaatcgcttgaacccaggaggcggaggctgcagtgagccgagatcgtgccactgcactccagcctgggtgacagagcaagattccaactcaaaaaaaaaaaaagaaaaaaaagttatctaaatttttggaaactatttagcgtttcagcctctaccagttctcatatgagtaatgagttctgcaagttgaccgtccactctagacggtagctctgcctcttgtttatcctgaaactaccatctcaagtctcctgataggctccctggttctaatgtgctgtggtctggtgaacacggtcgttaaccatgtcctcctttcaggactcttgttggtcacatctcctcccagccttggtgtttcgaggccaggttttctcagcctaggcaatattgacatttggggccaggtaaggttttggtgtgggktgtgtgtgtgttgggattgacttgtgcactgtagaatgtttagctgtattcctggcctggccctgctagatgctagcaactctctccatcagaatgggggcaataaaaaggtctccaggaatttccagatgtcccctggggggcaaagccacttgtagtggtgaaccactgttccagcggcccttccttcctggcacatttcatcccttaactttctccaggtccttcctgtgtgtctgtggggcaaagagctgttctggttgggataaatctggttcccataatcacttgggcttggtaatagtagctaatactgacaggcactcagtctcttaagatctcacgtggactttgaattaaggtataaattcaggttccattttataaatgataatgaaacacagggaagtttttcaatatttggcccacagaatacctacttttaggatcatccggggaataaatatctatttctatgtgccataattcatatctacccactaggagttcaggcacttgggaatctgcattttatactttgcaagttctcttttggaatggttttacattaatgcagttttcaaatcaaaagatggtgaaagtctctcttactgctctgctacctgtccgtttcccttacccactctctcccccaacgcacacgcatacaggtaactagttgcttgtgtgtccttccagatttttttgtagctgtatggtggaatttaaatttaacaagctcccaatttcaaatwtgagaaccagtgctctcaacagtgctgcttgcctgctcaacacaaaatgtttggaggcggaaaggttttctcacggtggctgcaaaatagaggaattctggaggcctgatgtatggattctcagtgtattgggtgtcctcttctctctcaccattccacccctgggcctgattaaaggaagaagaataaattcagatacaaatagctccgtttggggagactggattctccttccagaaggatgtaggcagcttagttattctgtaaaaattctgctacaattaaggacatgaaagatgctcagtggcagaatgaatgggacaaatggcttagtttcaggcagtctgagttctttctagaactgcttcagttttaacaggagcagttccttggagctgtgtggcagcgaaacttgtggctagttgacggggtttggctgaggtgacgggatacatgaaggcttcagaagaaagtataaattccataacagtaggatttaatttctgcaatgatgtcttggggtcaactgcatatggaaatgggtttcttattttcttccatgctttccatgtcttgattctcccagctggtctcagaagtcatcttcattctgcacactcagacttaacttgtaatcaggactcactgaccaggtgcacctgacaccacagctgttttggggcctccttctgctgcaggtttggatcctgccgggcccatgtttgaaggggccgacatccacaagaggctctctccggacgatgcagattttgtggatgtcctccacacctacacgcgttccttcggcttgagcattggtattcagatgcctgtgggccacattgacatctaccccaatgggggtgacttccagccaggctgtggactcaacgatgtcttgggatcaattgcatatggaagtgagttccctcttttctgctttgtgtttgactcagtttatyccatctccttctaaatcagccagagcctttagcactgcaggcactatttattcattattctcacctcccaccacagaggcctccaatgctgtatttaatrtttctcattgttccccaagactaaccaacccagtggttcctgctttgctttctcacgctttaaggtcacagttgttattgattaatttcttttcttttctttttctttcttttttttttttttgagagggagttttgctcttgttgcccaggttagagtgcaatggtgcaatctcggctcactgcaacctccacctccctggttcaagcgattctcctgactcagcctcctgagtagctgggactacaggcacgtgccaccatgcctggctaattttgtatctttagtagagatgggttttcaccatgttggccaggctggttttaaactcttgacctcaagtaatccacctgcctcggcctcccaaagtgctgagattacaggtgtgagccaccgcacccggctgattaatttctttttatgacaaaaggaatacacacatttgttgaacaagaaatcaagcattatagacttgaataaagcaaaagtgcgctcccactcccacccctacttccactcttcagatgtagccagtatgaatgcttttgtgtgtatccttctagtcttttttctttgcaaattatttgcatgcatatttttcccccaaatcacattgttctgcaactttatttttattttaatttttttcaactttcttttttttcctgtaataatatattatggatattctttttcttttctttttttaaaagacagaatcttgctttttttttttttttttttttttttttttgagacggagttttgctgttgttgcccaggctggagttcagtagtgcgatctcagctcactacaacttctgcctcccagattcaagcaattctcctgtctcagccccagtagctgggattacaggcccccaccaccatgccatccccggctaattttttgtatttttagtagagatggggtttcaccatgttagccaggctggtctcaaactcctgacctcaggtgatccatctgcctcggcctcccaaagtgctgggattacaggtgtgagccactgcacccagccagaagcttgctatgttgcccaagctggagtgcagtggctattcacagcttactacagccttgaactcctgggctcaagctatccccctgcctcagcctcccaaatagctgagactacagacatgtgccactgcatcttgctgttatggatattcttaaatatcagagcacacagatttactaacattatttttacaggctgtgtaatattccatagcatggatacactctattttattttattttttatttatttattttttttttattgataattcttgggtgtttctcacagagggggatttggcagggtcatgggacaatagtggagggaaggtcagcagataaacaagtgaacaaaggtctctggttttcctaggcagaggaccctgtggccttccgcagtgtttgtgtccctgattacttgagattagggattggtgatgactcttaacgagcatgctgccttcaagcatctgtttaacaaagcacatcttgcaccgcccttaatccatttaaccctgagtggacacagcacatgtttcagagagcacagggttgggggtaaggtcacagatcaacaggatcccaaggcagaagaatctttcttagtgcagaacaaaatgaaaagtctcccatgtctacttctttctacacagacacggcaaccatccgatttctcaatcttttccccacctttcccgcctttctattccacaaagccgccattgtcatcctggcccgttctcaatgagctgctgggcacacctcccagacggggtggtggccgggcagaggggctcctcacttcccagtaggggcggccgggcagaggcacccctcacctcccggacggggcggctggccgggcagggggctgacccccccacctccctcccggacggcacggctggccaggcggggggctgacccccccacctccctcccggatggcacggctggccgggcgggggggctgaccccccacctccctcccggatggggcggctggccaggcggggggctgacccccccacctccctcccggacggggcggctggccgggtgggggnnnnnnnnnnnnnnnnnnnnnnnnnnnnnnnnnnnnnnnnnnnnnnnnnnnnnnnnnnnnnnnnnnnnnnnnnnnnnnnnnnnnnnnnnnnnnnnnnnnnnnnnnnnnnnnnnnnnnnnnnnnnnnnnnnnnnnnnnnnnnnnnnnnnnnnnnnnnnnnnnnnnnnnnnnnnnnnnnnnnnnnnnnnnnnnnnnnnnnnnnnnnnnnnnnnnnnnnnnnnnnnnnnnnnnnnnnnnnnnnnnnnnnnnnnnnnnnnnnnnnnnnnnnnnnnnnnnnnnnnnnnnnnnnnnnnnnnnnnnnnnnnnnnnnnnnnnnnnnnnnnnnnnnnnnnnnnnnnnnnnnnnnnnnnnnnnnnnnnnnnnnnnnnnnnnnnnnnnnnnnnnnnnnnnnnnnnnnnnnnnnnnnnnnnnnnnnnnnnnnnnnnnnnnnnnnnnnnnnnnnnnnnnnnnnnnnnnnnnnnnnnnnnnnnnnnnnnnnnnnnnnnnnnnnnnnnnnnnnnnnnnnnnnnnnnnnnnnnnnnnnnnnnnnnnnnnnnnnnnnnnnnnnnnnnnnnnnnnnnnnnnnnnnnnnnnnnnnnnnnnnnnnnnnnnnnnnnnnnnnnnnnnnnnnnnnnnnnnnnnnnnnnnnnnnnnnnnnnnnnnnnnnnnnnnnnnnnnnnnnnnnnnnnnnnnnnnnnnnnnnnnnnnnnnnnnnnnnnnnnnnnnnnnnnnnnnnnnnnnnnnnnnnnnnnnnnnnnnnnnnnnnnnnnnnnnnnnnnnnnnnnnnnnnnnnnnnnnnnnnnnnnnnnnnnnnnnnnnnnnnnnnnnnnnnnnnnnnnnnnnnnnnnnnnnnnnnnnnnnnnnnnnnnnnnnnnnnnnnnnnnnnnnnnnnnnnnnnnnnnnnnnnnnnnnnnnnnnnnnnnnnnnnnnnnnnnnnnnnnnnnnnnnnnnnnnnnnnnnnnnnnnnnnnnnnnnnnnnnnnnnnnnnnnnnnnnnnnnnnnnnnnnnnnnnnnnnnnnnnnnnnnnnnnnnnnnnnnnnnnnnnnnnnnnnnnnnnnnnnnnnnnnnnnnnnnnnnnnnnnnnnnnnnnnnnnnnnnnnnnnnnnnnnnnnnnnnnnnnnnnnnnnnnnnnnnnnnnnnnnnnnnnnnnnnnnnnnnnnnnnnnnnnnnnnnnnnnnnnnnnnnnnnnnnnnnnnnnnnnnnnnnnnnnnnnnnnnnnnnnnnnnnnnnnnnnnnnnnnnnnnnnnnnnnnnnnnnnnnnnnnnnnnnnnnnnnnnnnnnnnnnnnnnnnnnnnnnnnnnnnnnnnnnnnnnnnnnnnnnnnnnnnnnnnnnnnnnnnnnnnnnnnnnnnnnnnnnnnnnnnnnnnnnnnnnnnnnnnnnnnnnnnnnnnnnnnnnnnnnnnnnnnnnnnnnnnnnnnnnnnnnnnnnnnnnnnnnnnnnnnnnnnnnnnnnnnnnnnnnnnnnnnnnnnnnnnnnnnnnnnnnnnnnnnnnnnnnnnnnnnnnnnnnnnnnnnnnnnnnnnnnnnnnnnnnnnnnnnnnnnnnnnnnnnnnnnnnnnnnnnnnnnnnnnnnnnnnnnnnnnnnnnnnnnnnnnnnnnnnnnnnnnnnnnnnnnnnnnnnnnnnnnnnnnnnnnnnnnnnnnnnnnnnnnnnnnnnnnnnnnnnnnnnnnnnnnnnnnnnnnnnnnnnnnnnnnnnnnnnnnnnnnnnnnnnnnnnnnnnnnnnnnnnnnnnnnnnnnnnnnnnnnnnnnnnnnnnnnnnnnnnnnnnnnnnnnnnnnnnnnnnnnnnnnnnnnnnnnnnnnnnnnnnnnnnnnnnnnnnnnnnnnnnnnnnnnnnnnnnnnnnnnnnnnnnnnnnnnnnnnnnnnnnnnnnnnnnnnnnnnnnnnnnnnnnnnnnnnnnnnnnnnnnnnnnnnnnnnnnnnnnnnnnnnnnnnnnnnnnnnnnnnnnnnnnnnnnnnnnnnnnnnnnnnnnnnnnnnnnnnnnnnnnnnnnnnnnnnnnnnnnnnnnnnnnnnnnnnnnnnnnnnnnnnnnnnnnnnnnnnnnnnnnnnnnnnnnnnnnnnnnnnnnnnnnacaggcgcaaaccaccatacctggctccaaaatttatcttctgaatgcttgagcttattctcagcagatttgggctgaactgaatttgctgctaaaactgaggtgtagggcagtgaccaattttgggggggtttcttatccttttactgccttggctgctgacagcatttcctgtcttgaccccaggcagctctctccactctgatgctgtgccctccacatgtcctgccctgatgctcagtctttccctctcccggtttaatccaagtagctctgcagggtttggaggtccatgcaaggggattttactccctcctcagaatataggatgatggcctttctttcctttcctttcctttcctttcttttcttttcttttcttttcttttcttttcttttcttttcttttcttttctttactttacttttgatggagtttcactcttgttccccaggctggagtgcaatggtgtgatctctgctcaccgcaacctccacttccaggttcaagtgattctcctgcttcagcctcccaagtagcagggactacaggtgcttaccaccatgtacagttaattttttgtatttttagtagaggtggagtttctccattttggccaggctggtctcaaactcctgtcctcaggtgatccacccaccttggcctcccaaagtgctgggattacaggtgtgagccactgcccggctggatgatagcatttcttaaggctgctggtgccaatgaggcagggttggggttggttatgccaaattttttgtaagatcccagaaattatttgggccagaaaatccaaattgtatgcctaactttgtaaccaactgtctctatgaccctgagcagattacctcacccctatggacctttgggtcataatctttaattgaagggattagactagaatgaggttgtcaaacatcttcttaaagcatcagctagtaaatgttttaggttttgtgggccgtattgcctctgttccaactctgctgatgtagcatgaaagtagccatgacaatatataaacaaatgagggtgactgttccaataaaactttatttacaaaaacaggtggccagcaggcatggtgtggtgcacctgtagtcccacctatttgggaggctgaggcaggaggactgcttgggcccaggtgaggatcacttgagcccaggagtttgaggccagcccaggcaacataatgagacactgtctataaaacaaaaacaaaacaaagcaaagaaaaaaaaaagaggtagcaaacctgcaagccatattttgctgagccctgcgtgagatgatgtttaggatctgatccatttgcagcattctgtggctgtatagccctattaggaggtagtgactsctgctgcacagctggtctgcatcaccctacttagcacttattatatgggcgttcttgctctttattgctttgtgtgtattcgtgctgtcttcccatcaagagagtgaacagttaggcagcatgaatggccttaaattcctctacatcttaatgggaacctagcaccttgctggacattaatgaagcattacacaggtcgggtgcagcggctcacatctgtaatcccagcactttaggaggcgaaggtgggaagattgcttgaacccaggagttcaagaccagcctgggcaatgtggtgaaaccctgtatctacaaaaactacaaaaattagccaggtgtggtggtcatgtgcctgtcgtcccagatactggggaggctgaggtgagaggatcacctgaatctcggaagttgaggctgctgtgagcggggggtcgtgattgtcccactgcactctaacctgggcaagagtgagaccttgtctcaacacaaataaacaagcaaaagaattacatgaaaatactaacagcaacaataaacagctatcactgttgaggagtacagtatttattatttgagtgtctaatcatcaagaagggctcatcctgcatgctttttatctctcccacccccagcaatcacagaggtggtaaaatgtgagcatgagcgagccgtccacctctttgttgactctctggtgaatcaggacaagccgagttttgccttccagtgcastgactccaatcgcttcaaaaaggggatctgtctgagctgccgcaagaaccgttgtaatagcattggctacaatgccaagaaaatgaggaacaagaggaacagcaaaatgtacctaaaaacccgggcaggcatgcctttcagaggtaaccttcagtccctggagtgtccctgaggaaggcccttaatacctccttcttaataccatgctgcagagcagggcacrtcctagcccaggagaagtggccagcacaatccaatcaaatcgttgcaaatcagattacactgtgcatgtcctaggaaagggaatctttacaaaataaacagtgtggaccccttttgtgatgtggctatcagtccatgatcacaatatcaatatcttaaatttctatcttgcatttaactttcaaagctgtttcatatttgttttctcatttgatcatcacaagaaacctgaggcagatgaacaggggaccaaaatgacatgttacatttttataatgtgctgtaaaatcacaaggttttctgggtactgtgggtattattttacatatgaggaagttgaggctcagagaggttaataccttggtccttaatccaggggcacgtagttagaaagtagctaagtgaaaatcctcaaaagatctaactcccaagtgcagggctccttccatactgcagtggcctcttatggcattggacagaacaagagcagatgggggctgcaggctgggctcaaccaaaagaacaccagccctaaaatctctgtgctggtgactcagtttgggtcaggggtctcctgtgatgacaagcaagggttacaagcatctttgttctgctgtcactgcagtttaccattatcagatgaaaatccatgtcttcagttacaagaacatgggagaaattgagcccaccttttacgtcaccctttatggcactaatgcagattcccagactctgccactggaaatgtaagtcatccgtttcccttgctgggttcgggacagagmacaggttggtttgagaatgagagrgcacaagggagcgtgtgaacgagtacagcacgcaggagrgtgcagtccgactgctcagggaggagccaggtggtctagctggcctctgcagtcctctctcccrctgcaccttctctaccaagccctgactcagcgtttcggggagaaaagttcctgggatgaatcggcatcatgagaagctgctgggtcagcagctggatcagctgggcagaaactgctgtttcatttcaggcaatgcctgacgatgcttcaggcaatctgtaacttcgtaaacgtcatccctggacctctcctaatgatgtggctatgggaggggtgcatagcgatctgtatatgtttgttgagtatccaccagggacaaagcatcatgccaagtaatgttgggattgtgatgaaacatcatcaaagtagctcacttctcagggctcacagtctagctgggagaccaggtttgtacacgcacrtgcacacttacacacaggtagggcaaggcagatgaggccaagccaaatgagagggacagacaggaagaggctaggagtttgggggagacagatgcctgtctgtgggatggatgaggtctgtggggggagctggttttccccagcatctgattttcagagcatcattaactctttccttcagaggttctaaggctgagcggaacagcgcacttgagtggggatgtgacttctttgtgttttcttattgtgttctttcttggttctgtcttttcaggaagtagcataagtggggtggagggggtgcccaggaatcgttttgataagaagctggggtgctgagggcaaagttagtttggcccatatggagtacacctgagcttccatcttggtcctgttgataggaagtagagggatagaggtggggaaagcactcacactgtctctctcctgtctgtgtggggttgttactgccactgtgtcaccccacacagtgtggcagttttccagctgttaggggagtgagatcagcttctctcccacttgtagagtggagcggatcgagcagaatgccaccaacaccttcctggtctacaccgaggaggacttgggagacctcttgaagatccagctcacctgggagggggcctctcagtcttggtacaacctgtggaaggagtttcgcagctacctgtctcaaccccgcaaccccggacgggagctgaatatcaggcgcatccgggtgaagtctggggaaacccagcggaagtaagtgcctcctgctccttcttctgcctggtgtaggtggggaacagaaggctgtgcctgtgacatttcctttcctttgctgcatctaccctcaatccttccctccagcatgcaggtaawacttcaaacaccttkgcaaggacaagtgacttccagatcaaggcttctatcaaaactgttacgcatctcatgccctgaacatgggccctcagggagacgggtgggccagtggaggcagtaattcagccctggctctgtttgccaggccttgtgtcagcctggaggagggggacttctcctggactgggctttttaggagtgctgccttgtcgatgtgtttactgtggggtccatgcagacaaaaggctttgcttgcttctgagcaaagcagactggagtatcacttccagagagcccccatggatgaggtctgtgggaggaactggttttccccagcatctgattttcagagcattattctctctccttcagaggttctaagtcaaggatgtggggctgtggtcctaactgcaagtaacagagaatcctctgtgccacactagctggcagtttcccatttcttttaaccccaagcctagcataaaagatccagatctttctatcagctcctaacaccgtgcctggactccctgagcaggcttttttctaaacagaagccagggaagcctgcgagacctttgtcaagaagggagagtttccttaaccaagtccttcagctgacctctacagaggtcactgccagccttggcatgggaggaggcagctgcctccctctttgtccctcctctggcattttctccattataattcctgccatgtctggtttacattcgtcatctatgacacagcttggcagcagagggaagtgaagtggaggcttggagccctcagctgaatgattctagtctagaaacctgtgaactgggggtgctggcctgtggtctagactgtgtatgtttttacttctctgggcccttgcaggtacaaactatacctatggatgtgagagcagaaagatgatcatttataaataaaatatttcaaagaaaataaacacctattaaatcaccattgagactcacaaatgtaaatagytttccatttgggtttagatatcagatttttaaaaagtaaaacattatagatacagttgaagcccctgtgtccttctctgctctacccttcttctttcaaaccaaatataactaatatttcaatgttaacaaatgttagtgtgtttccttccatcatgtttttatacactttgtacttactgttttttttgagactgagtctctctctttcatccaggctggagtgcagtggcacaatcttggctcactgcaaactccgcctcccggattcaagtgattctcctgactcagccttctgagtarctgggattacaggtgtgttgccaccatgcccagctaatttttgtatttttattacagacggggtttcgccatgttggccaggctggtttcagactcctgatctcaggtgatctgcctgcctcagcctcccaaagtgctgagattacaggtgtgagccaccatgcccagccgccttagtacttctgtctgtgtacataaacaatgtatagaattttggatgcttctgaattttacatgagtggacataatattttacaatttgattttttcattctaatattgtttgtgaaatttatccaaaacataaagatctaatctattcttgtttaactcctgtatgtaaatcaccattgcacaaatagttttgccattgttctgctgaatagttgagttgttgcttttttgtagttacaaatggtgctgagatgaacatcctctgcattttccttgtgcacatgtgtgtaagggctgtttctcagcatgtgttctaaaaagtggaattgctgggttgtagtatatgcattctccagcttgaacagatattgttaaatctgtctccaaagtggttgaactaattttccatcttaactatggatgaagagttcccttttccctccttttcacccaggtctggtgggacattcttgtcattttgttaggtgtgaatgggccccctgctgttgtttgaatttgcatttcctgattgtgcgtgagataggtcatgtttttatatgtgtataaacatatasktcctaaggtccttagggcttcctgggaaaggttcttaagctcttctgaatggggcttttgtcctgcctcagctccagggtcaggtgccccacacccttaaggattacgtggtcacgctaatcacacgcccctgaggctgcgtggggcagccataagttacatggaaatggttattaggccctgattctttcttgtggtcttggctgtccatttgctgaatctttggttttgacttgcagctgagttgcagttgctcttgtcaatggatatttacagagcactggactagaggtactttgaatcactccgttcaagtttacggagaagtcaaccacagaaatcagcaagcagtttcacatagggcataacgttttaaaataaaacattttttaaaactccatgttgcaagaagtagcaacactaacaaaagcaatatttatataaggacatactttgtaaccagtttaaaggccaagggagggttaggttaatgagggctcaggcagtcaggaaggcttctgagaggctatggccttgagaggcaggtggccttttggatagacagaaggaagcaggtggcagaggtctggcagaggctgcatgaggccgaatcatggaagcctcaaagtgagacacaggttagagtccctgcagtagtgatggggaattctgaaggcttttgagtcggggcatggyatgaaaatttcacccctgcctcctcacccatctgccttgaatctagaaagcacagctggattccccctaaagttctgcctacatcagtggtttcttttccctcctagactgacattttgtacagaagaccctgagaacaccagcatatccccaggccgggagctctggtttcgcaagtgtcgggatggctggaggatgaaaaacgaaaccaggtaaccaggactttctcacacgttccacccaggacacgttgacatgatgatctcctagcatgtgctggggatggatctgggtgccagggacatagcatgaacaaaacagataaaaatctcttcctttaagaagttgggccgggcgtggtggctcaagcctgtaatcccagcactttgggaggccaaggcaggcagatcacctgaggtcaggagtttgagaccagcctggctaacatagtgaaaccccatctctactaaaaaaaaaaaaaaaaagaatgccgggcatggtggtgtgtgcctgtaatcccagctacttgggaggttgaggcaggaaaatcacttgaacctgagaggtggaggctgcagtgagctgagaccgcaatgttgcactccagcctaggtgacaagaatgaagctctgtctcaaaaagaaagaaagggccaggcatggaggctcacgcctgtaatcccagcactttgggaggctgaggcaggcggatcacgaggtcaggagatcgacacaatcctggctaacacagtgaaacctcatctctctaaaaatataaaaaattagacgggcatggtgacgggtgcctgtagtcccagctactcgggaggctgaggcaggagaatggtatgaacctgggaggaagagcttgcagtgagctgagattgcaccactgcactccagcctgggtgacagagtgagactccgtctcaaaaaaaaaaaaaaaaaaaaaaaaaagaagctgaccttctgctaggagataaagaagcaagtgaaatactgtagataggatgttggaagtgttaatgtctcttctgctctttgtcctgcctcaacctgtaggggttcattgtacatgaccctactggcatgagatcttctctgtaactaagtccccaggttggtgcccattcctgccatctttgaagtatctttttttttttcctttgagacatggtcttactctgttacccaggctggagcrcagtggcatgatcctggctcactgcagcctcgacctccccaggcttgggtgatccttccgcctttgcctcctgtatagctgggaccacaggcacttgccaccacgctgagctaatttgtgtatttttttgcagagacggggtttcaccatgttgcccagtctggtcttgaactccatggctcaagtgatccgcctgccttggcctcccagagtgctgggattacaggtgtgagccactgtgcctggcccctgccatctttgattgacatcttctctgtaataactagagctgtgggaacgtgcctaagggctcctagcttccttctggccaccaggtcaggtttgggaatggggtgggagataaagagaagcacaaagcatgttctcctttcttaggttttctagaatgcaggtaagtgtgggcctaattctcccacacacttttttttttttttttttgagacaaagtctcactctatcgctcaggctggagtgcagtggagtgatcttggcttactacaacctccgcctcccgggtccaagtgattctccttcctcaaccttccgagtagctgggattacaagtgcctgctaccacgcctggctaatttttgtatttttagttgagatgggttttcgccatgttggccaagttaccatgttggccaagttggtctcaaactcttgatctcaagtgatctgcccaccttggcctccaaaagtgctggcattacaggtttgagccacggtgcccaaccccaatccttcccctttttgggaaacagaaatgcccatgtatgtggagctaagtgagacagaggggttgtcatgcttcactatccccttgtcccatgctgcaatccgttatttcagacgtgaggaaggcccatcttgtggtgtgaggcagtgggctcatcctggggaacagccacacgccctctaagccaaaacacctgctaaggaggaaggagactgtctcctcacaccatgcctgtcgccaccctttgctctaacaagggtactagataataatactgctgtggtacacctagcacttagcttgggcccagcctgcacccagggacttacataatgatgtttgtcatcaacccactaggcaggggttgttagccctgtgtacagatgaggaaccgaggctcagggagatgaagtttctctcccaaggcccccagcaatggcagagggagttgaagcaggtcggtctaccccaaagcctgtgttgttgagcaccgaggctccaagtgctcagatgaatcacctcgcgtctgtctgggtatcaattatcaggcagctgtgcccgtgctccggggtcccctgtgattaaccatttgccacccccaaggctgcgctgcatcccagctgctctgtctcctggttaggagctcaacacaaccacaagcaccatcatcacaggactcgtgccatctaattaagggactcagtctagcgtaggctcgtatgattttctactactataacgattgtaaatctttatgtatttaaatgtgtacatttcaaagtgtttccacatatattaacttcattgatcctccagacaaccatgtagattggacacacccaggaaagatgactaaggaaggctattctttttttattgagacagggtcttgctctgtcacccaggctggagtacagtggcatgatcacagctcattgcagcctcgacctccctgggctcagatgatcttcctacctcagcctcctgagtagcttggattacaggaatgtgccactatgcctggctaatttttgtagagatgaggtttcaccatgttgcccaggctggtctctatctcctgagctcaagtgatctgcctgcctcggcctcccagtgctgggtttgcaggcatgagccactgtgcccagtcaggatggctattcttatgataaaggctaagatatttattcttctttcccgctttggaattcatatacctgagaactctatgattcaccctctcactactaattttagaaaacaagctgtccttttccattccctcaaaaacaataggagtccaagtaataaatgaacactaggaagtcatagcatcatatgtaacatgtttagcatcctccctcctgacatggatgctgttcacatgttcactgataaggagcctgagattcagagaggttcagtggtgtgttcacatagctgagactagaatccaggtctcctaactctcagtcttgccccctttctgccaatacagtgtctctcttgtatttctagatcaaggcaaagaggacactttgatagttctccccacacttgtgtgtccatgattgtgtgtgtgtgtgtgtgtgtgtgtgtgtgtgtgtatgttgtgggtggataatatgtaaatgcaagaactgtgatgtactcaactcagggtccagagggtgctgcagtgtggtgtttctcaaagtgcatctatggcttgtcaggttagggagagaaggcagcactcgggaccttgtccatttattctgaaaggaatacatgtaaaatagtcccataggggtgtcagaaagcttggccttaaggtcaaaagagcacaccctgaatacaggtttgcgcrtttgctggtgtgtgagctaacaaatgccactctcacacggtttctttcagtcccactgtggagcttccctgagggtgcccgggcaagtcttgccagcaaggcagcaagacttcctgctatccaagcccatggaggaaagttactgctgaggacccacccaatggaaggattcttctcagccttgaccctggagcactgggaacaactggtctcctgtgatggctgggactcctcgcgggaggggactgcgctgctatagctcttgctgcctctcttgaatagctctaactccaaacctctgtccacacctccagagcaccaagtccagatttgtgtgtaagcagctgggtgccyggggcctctcgtgcacactggattggtttctcagttgctgggcgagcctgtactctgcctgacgaggaacgctggctcygaagaggccctgtgtagaaggctgtcagctgctcagcctgctttgagcctcagtgagaagtccttccgacaggagctgactcatgtcaggatggcaggcctggtatcttgctcgggccctrgytgttggggttctcatgggttgcactgaccatactgcttacgtcttagccattccgtcctgctccccagctcactctctgaagcacacatcattggctttcctatttttctgttcattttttaattgagcaaatgtctattgaacacttaaaattaattagaatgtggtaatggacatattactgagcctctccatttggaacccagtggagttgggatttctagaccctctttctgtttggatggtgtatgtgtatatgcatggggaaaggcacctggggcctgggggaggctataggatataagcattagggaccctgaggctttaagtggtttctatttcttcttagttattatgtgccaccttcttagttattatgtgccacctcccctatgagtgacgtgtttgatcactagcagaatagcaagcagagtatcattcatgctggggccagaatgatggccggttgccagatataactgctttggagcaaatctcttctgtttagagagatagaagttatgacatatgtratacacatctgtgtacacagaaaccggcacctgccagacagagctggttctaagatttaatacagtgctwtttttcctctttgaaatattttactttaataccagtgccttttcttgttgaacttcttggaaaagccaccaattctagatcttgatttgaattaatacacacaatatctgagacacttacacttttcaaaagatttgtgtatgcattgcctaattagagtagggggagaagggcaactattattatccctattttacaaaactgaggcttagtgaggttcagccacatgcctagacttayatactagttagtggtgcagccagggagaggactcagatttcctggaggcaaagtctatctctgaaactccatgaagacttttgcagccagttcccaccaatatgccccagacgtgagacaaacaaggacttttttttttatatagagccatccataaaatcctaagcccttttattaaygtataaccaggagaacatctgtgccaacggttggactttttatggctgagattcgggaggaagtgtgacaccaagcaggagaggaagaatgattttctttgtacttaggttttctaaggacattgttttaatctgtatcgtgccaaagttgtatcactgttaaacttctgaagacataaccagttgagtcttatttcaagatatgttctcaagccaattgtgtgcttctcttgtttctgtgattgctttctagccaaagcgaagcttgtacaggttgagtatcccttatccaaaatgcttggaaccagaagtgtttcaaattttagattattttcagattttggaatgtttgcatatacataatgagatattttgggaataggacccgagcctaaacacaaaattcattgatgtgtcagttacaccttatccacatagcctgagggtaattttatacgatattttaaatagttgtgtacatgaagcatggtttgtggtaacttatgtgaggggttttcccatttkttgtcttgttggtgctcaaaaagttttggattttggagcatttcggattttggatttttggattagggttgctcaacccatattattggctgtacatcctggtcacttctgacttctgtttttactaatggaagctttgcaaattgaattctcagtgagttgtatatttatacacctggcttgaagccttaattgtatataatgatgctttttaaaaaatgctatttggaagactatttatttctcgtgtatataatgtatataaaaaaatatggttagtgtttacctaaggttaaccaatttcaagattaaaatttttaaatagtaaaataataaaaaattataaagttcttaatggtctgacaactcaattttttttttttttttttttttttttgagacagagcctctctctgtcacycaggctggagtgcagtggcaatcttggctcactacaacctctgcctcctgggctcaggtggtcctcccacctcagcctcctgagtagctgggattacagagatgcgtcaccatgtctggctaatttttgtatttttagtagagatggggtttcgccatgttggccaggctggtcaggctgggttcgaactcctggcctcaagtgatccgcctgcctcagcctctgaaagttctgrgattataggtgtgagccaccgtgcctggccaattcttaaagtttgaaagaatatagctgccccaacctagagtctgacaaaaagttactctaatataaggcatattctttatttgacactcatcgttagcagaagtggacagcaattcactaaagaaccagaacaagaacatcatttcactgaagacgagaagaaaaattatttcaattgtagcagcttgaaggcctgaaggtggatgttaggaagaacagggagcatggctggacactggggagcattagtgagattattaggtttggttgaattggaactagatatcagtgacttagaccagagggaagctgatttctctattggttaaagtcccagctggtagtaaggttctattctacaggccaagagggctgcaggttcttagtttttcactgtgccattcatggggtattcctcgcatccccacagcccaggggtcccctaccagccaatggaaagccagaaaagggaagggatgaacagtctcctcttaaagacatgactgagaagttgcttacattctattggccagaaataaatccatggtcacatgacaggctgggaaatacagtctttatttagggtgcccatgggccctgctgaagatccaattactatttatttaaaattgacatataataattgtacatatttgtggggaaaatagtgatgtttcgatacatacaaggtatagtgatcatgttggaataattagcatacccatcctttcaaacatgtatcatttctttgtgttgggaacattcaatatcctccttctagttacttgaaaccatattttattaactctagttttacccttcagtggtataggacactagaatttattcctcctgtctagctgtaatcttgtttgtttcgtttggtgttttttgtttttttgtttttttttgagatggagtcttgctctgtagcccaggctggagtgcaggggcatgatcttggcccactgcaacctccgcctcctgggttcaagtgattctcctgcctcagcctcccaagtagctgggattacaggcatgcaccaccacacccagctaatttttgtatttttagtagagacaaggtttcaccatgttggccaggctggtcttgaactcctgacctcaagtgatccacctacctcagccttccaaactgtcgggattaccggtgtgagccaccgggcccagccactagctgtaattttgtatcttttaacaattccgtccctatttcccctttccccctaccaattactatttattaaaagggaaattggatcttgccatccgtttatcaggaattagttttttctctgctaaagccagcgagatagaccagagtaccctttaaatgattaaatcctgtagtcaatttttagtaatcttaaattgatctatgactatgaagtataatgcattacatcagtttgactttatttctggtcttaagtgtgaaaacatttctaaatgacaaggaagctctttataaagggctttagtgatggtggaaactccactgtccatctctaccaggacattctgaaaccaggcttgataatggctgtagggagttgggttagacaataagagataagttcttaacttggttcagatgtcagaggaaagcagaaaatggtgtctctggcatagtaaagaaaattgttgaaatttcccaaaggaagagtcatagcctggatgactgcaagtgccttctttggcttgggggttcagttactagttagagtcaggggaacttccacaggacttcctttgactctccaaacaagctgaagccccagaccccttggaaggatggatacaaagtaggtactagaacagtctttgtcatcaaatatggtatttctcaggtgtcacctctgtgttcagagctaccctgagccctctgccatgtaagctctctgatggcacagatttttatctggcttgttttctgccgttatcttagaagctagaatagtgtctggaacatcatgggtattcaatgaatatttaaataaatagatgaaattagatataagaaactaggtgcttaaacaggcaggaggtaatctgggaaaagagcagttagtttggaatcagaattcttggtgtgtcatccagcattatgtgagttttaggctaaatacagcctttctgagtctctatctgctcatttaagaaacagagacaatactgctcagggttgttgtgaatgttaaaggtacatggtaaaaaagaaagtatttgtgttttgtaaacatttgaattgataagaggacagtgtgagacaaaaataaaatcctgggtgggcacggtggctcacccctgtaatctcagcactttgggaggctgagatgggaggatcacgaggtcaggagtgcgagaccagcctggccaatatggtgaaaccacgtctctgctaaaaatacaaaaattagctgggcgtggtggcacgtgcctgtagtcccagctacgccggaggctgaggcagaagaatcgctcgaacctgggagatggagtttgcagtgagctgagatcacgccactgcactccagcctaggcaactgagtgagactccatctcaaaataaaataaaatagaatagaataaaataaaatcctttccacatatatgcggaaattttatgtatgataaaaggggcctattagtctttgggaaaggaatggatggatgatgagaaagtaggctcatttgacaaagagaaacaaaattagattcctattttaacacgcaacaaagatgaattccaaaatacctattgggtactatgcttattacctgagtgacgaaataatctgtacagcaaactcctgtgacacaccatttaactacataacaaacctgcatacgtacccctgaaactaaagtagaagttaaaaccatcaacccccccaaaacaaaaatgaattccatctgaataaaaggtataaatgtgaaagtcatcatgctaatagatattatgaaatataaattcaaaacctgtataaaaactgaaaaaatgtaaaacgtcacaattagaataagaaaatttaaatagaacaatgaatattaaataaactaaaatgctaataaaatgtactccttagggccaggtgcggtggctcacacctgtaatcccagcactttgggaggccgaggtgggtggatcacctgaggtcaggagtttgagaccagcctggccaatgtggtgaaaccctgtctctactaaaaatacaaaaagttagccaggtgtgatggtgggcacctgtaatcccagctacttgggaggctgaggtaggaaaatcacttgaacccagaaggcagaagttgcagtgagcctagatcacggcactacactccagcctgggcaacaagagcaaatctctatctcaaaaaaaaaaaaaaaaaaaaaaaggccacagaaatgtccatccagcaggtggacaattacccttttgtcagccgttcctctgttgctgaccattagatccacatttcttttctgtccgccctggtcccctggtgccccctttcctggcccctgtgacatattgtcatgtagctccaagtatttccccccctcatatccctcaagtgctccattttccaaatgcatttgacttcctactctcttagccccagctctctggtattctgtgtagctgacttccacaagggatctgttgggagcttgtaactgaactgaagtcatgcacattgtcaatggctagtagacctttacctggtccagagttgtctgcattgtttaaagaagacgtttgttaatccaaattaatctttgatttgcatggaggcagtaggtcaaatcaaaaggaaattttcctctccctagcaagcaaactcagaaacaaacaaacaaacgaaaaccaagaaacaaaaggaaaggttcctgttgggatagagaaacagtggagcagggcagccaccttacacataggctagatctgcttgggaatctttcttctaatcgaggcccctaaaatattcctgattttcacagttgatttcatttcttccctcctgaacttacagagcctttcagtaaacaccagtatttgtccctccccgtgtatgcccagtggtttccatggcagcaacggttgccatagagaggtgaagagaggtgtcggtgccctcttttgtaactgtgggttatctatagattgggggtggcctctcctaaaaaagactaatatgtaaataaaaggaataagaatcaaacaaatataaatcagggctcaagtcatttgttttcctaaacctttgtggttatccataccatttaaccttgactttccttaaatcataccggtgcgtgtgtgtgtgcagagggaaagggctgcaagaagactctggaagctaggacaggtctcagcaggtgagggctcaggcccagaggccagctggggcagcagggagcagagttatctgggccatttgctaattatctcagcccagacgagtctgcacgctatgtggtttaataccttcaccagaggcaaatggttttggactcacaagaattgctcatggccagaggcaatggacagatgccatatgagaaagggctgaggccaggaacagaggcagggttatctcactggaatggagaagctaaaatgacattatctttacttctgccctggttattatcccaaggcaacttcagtgggcttgttttgaagtcaaagcctcaactatttattgtgagggagataattcattttcattttcctgccagagatgtcagtcttactattcatcctgtatcctctattagatacacagagcttcttccttctgcttaggctgccccaaattccatataggattctttttgaagaatatatatcatccaaaaagaggtcctaggaaatgtggcttcacaaccctggggtttgtttccctggctgctgtctctctctctctcttttttaattttttttggagacacggtatcactgtgtggcccaggctggagtgtggtggcgccatcactgctcactgcagcctcgacctcctgggctcaagcagtcctcccacttcagcctcccaaatagctgggactacaggtgtactccactatgcctggctacattttgaattttttgtagagatggggttttgccatgttgctcaggttggtctcaaactcctgggctcaagcaatccacccaacttggcctcccaaagtgctgggattagaggcatgagccatcaggcctggccatgctgcctctctctccttcaaggtagacttcctctttccttccccttctccctgcttctttctccttctcctctccttctcctcttctccttcttcttctcacagctttttattgacttataacaggcacacaataaactgcacacaggtaaatcatataatttgacattttggtacaggaaatcatcatgaaactgaaagcattaccacatcgagattgtgaacataccaccaccagaagttttcttgtgcccctttgtaattcttcccactgccctctccccaggttgtccctgatctgctttttgtccttgtagattagttgcattttctagaattttgtataagtggagtgtatctacagtatgttctcttttgtgtctgccttcttgtactcagcataattattttgagattcatccacgtctttgcatggatcagtcatctgttccattttattgctaagcagtattccactgtatagataaataacattttgtttatccatttacttgttgatgaactttaagttgtttccagttttgagttattagagtaatgctactatgaacatttgcatatgaatccttgtatggacatgaactttcatttcttttgggagtaggatagctggatcatatggaatgtatatgtttaacttttaaataaactgccaaactgttttccaaagtggttgtaccatattacattgccaccaacaatgtatgagaattccagttgtcctatattctctccaacatttgatatcgtcggtcttttcaattttagtcatgctaacagatatatcatggtacctcattgtgttttaacttgcatttacctaatgactaatgatgctgagcatattttaatgtatttatttgccattgacatattttctttggtgaagtatcagttcaaatcttttgtccattttgagg

SEQ ID NO: 95202 - DNA, 52740 bp, Homo sapiens
aatagtaatgtttctgttttgaaattataaattgctatttacatcactgaattttctcctaatctgcttcaagacaaagaattttctttttctttcctgtattaatcattgaagcttagtttctaattaattttggagcatcagagcctttcagctccttgaataaagatattgttaaaattctaaggttttgtttgtttgtctgactcaattaattggatgcattttaatgccaagtttccaagacacagagaagactttaggaaaggcactcaaaaaaaaaaaaaaaaaaaaaaaaaaaattcaatgaagcagcgccccttagtggtagaaggacaaaattatcagtacagtaaagatcttgctgaggtataacaatttgtaagcgcaaaataattttccctttaaaaaattagaaagagttaagtaaaacattttagagtaatcattgcaaagtggattatggggattcgcagggcgtttagaaagccgaaagggagtcattgcatctgctggggaaagtgaaaatcgaggattaacagcctttaacatgtaggaaattaaattatccctaatacaagtagcagagtaatctcaacagccatttgtcctccaatgactctttcactgagatgaagtacaaatgaaagtaagctgattttgtagatatatggggtaattttaggtacagtatttacatgaccctttagcatcattgattcattaatatcaatactcagcaacataagacctgccagccatactttacagttgcaatcactaaggctcagggaaatgagggaagtggtagagtcaatacttggatgtcactgtttccagttctgtaaccctgtaactgggtccatccatggtccaccacatagaatgtactccatcctagaactctccttgtctactagctaaaaggtatatggctgagtcactactgtgtgaactctgtagcccaactgcttgggttcaaagtctgggtttcctgtaatcccagcactttaggaggacaaggtgggaggatgcctgaggccaggagtttgagctcagcctggacaacatagcaaaaccctgtctctacaaaaaaaacttaaaacttaaaaacaaaacaaaacaaaacaaaacaaaaaataaacaaacaaaaaaaccctggctttgctttacactgagtgtgtggcctgggtaatcacttcggtccttctctacctcagtagaagaagtagcaagacattgtgttgaggattaaatgagaaaatacagaaagcgtttggagaaatgcctggcacctagtcaaaatttgagaaaccttagttgtaattagctgatattgcatagattgacaaattctccaacgtatcgcaaactttgggttctatttaaactcaggatgcattccagctatcaacaatggtgaattacttgggaggagtagactttggatggaaagagagcttcaacgtttatacttggcatacttcagtactgtttgaatgtgttacaacatgtatgttgcactattgtaattttaaataaataaatacagaatatttcaaagcttgcttcagtaatccactctggcccttggagttcacttgctggaatttcttgcacacatttaacccccgtcctcttagccctttgcaaagatgtcccactccaccccaggctaattttttgatgagaccttttgattacaatccagtagttgctgatggctgcactccaagagcacatctgccagaagtcatgtcaatgctacaaactcctctgcagtgtaagcacactggtgctcagcctgaagagtgaagtcatgcaccaaagaaaacaagccacagtcacagatttcagtcggcaacagagtactgaaagctgtcacagcattcttctgtatggatgtcaggctgtccatctgcacttggattgacaaggaaagggaaaactgagaggagaagcaacccccaggcatccttcccagtgttacactgtagcccagaccaaaccagaacatgcaggccactgatgctctcccacctcctagagaactgtgcaattcagaactgccctagaaatctcgagcagcttctagccgggtgtggtggcacacacctgtaatcccagctactcaagaggctgaggcaggagaatcgcttgaacctaggaggtgagggttgcagtgaatggagatcttgccactgccctccagcctgggtgacaaagtgaggctctgtctcaaaaaaaaaaaaaaaaaaaaaaaaacaaaagaaaaaagaaaactgtagcagcttcatgaggacatttaatatctagtgaaggattttggaacaaatagccctacacaactcttggacaagttccttaatctcctttataaagagagtaattagttagggtgatgataggtgcggtaacaagtttatttctcccttacaagagtccactgtgggccaggcgcggtgggtcacgcctgtaatcccaacactttgggaagccgaggcaggcgggatcatctgaggtcaggagttcgagaccagcccggccaacatggtgaaacttcatctctactaaaaacacaaaaattagctgggcatggtggcttgcgcctgtagtcccagcaactcgggaggctgaggcaagacagtcgcttgaacccaggaggcagaggttgctgtgagccaagattgcaccactgcactccagcttgggccactccgtctcaaaaaaaaaagagagagaatccactgtggatgctcctgggtcaaaggcagcagcactctgctgtgaacagtccttcagggacccaagttgatgaggggcctgccatctctaatgctggctctcaaaatcccctgggcattggtctcccgctggtagaacaggaaaaggagcatgcatgggaggtttttatgggccaggcttggaaatggtgccattatattccgccaactagaactcagtcacatggccacacctgtgtatctgcaaggcaagctgggaaatgtcatttatctctgtgcccagagaaaaagagggcatggatttggcaaacagagagccagaaccagtctctgccacaagaaatcacatatttacactgaagagttgtgataaagattagagataatgtggtgatatatccttggcctacggggtcatggagtttgggaaagacacatcaaatatgaaaagaggagagcagtagaatgcccaagcagagaccagatagtgggctgagctgaagtagtcacaagcaacaaaggttaaggtgctggcagagcagactgattcatttagggataagggatttgagctaggtcactcaggtagtcactgatgctgttcaccaaagggcttcagtgctctgcccttcaggtcatgaggtggcacacacttcctgccccacccacccctattgtgtggtcaataggcagaattgaaatgtgtcacttctggactgagcttttaattgctgggatgagactctctgggggacttttttcctttgccaatgaccacagtctgtgttccagagagggcctgctctatcagcctgggtcctggaaaagggcacagagcagagcctcttggtgcctaggcaacatcttgtcattttaagtcactgagatttttttgtttgtttttttgagacggagttttgctcttgttgcccaggctggagtgcaatggcacgatcttggctcactgcaacctccacctcccaagttcaagagattctcctgcctcagcctcccgagtagctgggattacaggcatgtgccaccacgcccggctaatttttgtatttttagtagagacaaggtttctccatgttggtcaggctggtctcgaactcctgacctcaggtgatctgccctcctaggcctcccaaagtgctgggattacaggcgtgagccaccgcacctggccaagtcactgagatttttaaagttgcatattaccacagcataaactggcttattcttacaagtatagacactttttttcaggcaagaggcatcagatggcctgtgaggcaaaccaaccaaccaaccaaccaaccaaccaacaaaaaggcactcttgtccattttagctcattagttccaagaattaaggaatcatgctttttaaaacataatttatacattatcgccaaaatgcaagcaaaagaagtgcttaatggaccttgaattatttaaaatactaataaagccaactttcaatagaactccagacacactctcttccttaaaagatcatttgacccaatttgaagaaagtttaaagctaccaagtgctaaaaagcgatgtcatgggcatattagtatctaatcaacacccccccccccccataacctggtataatcagaaataaaagaaaaatgaacgtgagggagctttgaagggaactgtggtcagctgcctggaacatatttatgtaggggacaaatctggcaacttgactgtcctctgggctgtccagaactgacctcctgaattagggacagcctcctgcactgctggttgccttacaggccagctctgtgctgttttcctaattcgtgcaattccacctcagatctcattcacatcagctcacactgcagggtaacttgacatggaagtacaatgagtgggagatcgtggctctctttcatgcattcctgtagagtgacaagagccatccaacagagcatcctcagttctgcctgcttcagcatcacaggaagtctgatgtttccagccagctggttgagctgccttaactggagctcaccaagcagactataaagtctctaaatgcaggacctgtattttactcatctctgaatagcacggtaattacttctgagcctccttggaattcagtcagattctggcttgaatattgatcccaccacttaataactgggtaaccttggccacttaacttccctaaccctgttttatagtctataagataggaatgataatgccccactcctttgacttgttgtggaaattaaatgggacacgtatacaaagctgctagtgcagctcaaaagtcttagttgagtgcttggaagaagagtggattctatcccatcaagggtgtgtgatctcagaagagactgtgtgcatctctttatcaagagctacaggctgggcgtggtggcttacgcctgtaatcccagcactttgggaggctgaggtgggagaatcacttgagcccaggagtttgagaccagcctgggtaacatagtgagacactcccatctctacaaaaaaaaagaaaagaaaagaaaagaaaaaaacgctaggcgtggtggagaagatcgtttgtgcccagaagttcgggggctgcagtgagccatgatcatgcactatactccagcatgagtgacacagcaagaccctgtccaaaaaaaaaaaaaaattaatacaaacatgtacgtttgtgattgtgtcacagtggcagtttaaaggagaaatcctttgccagaggctgcaaaagctataaaagttggagtggaacagtgcttcaagggaagagattggttttcattttatctgcattgtttgattatataagtacatgataacttcaatagggataccaaaacaaataaataaattttaaaaagaacatgaaaggccaggcgcagcagctcacacctataatcccaacactttgggaggccgaagcaggtggatcgcctgagaccagccgggccaacagagcaagacctgcccccctcaccctcccatctctacaaaaaaagaaaaaaactttaaaaaaagtacatgtaattttaaatgaatataactttttagaaatgttcggctggcagggttgccggcttatgtgctgagtcttttacctcgtttggagatagcgagagcaacgaagagaaaacattaattacccggtattagtattaatacggcggctccattcccacatggacctgggggggacaaacaaagtctcctaatcttggacagctgcgcccagcccttcttcacctgccgtccaggtatcatcctagtcttccctccgtctctggggtaggtcgtttccacccctccgccctggtccaggccactgagggaagggaagaaactaaggccgggagggccgggccccagcctggagcgtgtagctccgggcctcccccgggcgcggcagttacggcggttccggagccgcggcgcctagggccgaggggcgggtccgaggccgcggccttgcctccgccgcgcccgccactccgcggccgccgggagacacgccgccatgctgcagaagcgggagaaggtgctgctgctgaggaccttccagggccgcacgctgcggatcgtgcgcgagcactacctgcggccctgcgtgccctgccacagcccgctctgcccgcagcccgccgcctgcagccacggtcagggccggggcgggggcggggacggggccggcgggagcgggcggccgcagtgaggggctgagcgcggccgggaggcggagcgccagcggcggggacacggaggcgtaggccccgcggcctgcgcccgctcgccggcctcaccccccggctctctgccggtggggacccagcggcccgggtccgcggcttctggggcgcccgggactcccttactgctccgccctgtccaatgggagggcccgacagacccgcaccccatgccggaggccgggtggtttggctcctcagaggggcctgagggcgcggaagccgaggcctcctcccgccgcaacctcgcgccgtggagaaatggggaggtcccgagctgggagcccccgggagctacaggccagctgctgccgctgcgaagctgacatcgcctgctttgcagccacaggtttcctgacctgcccgcactgttgccccagacttttcccccagtggagagccacttcaccgtagatttgtgaactctctgggcccgcactggagcggaaggtcacggggaagttggactggggactcctgggccccagtccttggtttctaggccacaagggtggccgatagaacgatgcacgttactggctctcttcccccatgggaggatgagaatgggctgggggtccttgtcagcgaatgtgtggaatcctccaaacattgtgattaaggtgaacatttcagttagagcttggctaaccagctctcagatgcaggtctggtgggaaacctcacctctgcacgttgcttgcacggagcattttctctgttcaatctttctggcccttggaggctgctgagcacgtgcagaagcttgacacagagccaactttaaattgctgggcatcatacacaagtggtataaatgtgggggtgcttcatttgaatgtgtttgtcaatgatgagttaacactgaaatattcaggttatgctgaaaatgtgcttgttcgttgttaaatcagccatcctctccggcacctctggcaacaccataaaccacgttgagcttgtatttatcacagcttccaaaaaaatgagggtgctcaatatacctgaactttgggcctctacmaaagtagatttgtcttttaaaaactcccaccatggagttaagactggaagttattttgcatgccagagcaccgtgacatttaaataaaccaggtttgaaaacattgtctaatctcttacrttttgaattatgtttcagatgggaaactcttgtctagtgatgtgactcattacgtgatcccagactggaaagttgttcaagattatcttgagatccttgagtttcctgagttgaagggaattattttcatgcagacagcttgtcaagctgtgcagcatcaaagaggcaggaggtatacgttttgcattctttatttctatatggcataggttccccccaccttagaaaaggtcccttgtcggagggggatgggaggaattcattattttgtcaraagggacttttaaaactaatttcgtattctctttgatagtgaggaatgcagtaacattattttatatttctgcttcaacacctggccaagagatctgactgtagattagtaaactgcagtgtccccagtatgtgggtatttaagattctagtgtgaattgtcttttggcttgcatttttatagtggcagggttattgcttatttcttgttgataatgtgtattatttaatcttatttatagatacattgtttcagaagcatacgttcttttcttggggaaaagagtactttatttttaaattttagactcttttattggggatgcaaattgtacttgtaatgatttattcaatgaaaccagaaatagcttgttttatttttagattactagtgtaactaccagccatagtcattgtatttgctaaacaaaggctttctaattgaacaagtctaaaattcttgcctagtacttaaatgaagaatagctgtctaccttttaaacaaatactttgaaaaacgattttgcttcctttaatgttgggaaaggtttatgacttgaacttaaaactgtatggaaatagcatattagaattatacgtccaaccttttaacactctaagttatttaataagcaccaactatgcatttattcttttttaaaatgttgtggtttcttcaggccttagtgataaaagatgaagtgtttttatttgtatatgaaaatggcaaaaaattgtcctcttattatatgctcagttcaaaaaacatacattaaccagattgtgtgcaggttttttcagatagaatatttttaaatgatcttcaagttgattttgttcagacaccaagatatagatgtttatacacatccaaatttaaatgctgctccaggtgtcatatttcagtttctgctactaaaatcaatttgttgttatcattcagattgctaacacactgcgagccttttcaacttctgttttctgaaatatttttaatgttaaggattgttttagaaaccagttcctgggacattcaaagacaaagagttggaatttaaacgtttttttctcctgaacatttcaagagtagttaacttgatgaaaaactattggttttccactgccttaccatgtctttgaatatactaaatgtgaaaacaaaagatgaggagttatgaaatagggccatatgataacaccctgattttgttcgttgggtaagcactttttaagctcttagttccaggccttggggaataaaaaagaagtctttttttttttttttttccttgagatggagtctggctctgtcgcccaggctagagtacagtggcgtgatttcggctcacaggtcactgcaacctccacctcccgggttcaagtgattctcctgcctcagcctcctgagtagctgggattacaggtgcacgccaccacgcccggctaatttttgtatttttagtagagatggggtttcaccatgttggtcagacttgtgttgaactccttacctcatgatccgcctgcctcagcctcccaaagtgctgggattacaggcatgagccactgtgcccggcccaaaatcagtcttagtccctctaacaacaaacctattgtcttgctggggttagatagaagaaacaagacagttattatgaagcgccttagacacacgaaggataatttaacgtggactatgcaaagtgcaraagtaaacgtggagtggagcaattaggccaaaaaatcctttgggggaaatggatttgagactggtctttaaggcgtattacgagtatgattgaagaagaggaagaaatcagcaaatttgggacttggcactttgtttacctgttaagcaaccagcaggtgccttcaggttgacatagctaaatgacccaaattgtctgagcactagaaagtgtcatttcttaaaggctaactttcaaattaataataggcattgaatacataagatctgagagatgtgcttgattaattcagccttcctaagtgttaagtgtaagttatttgactttttttaattgacagattaaaattgtatgtatttggccaggcctggtggctcatacttataatcccagcactttgggaggccaagacaggaggataacttgagcccagttcaagaccaatctgtgcaacatagtgagacccctgtctctattaaaaaacttatttttaaaaatcatatatatttatggtatacaacatgatgttttaaaatatgtatacattgtggaaaggccaaatcaagctaattagcatatgcattactttacatacttaacatttttttggtgataattaactttttatatttaactgaacttggcctagcagaagctctctagtgttttgttcatttaatgttggggaacattttgttttgtttttcatttcttccttggacatttttgagatgcaagtaaataattcattttatccaatatgcttttaggaacattcttggttaggaaagttttgtcagttaataatccctggtcctgtctggtgtctggtrtaggatgctttgcttgttccttttgactccctcctgaattccttctgtatagcttcagagagtctccatatttcatgcctcagtttcttgatggtatataagatgggaatcaggccaggctgagtagctcatgcccataatctcagcactttgggaggctaaggcaggtagatcacttgaggtcaagagtttgataccagcctggccaacatggcgaaatcctgtcactactaaagatacaaaatgcgcgagatgacgtggcgcatgccagtaatcccagctactcaggagacggaggcaggaaaatcgcttgaacccgggaggcggaggttgtggtgagccgagatcatgctacagcactccagcctgggcaacaaaagcaagactccgtctcaaaaaaaaaaaaaaaaaaaaaaaaaaagattgaaattgtagaatattatggttggagagatctgaaaggtcacatgatctaactccccatccagtacctcagtgttctcaacatgagtgatatatccatcttgtttctaaaagaaaaaaatcctcctggatacccagtgttattttcttctattgttatttaaatgtgtttaaacataaatctyggtataagtcctcatgtttaagtactttaatacaaccctagtgtaagttaaataatcaaagtaacaaaatcagaaaaccgcaaatgaacattattcaacgtgacagataacattgttttgctgaaacaaaatcaccagagttaggtttaacaatggaaagacacagcctttaatctggttatatttgtaataagatttcctattttgacttcaataatatcaatgcagagaatgcttgttctcataagtgtattgcacagaacagtatgactaatgtcaggtcttaagtcgttcaggataatcacatgttctgccatctaataatcttcaaataaatgcttatttaatgaggagtccccctgacaactctgtaaggctgttttgtccaccatgttcatgtgttcacatgtgtgttggtttattcaacaaatgttcaccaagagactatatgtgccagaaactgctagcactgagggtacagtggcgaaccaragcagatggagtcctggcagggtgacaggcagtaatcgggcaattacacaaacagatgcagaactgcaactgtgacaaatgcactgaagcacagggatggggcgccaggagagcccagaccacccagggaggcaaggaagggcttttctgagggggacgcctaggtggaggtccaagggttggcataaaccaggcagagtggaggaaagctttcaaggcagaggaaaatgcctggggcccatggggaggggcctgtggcacaccccaggagcagaaagaatgcctgggtgggatggaaggcctcatggcctcagggatgtcagggaaaacttttaagcaaaatgggataacatgatcagattcctgtcctgaaaggattactcagcggtggttcacacttgtaatcccagcactttgggaggtggaggtgggtggatcacttgaggtcaggagttgaagaccagccaggccaacatggtgaagccccatcactacaaaaatccaaaaattatctgggcgtgatggtgggtgcctgtaataatcccagctactcaggaggctgaggtgggagaattgcttgaacttgggaggcggaggttgcagtgagccacgatcacgccgttgcactcccgtctgggcaaaagagcaaaactccatctcaaaaaaaaaaaaaaaaagggattactgggccaggtagagaagaggcctggaaaaaagaagggaggaggcttttgctttagtccagatgagggaatgttggtagcttagagatagagagaaatagatgtttccaaggagtatttaataggtaaaaatatataaaacttcctaagtgtataactaagagaattgaaaacatgtcaacattgaaactaaaaacatcatacacagycgggcgcggtggctcacgcctgtaatcctagcattttgacaggccaagttgggcagattgcctgacctcaggagttccagactgggyaacacggtgaaacccatctctactaaaatacaaaaaattagccagctgtgtgtgatgcacgcctgtagtcctagctactcgggagactgagacatgagaattgcttgaacctgggaggcggaggttgcagtgagccaggatcgctccactgcactccagcctgggtgacagagcaagactccatctccaaaaataaataaataaataaaaatgaaaacatcatacacaaatgttcatggcagctttcttcatcatagccaaaacatggaaacatcccaaatgtccgttaattgattatggttaagcaaaatgtggactatccatacaggggaatattattcagccataagatggaatgacgtactgatagatgctacagtgtggataaaccacaaaaacatgctaagtggaagaagccagagcacacataaaaacatcatatgttgtataattccatttatgtaaaatgtccagaacaggtatatcaatagcaacagaaagtagattagtggttgccgggggctggggtcaaggggaacaggcaatgactgcttaatggatggatacagatttcttttccragtgattaaaatgttctgtaattagatcgacggtgatggttgcataactgtgactatactaaaacccactgaactgtgtgtgttttaagggcaaattttatggtatgtgaattatatctcaataaagctgctcttttttaaaatctctagaactagtgatagatttaggtacaataaagctgctcttttttaaaatctctagaactagtgatagatttaggtatgtgagatggcggggaaggtagggtcaagagtatcactgaggtttctggcctacatgactggatggagagagggaacactagaggaagcctgggggcaggggagtcaaggtcgagagtttgaagtgtctctggggcatctgagagggccgcactgacgccaaatggcagtgcagttagaaggcagtcgttcagatggccccaaatgtactccataaaaatgttttgtgagtattgtctaatataaatggcaatataaacttgtggaaaactcagtggtgtctgaaggtaagtctgtgagaccctacctgggttctgcaaaatccaggtgatgaaacacatttagtacagaattcactttgtaggtctttccactggtgtgggactcccacttctaatcsttagagagaacagtcagcagcggaaagggatgttgcatctgtaggtaaggtcaccactgaataaaaatagtaaaaaaaatcaacctaaagaaggtaggtttaactgcccctctgagaaattgcttaaaacattaagatgatggagttttagaaaacatccaagccagtccaaggaactaaggtttttctgcaagagttgaatttatatttatttatttatttatttatttatgagaaggagtctcgctctgtcacccaggctggagtgcagtggtgccatctcagctcactgcaacctctgcctcctgggtttaagcggttctcctgcctcagcctcctagatagctgggaatacaggcacccaccatcatgcctcgctaatttttgtatttttagtaaagacagggttttgccaagttgaccaggctggtctcaaactcctgacctcaagtgatcctcccgcctcggtctcccaaagtgctaggattacaagcatgagccaccacacctgacctgtacttgactgtctgaaaccattgttctcctgtcattctggtcgaattcgcttaaggcacatggtgctgtttgctgactccgtgcaggatgttcatctatctggtcccatcatatgcactacaaaatcctgactagcaaaaaatatgactatatcatatgtatgcgctattaaattataactgtaagcccacatgtctacaagcaaacctgactgtcacactcagagtgattcgctgtttgtttcctgctttctgcattaatattcttttgccgtttgttcatttgttttatctggctgataggtagctgacaaatggaagcttgcactaaaagtctaagaaaatatatatgggagtgaaacttaaaattgagaacattttttgttaagtgatatatttttctaaatattaggaaggattgtcattactctaatctggtggtaacccctgggtctggcttgtggcagacacatcagtatttgcagagaacagaattcaagaatccctgggtctgcacggtggctcacgcccagcacgttgggaggccaaggcaagaagatagcttgagctcaggaatttgagatcagyctggctaacatagtgagaccctgtctcaatacaaaaaaaamcaaaaaaattagctgagcatggtggcctgcgtctgtagtcctagctgcttgtgaggctgaggtgggagaccacttgagcctgagagtttgaggctgcagggagccatgatcgcgctgctgctctgcagcctgagcaacagagcgagttcctgtctcaaaaaaacaaaagcaaaaacaaaaaccctgggtctgaagtgaaggtgtgaaaacaaatgcagtgatgtctatgaagcttagcaaaaggcaacggggctctggaaatgtcagtttattcaggggcgttattaccctgcacttggatcactgttatcatgtagggctgtgcattcatttgttcatttggaaagcattgattcagcacctgggggtaaagcactgaagtaaagccttactgtctgctgtctcgcacattccgccctgctctcgtctcttgggctctttgtctccactcactcttattcatccttcagagctcatgggtcacctactccaggaagccttcccatccctcccatcttctcctttcaagcacttatcccaccraaatgggtggttctgtcttatgtttggtttgtttttgccaagtagcatagctttattttaaattgtggtaaaatgtacatacataaagttgtcattttaactatttttaagtgcacagttcagaggcattaaatacatatgccttgttgtcagccatcaccaacatctgtctccaggacttttcatctgtcctaactgaaactctataccccttaaacactgtctcccctccttggcccctattctgctattctactttccatctctgtgaatttgactactctcagtacctcatgtaactggaatgacacagtgtttgtccttttgtgagtggcttatttcactctgcataatgtgtcagggttcacccatgttatggcatgtgttggaactrtcttcctttttaaatgtgaataatatattccacattttgtttatccattcatccattgatagattgcttccaccttttgcctgtgtactgtgagtagtgttgctgtgaacataggtatacaaatgtctgtttgagtccttgctttcaatttgggtatatacccagaagtgggattactggatcgtatggtatgtctatttttcctttctttgctgcagacatggggcactgccctatctatgccgtaggacactattcagatgcagtgggatgtctagttggtrttcccmagggcattcagtgcagcacccctcacctcccccagcagacctggcacatagaagcaaagattttctaaatgaaggatgcttagcaagagagatcatttgtaaacaaataactacartaagttcagatactttgtaatggtgcacaaaatatgatggtaggtaaagggaataaaaacttctaggggacaaaggaagmacaggcaatattttttcaatgttttctctgaaataacaaattgcagatgcttatgaaatcactccaaaaattgttcctattacttaacaaataagtgctcattcttaaaattctaagcattaccgaactgtgtaaggcagaaagtgaaagcctgcccaaactgttaacagtgtgtaggccgggcgcggtggctcatgcctgtaatcccagcactttgggaggccgaggcgggtggatcatgaggtcaggagatcgagaccatcctggctaacacggtgaaccccgtcgctactaaaaatacaaaaaattagccaggtgtcttggtgggcatctgcagtcccagctactcgggaggctgaggcaggagaatggcgtgaacccgggaggtggagcttgcagtgagccgagattgtgccactgcactccagcctgggcaacagagtgagactctgtttcaaaaaaaaaaaaaaaaaaaaaaacaatatggcatagactcttctaagaggcttttaaaataagttttaaatgtgtctttatccaggcatggtggctcacacttgtaatcccaacactttgggaggccaaggcaggaggatcgattgagcccaggagtttgagatcagcctgggcaacatgacaagaccccgtctctacaaaaaaaatacaaaaattagccgagcatagtggggtgtgcctgtagtcccagctactcaggaggctgaggtgggaggatcatctgagcccaggagtttgaggctgcagtgagccatgatcgtgccactgcattccagcctgggtgacagagtgagaccctgtctcaaaaatatagtgtctttgtgaaagtgggaaaattactgatataatatgttctacgcatcttgagaggtgagggaacagcttttgtttgtacaagtggaattctgttaagaaaagctgccattcatagaaatgaaactgaatccctttgtttattaagatattttatggccgggcgtgacggcttatgcctataatcccagcactctgggaggccgaggcgggtggatcacctgaggtcaggagtttgagaccagcctggcaaacatggtgaaaccccgtctctactaaaaataccaaaattagcsaggcatggtggcggkctcctgtaatcccagctgctcgggaggctggggcagragaatcacttgaacgtgggaggcagaggttgcagtgagccgagatcgtgccactgcactccaacctaggcaacagagtaagactccgtctcaaaaaaaaaaaaaaaaaaggatattttataagttgctatttatgattcttttcacagtgactcaaaattagaattactaagaaaataaaatcgatttcttttttttttttttttttttgagccggaggtcttgctctgtcaccaggctggagtgcagtggcctgatctcggctcactgcaagctccgcctccagggttcacgcccatctcctgcctcaacttcctgagtagctgggactacaggcacccaccaccacgcccggctaattttttgtatttttagtagagacggggtttcactgtgttagccaggatggtctcgatctcctgacctcgtgatcctcctgcctcgcctcccaaagtgctgggattacatgtgtgagccaccgcacccagccctagtgaaatctatttcttgttttctaataaagtgtaagaccacacagattggtgatcagtgtttatgcatttaacaagattcgttggggagttcggcctttgcttcaacgaaaagactcaatttttaaaacctatggtggcaggctggaggtgtggaaggaagggtacaaatgttattatattaaaacacatgttaaatctgatttaatatgaatccatttttattttatatttattttgttagagacagggtctcattctgttcctcaggctggagttcagtggcacaatcatagctcactgcagcctcagactcctgggcttaaaggaccctcctgcctcagcctcccgaggagctggaactacaggcacgtaccaccatgcccagctaatttttgtatttttaatttgtgtaaagatggggtcttgctacttggcacaagctggtctgcaactcctgggctcaagcaatcctccttcctcagcctcccaaagtgctgagattacaggcatgagccaccacacccagcaaattcatctttaaataagcagttgactccctttaacataactgagtgttttctgtaattttatagtatctagactattgaaaagcaccttcttagaaactggcccataggagacttgatgtttgatttatggcttcggccagcattgtgggaaggatcttttttgttgttgttttttgagacaaggtctcactgtgtaacctaggctggaatgtagtggcccagtgcagccttgacttcccaagctcaagcaatcttcccacctcagcctcccaagtagctgggactacaggtgcacgctaccacgctaatttttgtattttttggtagagacagggtctccttatgttgcccatgctggtgttgaactcctggcctcaaaccattctccttcctcggccatgggaaggatctcttgatggacaaaaccttaaaactttctgttagttgtctgacagatgaggctagctctcatttatgtaaatcagggtggctgcataaataaaattcacagataaatccccaaacttatttaccttacatgttcttgtctagggctgccagcaaaaagtcaaatgtattaatgcttaatgacatttatagaacaaagtgaggtccaaaaataaagtgctaaactctctgcttgcctccgtgcactcaggctttgaagaaggggctaggcagggcaaggtggtataattacataataaaatggctggaagtctctgaaggggaaaggagagggaaggagtttaattgatctgcaaactaattaactaggccctgcccaagcaccttctagcaggcaaaatcgagaaacaatagcagcccgataggactgagcacactgagaccaatataaatacatgttcttcaggtttaaagtaatcaatcttttgctctaaaataccccatccttttttgatccttagcaagagatagcagtggatgagtacctgctttgttagagttatttttctcctccktgtcacagacagtataacaaactgcgaaacctgctgaaggatgcgcgtcatgattgcattctctttgctaatgaattccagcaatgctgctatctgccacgggaaagaggagagtccatggagaagtggcagaccaggtatggccctgacttgctgctgttttcacactgtcgtcttctttcatttcctcatcattggctgtttgggagttgatctaaatagtctgctagaacaaaccaacaattattctggaaccatgattaacaccgaaatgcttaccatgtcaatattttagatatatcatttgaatatataactgatacattttttaaaaattgcagttaggaagatataggtacccagaatatgtttgccccagaccctagcagctgtcaggatcattccagtgaactagaagtcataactttaatgcgtgtatgtatggagaaggcagaagagctccttttttgtttttttattttttttaatttttttttgagacagggttttttgctctgtcacccaggctggagtgcagtggtatgatcacaactcactgcagcctcgacctcctgagctcgagttatcctcccacctcagcctcccaagtagctgggaacataggccaagtagctgccaccacacttagctaatttttgtatattttgtagaaacggggtcccattatgttgcccaggctggtcttcagttcctgagttcaagcaatccacttgtcttggcctcccaaagtgctgggattatagatgtcagccactgtgcccrgccaggctcctactcccagtcttattaaactgaaactggtcatttaattctgaaaaagctgcttcaggaaacacagtgtcctgatttaagtctgctgaaagcagagcctaaagtgagtccttgagtgtggagtgtttatgtggaaagcaattcccagaagcaggagtgaagaagcggggagagtgagatggagatggagatggagggaaggtggtgaaggatgtgctgctgctgtaggaaacgaagactccatcagtgctgctgaggagccacacggaatgtgcctcagaagttaccttgaaagctgggcatggtggctcatgcttataatcccaacactttgggaggctgaggcaagaggatcaggagttcgagaccggcctggataacataatgagaccccatctgtacaaaaagttaaaaattagccagggatggtgatgtgcacctgtagtcccagctactcaggaggctgaggcargaggatcacttgagcctgggaattgaggttgcagtgagccattgttcaccactgcattccagcctgggcgacagagtaagaccctgtctcaatcagtcagtcaatccagtcctgcacacagttctccagacctgtttcccagttctctgtttcccagttccggttcttttttggaagatttccaggcattccatatggttccatatcagacyctattggattatgatcttcagctacttgcaccttagtttttctcttagccaaagacttgcttcttcatcttttaagcctcacataatatagcttgtcatcttgtgtgctgccccagttaaatggtgtaaaagatggcagagcctcatggtttctaggccatatcaagaaatgaaagtggttgcagtggtggttggatgtcttagggaagagaagtcaggttctttctggttcatatttgtatcccccagagcacccagcccagggcttctttataatggatactccagaagtatttgttgaacgaatgaatggttatctatatagwccaaaggatagcaaaagccagatgtgaaattctgaacaagagcttgtgtttgtctgcctggggagagctcatgtgccctttgcttttccaggagcatatacaacgcagctgtttggtactatcatcactgccaggacaggatgccaattgttatggtgacagaagatgaagaggcaattcagcagtatggaagtgaaacagaaggagtattcgtgattactttcaaggtatttccagatattgtatatgtatgagtgctcattttctaagtagtacccataaggctctagatccctttggtaacacagaaaagagaaaagaggaatagacattaagttccattttggccagcgcgtggtggctcatgcctgtaatcccagcacttgggaggctgagatgggaagatcacttgagcttaggagttcaagatcagctgggcaatctagtgagaccttgtctctacagaaaaaaaaaaaaaaaaaaaaaaaaaaaaaaaatatatatatatatatatatatatatatctccaagcatggkggcacgcacctgtagtcccagctactcaagaggctgagatggaagaatcactggagcctgggagatggaagctgcagtgagccgtgaacacaccactgtactaatgcctgagtgacagagtaagaccctgtctcaacaaatgaagttctacttcttcattatgccccaactatttaatgttgactttcacaaattcagaccaactttgactataaggcccacagcatctaataccagcccagtaaactcctactgacagtaaactaacatttataactataacagtaatagtaatggtgatgatgatgataataggttgaataaaattgccaatattcttattgttgacctataaaatggcagtttgacatggttctacctaatggtaataaccaacacatctatgccagccacttttctgtgtgtattatttcatttaattcttgcaacaaccctatgaggtaggtattataatttaatcttattggtaaggaaatggaaacacagaaaggctaagtaacttgttaaaagtcacacagtagaaaatggtagggctatggttaaaatccaggcaatcggaccccaaagctcttagccaycatgctatactgccttccaagttatttttctgaaaatgcacacgaaacaaactgtcttaaaggccagtctttttttccaactgttcttcactcttccccacttgtgaatgttcataggggttaatagggataaatgaaagggttgagatgtgatattatttatgtgaatgctgtcagatctgcttagtacagatctcagacaggagtggcattatcagtgactgtttctttgggctgtctcagcaacgcagttcttcctatctcttaggtaccttttgtgagagtaggatgactgttaatctctcaacagatcgctggtcgcttctgtctgcccagctggtcaattaggtttcacttgttgatatcactttttggtgcagaaactagaataaggccctgtattacccctgtcagtttatagaaagtctagttgggttttgaattgcagattctgtaagggttcccaggtgcatatattgctaaagatttgccaatagaattttcttggccctgctataagaaagtgctctggcatgccagagaattccaggggcgctggatattaatggcagtgtcacttgttttttctgttgcaatacatcatgtcttgttcctgcagaggacagttgactaaaattacatttttctacttttttgaaaattacttttctttgtagtccagtggtatagtacagttttattttctatagtgtttctcaagaaaactgtgtgaccaagggctycatagaggtgaatgatagtagaaaaaagagatattgtgaagttcagatgaaagggaagcctagaattctctgtggggacttgaagttagatggagaagagccaagatgataaatccctcttgaagacgtagttcataatgacaaagtgtagtgttgataagtgataagtgaccatagaattggggcactgacattagcacagacagaatttctggaaggagtagggaaagaaaggaagcagtttgaacaggactctgaaattagtgggagaaatgctggagttgacagaaagtataacctgttttcttttcaatttgagaasagagaatgtgctagactctacccctcagacttaaagttgagttaaaatacataaaaaagacaagaatggcctggcacagtggcccacgcctgtaatccagcactttggaaggctgaagcaggaggatcacttgagcccaggaggtcaaggctacagtgagccaagatcatgccacttgtactccagcatgggcaacagagcaagaccagtgagccaagatcacgccacttgtactccagcatgggcaacagagcaagaccctgtcccttaaaaaaaaaaaaaaaaaaaaaagacaagaatgtacacatactgctgggcacagtgtaatcccagcactgtgggtggccagggcaggaggatcactgagcccaggagtttgagaccagcctgggcaacatagtgagacctcatctctacaaaaaataaaaaaattagccatgtgtggtggcatgcgcctctagtcccagccacttggggggctgaggtgggaggattgcttaaggcagggggaggtcaaggctgcagtgagccaagattatgccactgcatccagcttgggctatagaatgaggtcttgtctcaaaaaaaagtacatataggccattgtctgcagcaattagatacacataaagacaggctgcctggacgtgcgcaggtgtgtatgtggtgtgtgtggagagaaagagacttgaaagcacaaagtagcctaggaggtggaagtgttccacggtggagtggcttcctggggctcatttggcaggctcaggggttaatgtggtagtagagaatgaatggyggagtgaggctcaggaagtcctgctcactgagcaccccctcaagatggcaggccagcaattcctagtcaggagtttctgtcatagtaccatggtgaagaatcagtamcttctgacygtgtttctctgtgcctttattaaatacagaattacctggacaatttctggcctgatttaaaagctgcccacgagctttgtgattctatccttcagtctcgacgggagagagagaatgagagtcaggagagccatgggaaggagtacccagaacatcttcccctggaagtgttagaagctgggattaaatctggacgctatatccaggtgagggtggtaatttagaatgtgtcagggctgggcacagtggctcatgcctgtaatcccagcactttggctaaggctgatagattgctttagcccaggagctggagaccagactgggcaacatagtgaaaccctgtctctagaaaaaatttaaaaattagccaggcrtggtagtgtgcacctgtactcccagattacttgggaggttgaggcaggaggatcacttcagcctggatggttgaggctgcagtgagccatgattgcaccactgcactccagcctgggtgacagtgagaacctgtctcaattaaaaaaaaaaaaaaaaaaagaatctgtcaggaccagccagtatgttttctcctctttttactgcatcctgtcacaggcctctgatttcacaggctgcaaacaagatgggcatgagtaagtcagggttgtcagtgtttcaggtggcttgggagtcattctttccagacactgattgcccagcttgaagctactctgcgatgatgtccttaattctgttacatattgaacatcatacaagcagactgtggaagtcgcctggtaaatgcctcctgtcactagaaaaaaacatacctctttgaatcaaggtctggaggtttggtgatgttgtaaaattggtgaaatttagcttctttcctcctttgccatttttttctctgcccctttcaagggcctctttgtgatcctcccaggaccctagaactcagatgctgtcagggtcttgggaaggaatcagatacaatttttattcagatttcaacagttttatatgcactcatttatgtgtgtatgtgtgtgtagctctatgcagttttatcacatgcatagatttgtgtgtccaccaccacaatcaagatacagaattgttctatcgtggattttgcatttctaatgagcaactcagtagattgtcaaccacaatctaagagcatcactccaaagccactccctaaaagtgtggggattttaaatgagtatgtctagagaggctaatgtttccaacttagtagtaaagtttatggcattcctgggaggactttttttaattttaatttaatttaatttatttttttatttttatttttttgagacccagtctcgttctatcaccaggatggagtgcagtggtgcaatctcggctcactgcaacctctgcctcccaggttcaagtgattcttctgcctcagcctcctgagtagctgggattacaggcacacgccaccatgcccagctaatttttgtatttttagtagagacggggtttcaccatgttggccagaatggtctcgatctcttgacctcgtgatccacccacctcagcctcccaaaatgctgggattacaggcgtgagccaccgtgcctagcccctgggaggatattttgagatagaagatttttaaaagactactcatcagttacataagatagagcctggtactttcagcactttgtatagctaagagtagttcaaaatgatggtatttttctccaaagaaaataaaccttagtgattaatattattcctacccacgcatggtttctcatgcctgtaatcccagcactttgggaggccgaggtggatcacaaggtcacgagttcaagaccagcctgaccaacatggagaaaccctgtctctactaaaaatgcaaaaaattagctgagcgtggtggtggacacctgtaatcccagctacttgggaggctgaggcaggagaattgcttcaacctgggaggcagaggttgcagtgagctgagattgtgacaccgcactcctgcctgggtgacagagcagaactccatctcgacaaaaagagaaaaaaaagtgtatatgtgtgtgtgtgtgtatatatatatgtgtgtgtgtatatatatrtgtgtgtgtgtgtacatctcgaaaaaaagaaaaaagtgtatatgtgtgtgcgtatatatatgtgtgtatatatatatatatgtgtgtgtatatatatatatatagttcctaaagggatcacaaaccttaaaagaatattatggggatgttttcacataattttaaaaactggaccttttggagataaaccaggcggaaaagaacatttttcatattgattttttaaattatgattttagggaattctgaatgtcaacaaacacagagcccaaatagaagcttttgttcgacttcaaggagccagcagtaaagattcaggttcagtataaaccttacataaatttccatactccttttttattctgacgttatacaatgaagaaagcaaagttgaaattgtcatgtcatatgtgccctgttatgtatgcctacatacattgggtatgtgagattgtggcggggggtggttcccctagctttttgtctataatttctgattttattgcaataaatttaaactacaacacagagaagcaaagtaacttgcccaaggtcacacacctggtaagtggtggagttgaatttgtagccaaggcagtttggctgtgattttaacatattagtctgtgctgcctcaatgtgctatattgctttattggagtaaattttttttaagtaataaaaatgaaaaaatgtgtaaataagttgtatcataatcaggtgtagttcttagttctgtaatgacagggtgaaaaagaaaccctgctagtcaaaggagcatggctgggtggagagagaatgagaaactggctttcttcgggcccttgctcgtcagcattccccctgtcggttctgccctatctatagttcctcagcccactgaccaatcccttggctgtgtaggatcctaaaggtatttgacagaagtccagcataggctcacatagttgcatgcagggaactaatacctttttaaaaggtggtgaaggggatggggatatttttttgaaagatgattgagggtggcacttatgaaatctcaatatacagtatgacatggtgccagcaattcttcattcctaacctgcagaacaaaagtttgactctacctttgaaaagaaaaagctttacttgcaggagtactgattagacttcgagtatatcatgcgcggaatgcctcactggtgtgccattcccttggctttatgggttttttctgtgctgccccaaacacagatttagtcagtgacatcctaatccacgggatgaaggctcgaaaccgctcaattcatggagatgtggtagttgtggagctgcttcctaaaaatgaatggaaaggaagaaccgtagccctgtgtgagaatgactgtgacgacaaggcttcgggcgagtccccaagtgagcccatgcctacaggtgagccagctgcagagccactccgatgtccatttttcttgtggaattatatttgtctcctctttagcaatccagaaatactgcccttattttatttatttattttatttaaattgacaaaaactgtatttattgtgtataatatgatgatttttgtgtatttactgtgtataatataatatgatgttttgatataatgcattggagaatgctagactgagctaattaacctatgcattaacctcactatgtgatgaaaacacttaagatctactctcttagcaattttcaagaatacagtacattgttattaactatagtcacaggttgtacaataatagttcctaacacgagatatagtctcttcctctccattatcaattttccctctctgcaggtttattttactcttatcagcacccaaatatgctgtaatggcttccatcttaaaatcaaaccaaaaatcctccctgagtcccatgtccctttcagctgctgccccttatcattaaagtcagagtatagttaactccacgttctctcttcctctctgctggtctctcatgcctgccattctgacacctcccaagccctactcctctaaaattgttcttgccaaggtcaccagtgaccccaytgcctgagcactggtcagcctccatcgtctggaagctgtcagcagcatttggcrgggkccctctgccttccctgggtctcctcccagttctcccaccctgctggctgctcttctcagttctcctcctggctctccatctcattgtcctcttgtatgtgcaagggccccatgctggatcttctgttctctgcgctctctccctcagggatctcctgcagtcctttaattttaattttaattttaatctctggcccttccttggcttccagttttgtttactcagttgtctatttggcatcttcccctggacgtctaatgggcatctcagacttaacgtgtcccacacagactcctgatttcacccctagacctgctcttccccacgtgttccccagtctcagtaaagggcaaattcattcttggtcaacccaagacaccttggggttatccttgactttttttttttttactcatcagtaaatgctggcaactccaactctaatgcatggcctgaattcagccacctgccatacttcccccacagctctcctgcttcagtccactggcacctcaggattgtcaaagcagcctcctcactgctcttcctgctcccacccttgcccctccccatgtagtcttttctccactcaaagacacaatgatccttcagaaagtgagttgagctgggtgctgtggctcatgcctgtaatcccagcactttgggaagctgaggtgggtgggtcacttgaggtcaggagttcgagaccagcctggccaacatggtgaaaccctgtctctactaaaaatacaaaacttagccgggcgaggtggtgcacacctgtagtcccagctactgggaagctgaggcacgagaatcgcttgaacctaggaggcggaggttgcagtgagccaagatcatgctactacactccagcctgggcaagagagcaagacattgtctcaaaaaaagaaaaaagaaaaagaaagcaagagttggctcctgtcatttctctgctcaaaactcctcaatggctggttcctgtttcactcagaataaaatccaaagtccttaccatggcctgcatggtcccaccagctgaggccaccttctgccattttcctcttcatgctttgctccagccgcagtgacaacttgttctttccaccacctggatgaagctttccccaaatatcctcacatctgttttcctcacttccctcaagtcactgttcaaatgtcactttatttaaaatagctgccacttctgaccctctgtcactcttgatcaccttaccctaccttgtgtctttcttagcaactgtcacaacttcacattttttttttttggtctattttccacccccacagacacccaaactgattttatataaaccccttgaaatcaaggactttgcctgttatggtgctgctatattccctgtacctagaacaaagcctcatacctggttggagctcagtaaatatttgtggaaaaaaaaaaaaaaaaaagaaaaaagagaacatttttaattattaaagtttggtctcggcttcagtcagtgatgattgaaagtgttgtgtatcagtcttatgatctgtacacttttctgtgtataatggaccaaataaggttagctggtgagagaaggcaagaaagactgaaaacgcgcagttgagggcacggtttaaaacaagagtgaaaatcattgacttttcccaatataccaaaatgagattgataagataatggcaaaagagagaaaatgggacaagtggattctaaatgttatctcaggaagagagagcatactgacaatgttattttaaaagttacccatctttgctgggtatgatggcacgtgcctatagacccagctacccaggaggatggattgagcccaggagtttgagactgtaacatattatgatagtatctgtgaatagccagtgcactctagcctgggcagcatagtgagatcctgtttcttaaaaaaaaaaaaaaaagaaacgaacaaaaacaaaaagtgtttttaaattatccatctttaaaataaaataccaagaaggcaaatcttcaaacataccttttcttgttgttgttatgtgtgtgttttggtttttgtttatgtgtttgttattgagacggcatctcactctgttgcccaggctggagtgtagtggtgcatctcggctcactgcaagttccgcctcccaggttcaggcgattctcctgccttagcctcctaaacagctgtgatcacaggcgcacgccaccatgcccagctaatttttgtatttttagtagaggtggggtttcaccatgttagccaggctggtcttgaactcctggcctcaagtgatcctcctgccccagcctcccaaagtgctgggattacaggcatgagccaccatgcctggccgttattgttgttaataaaagcttcctttcaaaaacattcttgagttgggtggatgtgcttgaaaaaaaataggacactgtatttcttgttcttttccttactgcttgaggtggtcagagtccagatagatggcacctaaccagttaatgccttgttttgttttgttttgccaaaggtcgagtggtgggcatacttcagaagaactggcgggattatgtggtgacatttccgtccaaagaagaggtccaatctcagggcaaaaatgctcagaaaatcctggttacaccttgggattacagaattcccaaaattcgaattagcactcagcaagcagaaaccctccaggtagttggcattctacctctactatgggatctctacgctttctccttctgtctttaccagctttttagcagtaccagaaagcattgttaattcctttgcatataaagaaagaaattattgatggcatctggcattccaagatactgggatgtgttttttggggtttttttgttgttgttcttttgtttttccaagacagagtctcactctgtcacccaggctggagtgtagtggcgtgatctcagctcattgcaacctccacctcccgggttcaagcagttcccctgcctcagcctcccgagtagctgggattacaggctcccgccaccacgcccggctaatttttgtatttttagtagagatggggtttcactgtgttggccaggctggtctcaaactcctgacctcatgatccaccacctccacctcccaaagtgttggaattacaggtgtgagctaccatgcccagccgtgtttttatgttttttaattctttttttgtagagatggggtctcactttgttgcacacgctggtcttgaactcctgacctcaagcagtcctcctgccttggctccccaaagtgctggaatcacaggcatgagccactgtgcccagccccaagattctgttttttaaaaattctaaatatatgaaaaccatccattaagtagtctgtggttaataaattcaggccagagagaaattgtcctagaaagagctgtgtaggacaaccagagagaacatacattatccagctgtccaacatagaaactttctatagatacactttgccaacactaacaagctttcctccagcaagcaatatagaaatacgatcactctgccctgtagggatgatgtagtggtacttcacagaattgattatccataaaggaatatagcactggagagaagacataaacaagaaggttagaaattaacctttacttgtgtcaaaaagtatgggcattgcccaatttaattccccctgatattttacagtttgtaaatgagacactaaagcaggatgtccccagccagtaacctagccattgtgcttttacatcttgaagccttatgcaggctctccaggccagttgcacctaatacattttccattcccatggtttgctggaattttggggtagtggggattcagtttacacgacacctkcttctccaccaaagaccatcttaagaggtcttcaaagagaccaggcgcagtggctcatgcctgtaatcccaacactttgggaggccgaggcaggtggatcacttgaggctaggagttcaagaccagcctggccaacatggtgaaaccccatttctactaaaaaaaaaaaaaaaaaaaaaattaggtgggcatggtggtacacgcttgtaatcctagctatgtgagaggctgaggcaggaggatcacttgaaccygggaggcataggctgcagtgagccaagatagcaccactgcattccagcctggttgatagagcaagactccatctygaaaaaaataaaataaaataaaatagacttcaaagaaattaggaactacctcccacacacaaaacattaagattgttgttttaaaacttaatttggagcatgcataattgagttttcccctagtgttgcaagcgttaactagaatatattacagttaactagaatatattacggctctcttcagcagactaaaatttccagccctcttcattgatgtagagaggtaatgcctcccttcaaagcattgggtcaagcatttcataycatctggcaatttagtaataggaagaatgaaaaacaaaaaaaaaaccctaccatacaccactatttgcacctggccactctccttggaacccmgtattgtttgcctcttgtttgtttgatgcctctaattgacccacttaactcctggtgctcagctgtgttttattttttccttttgtgcaggacttcagggtggtcgtgcgcatcgattcctgggagtcaacatctgtgtatccaaayggacattttgtgcgtgttttaggaagaatcggagatctggaaggggaaattgcaaccatcctggtggaaaacagtatttcagttattcctttctcagaagctcaggtcagattttccagaaggctttgatctagtgacattttctttttgcttttgttgttgtttcatcattaagaaagaaaagtctttgtgctgtggaacaacccactgtgtgaaggcacagataatggaaaaatctcaatcctctttattctatatttggaccaaactgaagtcagcttcaagtgtagaattagttttctatagcctcatagctctcaaatttttatattttccaactgggcttaaaaatgatatgtcagtgtctcatagtcagtatacatccatccccagcaactacaaggacacctagttacagacccaactgagctccacactctctgtccaaatcattcaaccagaggctgcataaagctgcagggggtggattcctgggatccatacatctccaacccatgggtcaaaaattatgctcattatgaaacagtttttgtgacctttacagaaaacaaaaatctcataaacataaaacatcagctatttccatcactttatgatcttttaaaaccctcataaatcttgtgtattattcttgaatgactatattcattgtgtgcacacactaatttctgttctgcttctttcacttaaaattatttttatatattgacatagcctacttattttaatggttatggtaaattacggtatattgacgtaccctagtttgcttaagcatttcttgatttttgggcattcagctgtctaacttttcagtgttataaaaaaatgtaggccaggcgtggtggctcatgcctgtaatcccagcactttgggaggccaaggcaggtgaatcaccaggtcaggagtttgagaccagcctggccaacatgatgaaaccccgtctctactaaaaacacacaaaaaaagtatctaggcctagtggtgggcgcctataatcccagctactcgggaggctgaggcaggagaattgcttgaaccagggaggcggaggttgcagtgagccgagatcgcaccgctgcactccagcctgggtgacagagcgagactgtctcaaaaaaaaaaaaaaaaatgttactttgaacatttttataaacaccgctttttaatttctttttgatcattctcttggaatgtaatccttaaagtgagattaccaagtcaaagggtataaaagatttaaatagcttctaatatgtacaagcagattgttctccagaaaaattggacccatttgcattaccataaggagtgtctgggtgttcttattttcattaaagtttttcacagaacgggagctatcatagtaaactattttagaatattttacatcattaaatttttatatttaacattagtttctggaaattatttgttgacttgtttggcagctcttagtgaaaatgttacaataaaataaagtgtgggctatacatcataggactagaattttctcttcccttttagcctacttaactgcaaattgatggcttaaacagataataatggagagaaaatgccctagataggtcctgtataaaattatctttaaggggtaagcttttaatatttggaacatgttgattatttttttcaaggcttaaatttaaagcttgactacatttaaacaaatggatcatttgaaaatgggctacatgttgtactcttgttccaagcccctgtaactaaagaggctggtagaagttgtgggacattttctgtccaactgtaagggtcctcaggggtgtaggactttgtctttcttgttgactcctgactttccagagcccagcacagtacctgggatatctgaggcacctagtaaacaattattgatcaaaggaagccaacataggttgatgaagaaggtaattgmgaatgaatgaatttctatgtggtcatactgagawtattagtgagtggatttttacagaaatttgtggtgcatgaattgctgaatatttggtttctcatacagatgtgtgagatgccagtaaacacaccagaaagtccctggaaggtgagtcctgaagaggaacaaaaacgtaaagacttgaggaaaagccatstcgtattcagcattgaccccaaaggttgtgaagatgtggatgacacactctcagtcagaaccttaaataatggcaacctggaacttggggtccacatcgcagatgtaacacactttgtggcaccaaattcttacrttgatattgaagctagaacaaggtaatgctatttgaaatcagctctatggttgtgtgtatgtgactggatattttgtgtctgtactagtttcaggtgttcaaagatctcatgtttgtgcaattttgaaggtcccttccagaaaaaaaaagttgaggtccactctccattttcctttagaaaaacagtaccttgatcaatttacctttgctttttaacataaccttttcacacattgtttcctactaaatcgaaatgggttaaattttcatgtagtaatatactattttttaaaaatactggatcattacactccagtttttcttatacgacaaagattcatgtcacttgctctttctttctcttatcagtggaagaatattcagcccaaagcagtgtcacttagaaaagtgggaccatgggaatagttttattacccagtctgctgcactttatgaaacagcaacagccttggggaatctgtagtgagattttggccatttacctccctgcggcccacacagtcagcagttctgcttctccctgctaaaggtcgcgttgccgcgtgtgtgtcattcacagggccaccacttattatctagcagatcgtcgctatgacatgctgccttccgtcctcagtgcagatttgtgttcccttctgggaggcgttgataggtgagtttatggcttttgtcttcaaagcttgtcctggcccttctgtggctcctgatgctgcctgcttctggcctcatgtttcttctctgctatgccccaccccagccctgtgtctcccctctgacctctcaacctcacccccgaccccaaccccacaccacttatctttaggcagctttatttctctagccttccctgccctttccctcctctcttctgtctgctagcagtggggctctgcgtctccctctgttgctggctttttaaagtcagctaaaatctgagaacaaatgtatgtagctttgtgcttatgcattccctggcggaagttgtttggcatgaggatcatgaactcggggagttttttgtttrttcatttgttgagtttaaactttgtttctctttgaatagctaatagaatcatataggcccgaactcatatgtcccaagaggtatttaatgaaaggttcctccctatcactttccctcacttaccagttccgtattagtttttctagatataatacatacatgaatatgcatatgtgatcttttttacacaaatggttgcattttatatatatatactgtttagcaccttccttttaaaaaagaacttaatggtatcttggagatcattccgtattaataacagttgcactatctatggaaatttggatagtttccaatcttttggtattacaaacaaagctgtactgagttaactttgaacataagtcatttcacattttcatttttatttttattttttgagacagagtttcacatgttgcccaggctggtcttgaactcctgtgctcaagtgatccttccgccttggccacccaaaaagctgggattacagatgtaagccaccatgcccagaccatttcacattttttaaaatacagtatatgtgaaagagaaattcccatatttgattatgggatttctgtgtcaagagtatgtgcatttgtgtttagatcaatataatcaaattgcccttcttaaatgttacaccagttatattcctgtcaccaatgtatgagagtgcatattttcctatagccttgccaacacaatatgttgtatttttttatctttgccaatttgatagatgaaaaatggtatcttagattggttttaatttgcattacaaataaagctaaccattttttcgtatgtttgtcacttatgtatccctttctgttaactatattcttcgcccatttttcttttggattcaagatcaattactgattaatttgtaaaagctctttacatattaggaaaattagccctatgttttttatgagttccaaatgtataccttttttttaaataaaatgacttggtggcaaagagtttttttactaaatgaaatttttgctaatttatctgtcatcaagattgatatcacagttcagtgccatcctgtaggatttgcaagactttgctctaatttactgagctaaaaagacttgactctatcagtgtcatgcttttctaatcaaaatagaggacatggccgggcacggtggctcacgcctataatcctagcacttcgggaggccaaggcaggtggattgccagagctcaggagtttgaggccagcctgggcaacacagtgaaaccccgtctctactaaaatagaaaaaattagccaggcatggtggtgcacgcctatagtcccagctactcaggtggctgaggcaggagaatcacttgaaccaggaagaggtaggttgcagtgagccgagatcgcaccactgcactcccacctaggcaacagagcaagactccatctcaagaaaaaaatggaggacataaagtaaggtttgtaatgtcacatatgaactcatttcaaatttgttcagagctcaacagtccccagtctaactttgttgttttaatttaaaatattttttgatttagttgtaaggtggttggattgacaaaccagaaacctgtagctttgtaatttcttttaagttacagttaggtcaaattccacttgcttcaaaaatagaagacttaggtggggcatggtggcttacacctgtaatcgcagcactttgggcaggagaattgctcaagtccaggagattgaggcagcagtgagcagtgatcatgccattgcactccagcctgggtgacagagcaagatcctgtctcaaaaaaacaaaaaacaaaaaaagccagatgaatttgaatagtgatgttgtcaatgttactgtttttgtaggtatgctgtaagcatcatgtgggaactggataaagcctcttatgaaattaagaaagtgtggtatggcagaaccattattcgatcagcatacaaactgttctatgaagcagcccaagaactactggatggaaacttaagcgttgttgatgatattccagaattcaaagacttggrtgagaagagcagacaagccaagctggaggagttggtgtgggcaattggaaagctgaccgacatagctcgccatgtcagagctaaacgagacggatgtggtgccctggaactggaaggggtagaggtttgcgtacagctagatgacaaaaagaacattcacgacctcatccccaagcagcccctggaagtccacgagacagtggctgaatgcatgatcctggccaaccactgggtcgccaaaaagatctgggagagcttccctcatcaggccttgctgcgccagcaccctcctccacaccaggagttcttttcagaactccgggaatgtgctaaagccaaaggcttcttcatagatacacggtattcctcttttgagggggcagaggaatggagtggcatgctgtatatttagttatcttacagttgttcttaaaatgtgacagccagatctttgaccaaaaagagaaaacagattcttggctctcctcatttttgaagacacatttttccctcttcattgttatgtatagagacttaaaacaagtttatttaggcataattttgttccttggttttttgtttcaatttttttttagatagagtcttgctctgtcacccaggttggagtacagtggtatgatctcggctcactgcaaccaccacctcccaggttcaagtgactctcctgcctcaggttcctgagtagctgggactacaggcacacgccaccatgcctggctaatttttttgtatttttagtagagacagggtttcgccatgttggctaggctggtctcgaactcctgacctcaagtgatccacctgcctcggcctcccaaactgctgggattataggcatgagccaccacactggacatttaggcataattttgacccactacaatttgggtttttttgttcggttggttttttttttttctttgagatagagtctcgctctgtcatccaggctggagtgcagtggcacaatcttggctcactgcaacctccgcctcccaggttcaagcgattctcttgactcagcctcctgagtatatgggattacaagcatgtgccaccacgcctggctaatttttgtatttttagtagagacagggtttcaccatgttggtcaggttggtctcaaactcctgacctcatgattcgcccgtctcggtctcccaaagtgctgggattataggcatgagccactgtgtgtggctgacccaccataatttgtaatacagaagtagggaacctgtyagttacccttgatttaatttcatgtaccccttaagttacaaagaaataatcctatttatttcagtacttttaaaatgcagcatctttgtgacaatatcataagatactacaccaacagtgaatttataccaccctcaattgagtgagacatttttactccctatctctaggataaaatacttctttcattaaaaaccaagtataggcaggctgggcacagtggctcatgcctgtaatcccagtactttgggaggccgaggcgggcagatcacgaggtcaggagatcgagaccattctggctaacacggtgaaaccccatctccactaaaaatacaaaaaattagccaggtgctgtaatcccagctacttgggaggttgaggcaggagaatggcatgaacccgggaggcggaggttgcagtgacccaaaatcgcaccactgcactccagcctgggtgacagagcgagactctgtctcaaaaataaataaataaataaataaaaactaagtataggctgggtacagtggctcacacctgtaatcctagcactttgggaggctgaggcaggcacatcactgaggtcaggagttcaagaccagccttgccaacatgatgaaactctctctgctaaaaatacaacgagccaggcgtggcgcactcttgtaatcccagctactcagaggctgaggtgcgagaatcgcttgaacctgggaggcagaagttgcagtgagccaagattgtgccactacactccagcctctgtatggtcactgtatgagctgtctgcatgccaggcacatgggacaagggctttcagacatcctcttggttaattcttaatgctgaggtgatggcagcatcattcatatttacagataagtcaattaagtctgaagagattaagtaatttgcctgtaatttaacagtcagggcagagccaagatttgaatccaagtctgttaaacttgcaagctcacatagtgaccacttaacaccttgcctctctgttcatcatcatgctctatttctcctttcccccttttcccttagccagccacaatataggactgaattatatgttattagttttatttttaatatacctctatatttcctggggctttgaaattattattttgaggctgtatgcagtggctcacacctgtaaccccagcactttgggaggccgaggcaggaggatcactgaaggccaggagttcaagactagcctgggcaacaaagtgagaccctgtctctacaaaaaaattattttgagaataaataaatagaatgcttactacctctttaaaaaagaaaaactaatttaggtttcttttacttgtacaccaagtccattattttaccyatatatagaatgtttaaggttaaggatgtaaagaattcaattcaacgagtatttgaccacctattatagccaagcactaacttaacctagtattaaaatcagtacatgattcatttctacttaagaaatgtatttaaattctgacactcttgttttgtttaagccgtaaagcaaactagatttctgtagttgaaaagaggtgcttctgaaacgtgtccaaaacaaatttactggcagatgaaggtattcagacggatgagtgaagggttcccctcaaagtgttgtcttgtaaattactgtctgggactagctaacggtttttctgttctttgtcaggtccaataaaacactggctgattctctggataatgcgarcgacccccacgatcccattgtgaacaggctactgcrctccatggccacgcaggccatgtcgaatgctctgtacttctccaccggatcctgtgcggaggaggagttccatcattacggtgaatcataccatattcctatgtgtggctgtaactttgcgctagttattttaaaatagtttttgtttattttgatcttttgctttctttttgaaggtcttgcattasataaatatacccactttacttctccaataagaagatattcagatattgtagtacaccgcttgttaatggcagccatttcaaaagataagaaaatggaaattaagggaaatctgttcagcaacaaagatcttgaggaattatgcagacatatcaacaacagaaaccaagtaagagggaatttcaaaattctcttacctgtcatctcttgctaagaaaatatcagctttattgtgtagtaccgtgaagtatcatatattctagcaaattaaattctagaattattctaaccagtgctttcagaacatttgtagatgttctcaggtaacttgtggatttgggagatttgacggtagattatcagatttttttttttccgaaaggtggaaatgtaaagattcaagcaacgcataaagatatgatgacagaggccagacgtggtggctcacttgagggcggatcacttgaggtcaggaatttgagaccagcctggccaatatggtgaaaccccatctctacaaaaaatacaaaaattagccgggtgtgatggcacgcgcctgtagtcccagttacttgggaggctgaggcaggagaatctcttgaacccaggaggtggagattgcagtgggccgagatcacaccactgcactctagcctgggtgacaaaattgagactgtgtctcaaaaaaaaaaaaagatatgaagacagaaacatcacctgttatcttaccacccagagctaacaattaatgattctagacactgctaacatttttatttataaaaatatcggccagatgcggtggcttgcacctgtattcccagtactttgggaggctgaggcaggtggatcacgaggtcaggagatcgagaccatccgggctaacacagtgaaaccccatctctactaaaaatacaaaaaattagcatggtggcaggcgcctgtagtcccagctactcaggaggctgaggcaggagaatggtgtgaacccgggaggcggagcttgcagtgagctgagattgcaccactgcactctggcctgggtgacagagcgaaactccgtctaaaaaaaaaaaatcacaccgtgcctgctgtttgaatctgcttttttcatgtaacccaactgttattgatagcacaccatgttatatcattgttttgaagctgctttctattctatttcatattactagttgctacaagattgcacagcatagaactagactattgggtaacgcaggaaattggaaactacctaaatgtttaatgtaattttctatatccaatggtatagttgtctgctgtgcaatgttgtagcactagccatgtggactacctaaatttaattaaaattagaagtagaaatttgtctcagtagaaatttggccagtgtctcagtcacactggccacattgtatagctcagtggccacttgtggttagtggctacatattaggcaacacagatagagagcatttctatcattgcagaaagttctgttgggcagcactgttctaagcaatcaaatttataaccatccttatggatacacttatacagacatttcagatgatttcctggaaaaattcctagaaatggaattgctgagccaaaaggtgtgcatgcacaaatgaaactgataggtcaggtgcagtggctcaygactgtaatcctagcacttttcgaggtcgaggccggtggatcacctgagttcaggagttccagagcagcctggccaacatggtgaaaccccgttactactaaaaatacaaaaattagccaggcatggtggtgcatgcctgtaatcccagctaatcgggcggctgaggcaggagaatcacttgaacccgggaggcagaggttgcagggagccaagatcgcrccattgcactccagcctaggcgatagagtgagactccatctcaaaaagaagacaaagaaactttaatacatattactaaattgtcttccttatcagtagtgctaatttagacttccaccaatagggttttcattggacaggcttgaaaagaaagaaaggctggccgggcgcggtggctcatgcctgtaatcccagcactttgggaggccgaggcaggcggatcacgaggtcaggagatcaagaccatcctggctaacacagtgaaaccccatttctactaaaaatacaaaaaattacccgggcgtgatggcaggcgcctgtagtcccagctactccagaggctgaggcaggagaatgacgtgaacccaggaggtagagcttgcagtgagccgagattgcaccactgtactccagcctgggtgacagagtgagactccatatctcaaaaaaaaaaagaaatgcaagtaagacatgtgtaatacttttcctgtacccaaggtgaacatgacccaaatttgctgatctctaatttcatgaactataaatgggtttcattttataaaataattcattttctaagacatttttgaggagataatactagatggttaagttcccacaaaaagtaatttaatttcatagtagagaacaatttttatattaatagttttacagaatctcacatttgaatgaatatgaatttcgtttctttggggaatgccaggggagtgttaaaatgctttggagttgtgcttcttacaggcagcacagcattctcagaagcagtctactgagctcttccagtgcatgtacttcaaagacaaagaccctgccaccgaggagcgttgcatatctgacggagttatttattcaattagaacaaatggtgtgcttctatttataccaaggtatgttacatctaatgcaatggtgcataagaaatcatagttaaaagtgtagaacacaaactgtacattagatataatttattaaaatatttaagcaactagttatcatatgtacataatgtaatgtataattcagtatataaatgtgaagattggaggccaggggtggctcacgcctataatcccagcactttgggaggccaaggtgggcggatcacctgaggtcaggagttcgagaccagcctggccaacatggtgaaaccccgtctctactaaaagtacaaaaattagccgggcatggtgacgcatgcctgaaatcccagctacctgggaggctgaggcaggagaatcacttgaacccgggaagcagaggttgcagtgagccaagatcgtgccactgcactccagcctgggcgacagagcaagactctgtctcaaaaaaaaaaaaaaaaagtgaagactggagtgtgtgtgtgtgtgtgtgtgtgtgtgtgtatatatatacacacacacttctatatccattttagggtctttcttatccagcaaaatactttgtttccatctgctaaggtgaaataaatacgtggaggtaaaccacaggaaaagtgatttgtttttaatctaggagaaaaactagtattctagataagcatacaagatctgtgtactaagaatacattgtctctggatttatattctggtcataatataggtttgggattaaaggtgctgcttatctaaaaaataaagatggtttagtcatctcatgtggcccagatagctgttctgaatggaaaccaggatcccttcaacgatttcaaaacaaaattacctctactacaacagatggggaatctgttacgttccatttgtttgaccatgtaaccgtaagtctgtgtttctattaagtattattaatattttaaatgtaaggaataaataatgtgatttagtaatatgtattttcttctctatgctaggtaagaatatccatacaggcctcacgttgccattctgatacaatcagacttgaaataattagtaacaaaccatacaagataccaaatacagaacttattcatcagagttcccccttgctgaagagtgarttagtgaaagaagtaactaaatctgtggaagaagctcagcttgcccaagaagtcaaagtaaacatcattcaggaggaatatcaagaatatcgccaaacaaagggaaggagcctatacacacttctagaggagatacgggacctagctctcctggatgtttcaaacaattatggaatatgagaggctcttacttcactaagagctgtcatatgtgaatgttttacagtcttttcaaacttaacatttaatgtgtgtcactcagtgctctagtcgatcaggactgggtagctatttcgcatatatgtaaaatgttctcagccgggcacggtggctcacgcctgtaaccccagcactttgggaggctgaggcgggcggatcacgaggtcaggagattgagaccatcctggctaacacggtgaaacccagtctctactaaaaatacaaaaattagcccggcgtggtggcatgcgcctgtagtcccagctacttgggaggctgaagcaggagaattgcctgaacccaggaagaggaggttgcagtgagccgagatcgcaccactgcattccagcctgggcaacagagcgagactccatctcaaaaaaaaaaaaaaaaaaaaaaaaagttctctcattcattaaagttgcattaaataaagtataattaggtcactatggaaacagagttttcagtaatgagtggacagtaagtggtggctctgcagatggcccctttctaataagtttaataaacccgaaattactggttatctcgtctccaatcagttctttcaaatgttttatttttccagtaattacgtttgggtcataggcccctctgacatttgtcaggtaattttcagtcactttcagataataagacttagtcctgagtccacttctccacttaaaaattcctatttcatatttgactcaacccttacctgctgtctccagtactagctgggattaggacacagggcgggtggtaggatgcacaggtaaagttctgtcacaggccttccttcccactctcccattttgatgaggtgcattggccttccccttgttggaaacttgttactttgccagcaaacaccccactagaaaaattaactctaggctgagcgcagtggctcacgcctataatcccagcactttgggagtccgaggcgggtggatcacaaggtcaggagttcaagaccagcctggccaagatgattaaaccccatctctactaaaaatacaaaaattggccagggacagtagctcatgcctgtaatcccagcactttgggaggctgaggggggtggatcacaaagtcaagagatcaagaccatcctggccaacatggtgaaaccccatctctactaacaatacaaaaattagccttgtgtggtggcaggtgcctgtaatcccagctacttgggaggctgaggcagagaactgcttgaacccaggaggcagaggttgcagtgagctgagattgcgccacagctctccagcctgggcaacagagcgagtctccatctcaaaaaagaaaaattaactcttctttctcagttatctaatgtagtttgtgagggtagacagaagcctgaacctgccctcctgaggaagcagtttctataggcattggcatcttgaaactgctctccatcttctagctgatcccctattggctgcagttagccacaatcctcctaatgcacatgcttcttggcccatccctgtggcagttcccagcaggcccacaaacccctcccccacccccatcccagatgttctccttgatgttcttgtgctcaacttcctggcttttcttaaattttttttttttttttttgagatggagtgtcgctctgtcacccaggcaggagtgcagtggcacgatctcggctcactgcaagctccgcctcccaggttcacgccattctcctgcctcagcctcccgagtagctgggactacaggtgcctgccaccatgcccagctaattttttgtgtgtgtatttttagtagagacggggtttcactgtgttagccaggatgttctcgatctcctgacctcgtgatccacccacctcagcctcccaaagtgctgggattacaggcgtgagccaccacacctgagctaacttcctggcttttcaatcaaaccatctttgtcacttcctgtccccacctgaagtcagaaagcctgaagagaagatgcctgcctgtcctggctttgcagatggaagccactatagcaccatcactctgccctttccccaaggaaaaagagagtgagaggccaagtgccatggaagatcacttgaggccaggagtccaggaccagcctggtaaacatagtgagacaccatctctacaaaaattaaaaaagtagccaggcatggtggtacatgtctgcagtcgcagctacttgggaagctaaggcaagaggattgcttgaaccccaggagtttgagactgcagtgagttaggattgggccactgtattccagcctgagtgacagtgagaccaacacacacacacacacacacacaatagtggcgggggactgtgggtaggggtgagggggtggggtgggagagcctttcctaacactaacctttcttatttgtaactaccccctctacctggcaggaagaactccaatcaggtgttctcacgatttggccctaacacatctaacctcaaaatcagcattcctaaaatctgccttatccccttaatcttatttctgtatcattattgtacatgtgcttcccaatacttggaatctcctccaccaaaagcaaagtctttcctgtaaatcctcccgagatgctatgttccccacgatactttgcaagtttcactccaactagtcagtaagttcccaaaaagcattctttgaactaccctagcacctatgagggccaggcaatgtatcggcctttcatgtgaccttttaactattaaagtaactccttagaaaacatgtaaaaatcttgtatttaccaaaagtgtaaactgcagaactatatagcaatgaaaacctcccataaagcctgtagatagtttttaagataatttttacttcttttaaaaaattgacattaatattcagtatatatgtacatctcaaaacttcacccaggctgggcgcggtggctcacacctgtaatcccagcactttgggaggccgaggggggcggattacctgaggttaggagtttgagaccagcctggccaacatggtgaaacctcatctctactaaaagtacaaaaattagccaagcrtggtggcacacgcctgtagtcccagctactcgggaggctaaggcaggagaattgcttgagcccaggaggcagaggttgcagtgagccaagactgtgccactgcactccagcctggccaacagagtgagactctgtgtcaaaaaaaacaaaacaaaacaaaacaaaaaacttcaactagactactctgggcacactgtccatggattagccctgctttgcaaggagcagtaaaaaacagaaacaaaacctcccaacttagtgaaaacaaggcattcaatgacagaccagcagcagaaactgcttattacctcctaatcattttatgaagaaatacctatataaaaacaaacactaaagagaacaaatagatttaactaaagtgacaagcataattataaataaataccagattatcagattttaaacaataatctataacagttttactatctaaggattttcactccaagaagaaaaaatacatagtaacgccaagcttgcaggacgatgacttaacagatacattttctcttaatggaaacttatctagcttcagtaatatttctggatgtagcatcaagttgctgttgcacatttttaaaagactggtccagcagtgtttcctcttcatttaaagtattggcaatagcatcattacatggattgtccagaatgtcttcgtttaatccatttgactcctccttttgatcctcatcagtattaacctcttcaaccgtgtgtgccctgggtgtattcattaacatatctgaaagaaatcataccattattattcattataagtacctgatccaatcttaccgcatgagtacaaacctcttcaaaagctcagtttagtaaaatgaagtctaagatcacttaatgttaattatgatcactttcttctaaatatatctttttttttttttttgagatggagtctcgctccatcactttggctggagtgcaatcgcacgatctgggctcactgcaacctccaccgggttcaagtgattctcctgcctcagcctcccgagtagctgggattacaggtacccgccactacacccggctaattttggtatttttagaagagacagggtttcactatgttggccaggctggtctcgaactcctgacctcaggtgatccacccgcctcaggctcccaaagtcctgggattacaggcgtgagctaccacgcctagccaataagcccatttttatacaattaagatccattttaaatgcaagagaggccaggcccgatcccaacaatgtgggaggatcattggagctcaggagttcaggaccagcctgggccacatagtgagaccccatgtcaacaaaacatcaaaaaaaataaaataaaaaaaaaaataattagctggctatggtggcgaaccatgatcgtgccactgcactccagcctgggtgacaaagtgagatcctataaccaaaaaaaaacaaaaaaaaagcaaaatggttttgaatgttattcaactcacactcttggatcatagtcaaatgtaactgttcttattcaaaatcaaactactattggccaggcacagtggatcatgcctgtaatctcagcactttgggaggctgaggcaggcagatcactcaaggtcaggagtttgaaaccagtctggccaatatggtgaaaccctgcctctacaaaaaatacaaaaattagccggacatggtggagcacgcctgtaatcccagctactcgggaggctgggacaggagaatcgcttgaacctaggaggcggaggttgcagtgggccgagatcagcaactgcactccagcctgggcaatacagtgaggccccatctaaaaaaacaaaactgaaaactactagaaagaggtctaataaaaaccaagtgcgtttaggttttatgtcagagtgatccataagaaactttaaagtacttatttccatttggacaaattttaagttgtatatgataaacagaggtgagctttaaataccaactgccaggtatacttgatattgacagcaaagaagccactgccatcaagaataatgctatcttcatgtaatgtttcacatggtactaataaaacatccatttataaagaaaaagtaaattggccaggtgcggtggctcacacctgtaatcccagcactttaggagaccgaggtgggtggatcacgaggttaggggatcgagaccatcctggctgatacggtgaaaccctgtctctactaaaaatacaaaaaattagccaggcgtggtggcaggcacctgtagtcccagctactcgggaggctgaggcacgagaatggcatggacacgggaggcggggcttgcagtgagccgagatcacgccattgcactccagcctgggtgacagagcaagactccgtctcaaaaaaaaaaaaaaaaaaaaaaggaaaaagtaaattcagctgggcatggtggctcacacctgtaatcccaggactttgggaggctgaggcaggcagatcactaggtcaggagttcaagaccaccctggccaacacagtgaaatcccttctctactaaaaatacaaaaattagccaggcatgggggcacgcacttgtagtcctagctacttgaggaggctgaagcaggggaactgcttgaacccgggaggcagaggttgcagtgagccaagatcacgccactgcactccagcctgagctacagagcaagactccatctcaaaaaaaaaaaaaaaaaaaaaaaaaagacaaaaagaaaaagtaaattcatcttaactgaaaaaaaaagtagccaaaataattttcacttaaaaatgttaatatattgggtgaaacttcgtttacaacatggtatctagttattataattctttttttttttgtagagacggggactcactatgttgcccaggctggtcttgaactcccaggctcaagtgatctgcccacctcagcctcccaaagtgctgggattacaggcaagagacactgtgctgggcctataattcttatttttccattttgaaaggaaaaactgaatgggaaattaagaaagatatacgcaatcctgcttacttcattcaaaaccaacttgcaattctttctaaatatagttttaacaaatttggttatatagtttccaaacccacaatgtgtgttaaaaacagcaaatttaggccaggtacactggctcatacctgcaatcccagcactttggaagcccaatgctggaggattgcttgagactagaagttcaaggctgcagtgagtcaagatcacaccactgcactctagcctgggtgacagattgacaacgtttctaaaaatactaataatatattttttaataaagcaaatcttcaggcagttttagaagtgaaaagggaatgctaaagataagcaaattaaacagctactttcaaaagtacagctcacaaccaagtgacaaaacacaagaaaaagcatttttttttttttgagacggagtcttgctctgtcacccaggctggagtgcagtggcccgatctcagctcactgcaacctccacctcccaggttcaagcgattctcctgcctcagcctcccaagtagctgggtttacaggcagg

SEQ ID NO: 95203 - DNA, 13689 bp, Homo sapiens
tttcttttcttttcttttcttttcttttattattattatactttaagttttagggtacatgtgcacaatgtgcaggttagttacatatgtatacatgtgccatgctggtgtgctgcacccattaactcgtcatttagcattatctcctaaagctatccctcctacctccccccaccccacaacagtccccagagtgtgatgttccccttcctgtgtccatgtgttctcattgttcaattcccacctatgagtgagaatatgcggtgtttggtttttttttcttgggatagtttactgagattgatgatttccaatttcatccacgtccctacaaaggacatgaactcatcattttttatggctgcatagcattccatggtgtatatgtgccacattttcttaatccagtctatcattgttggacatttgggttggttccaagtctttgctattgtgaatagtgccgcaataaacatacgtgtgcatgtgtctttatagcagcatgatttatagtcctttgggtatatacccagtaatgggatggctgggtcaaatggtatttctagttctagatccctgaggaatcgccacactgacttccacaatggttgaactagtttacagtcccaccaacagtgtaaaagtgttcctatttctccacatcctctccagcacccgttgtttcctgactttgtaatgatttccattctaactggtgtgagatggtatctcattgtggttttgattttcattcctctgatggccagtgatggtgagcattttttcatgtgttttttggctgcataaatgccttcttttgagaagtgtctgttcatgtcctcactactttttctaagattttctccagcatctaccagggaaggtagagaactttgttgctttctgagccagttggaatttgatggccagccatggtagtattatttctgttcaggagtataattaattcttgcctagtggataacatctggaaaacgttctcaaggaatacctgcccctcaaatgtaaactgaaaataaaaatttgcctaataggtaaatgagtgatcagaacttcagatgtggttgggggatgggtggcaggaggaaaaggttttaactcaggcctcacacatatataggactgaaatttagactagtgacatccccaaataatgattattttgtgtttgtgggtattaaaggtgttaattttttaaatataaacattaaaaatacactgtaatgtgatttcttgtcattaattttttaatgtattaagagattttcaaaagataagtcactctgatctgttgtgacactgaaaggcaactttgaatagtaattattctgatttttaaaaagttacccaatcagtatttcattatgttgcgctaggtgcagatttgaacttcaattccaaattaagcaagcaaaactctttgtcaaattgtcttagcattactgaaaataatacttcacattttgtgttgtgccttacggggtttcaaagccttttcataaagctttaatatttgcaataatccctttgacaggtgaggcgagcatttgtttctctacaggcaagggaatgcctttttaatggggatgattttatatgccttaaaagtttcagagaggttgatgagagtttcaacagtataagtgagtagaagcgcccacttaaatgcgacatgtaagtggatcagaatagaaagtgtttaaaaccaaatatgcaccagtatttggactaataggagcatcaggagagtgtctggaggaagctaacatccccatgttctttatcagcatctcctattgtttttggcacggctaattaatgttttctgagtcttttgtaaagtgtcacataaaagcagcttcaatgaccccttccaataccaaactcctcctgaagagatacttaccttggaaccaaccctggcccttttctgctcagtttggctgtaacttgctttttatccctagctagccttgtcttgacttttctgagactgaatttttaatcttcagtctttaaaatgaaggattagattttgatattcgagatcattccacctctatgagtcttccctgttacacaacactacacatctctaatagccaggaacagttttgattaaacagatgcccaaatggccttacctaatttgagaaagaaaaagaaattcataaaggtcatttaaaaaagggattatgtgattgatggcaggctttgctaactacatgttctatttgctgggggaaggggagcagcatccacagtcttttggtaagttggtgccacataactttgagattgtgatgagtgtgcacaaacttgactgttgtactctcagaaaagtgatttgacccctgtgataagcagaaaataaaagattcctgtcctccaactccgccagaaaaaccatactaagataaaaaccatatgcaggaagccatgatcaactggagaagagatggcgtggccaaagttctaatgctacctgtcagaaaacacccccttttgcggaaaaccatcaattggacaagaaatggtgtggccaaagttctaatcagaaaacaccccgttttagggaaaaccatctttacaggtgggtagatccaaactacatcaagcagtactccagaaaaaaaaaaaagatttgttttttagcctcaatttagagctaatgtcctttaaaatgaatcttgagtccacaaatatcttttgaacactcattacatacaagatgcaatgcttggcactgtgagaagaagtcctagaagatacaccctgtgctctaaaaagacctattcatctagcaagctattacatttttgtgcaaataaaaactgtttaaaggtgcgcatgtgccaaattcaagaaatgataccaccttagtcagcacttgatagtgttcaattttattttggtccattaagtgatgctgtttttggttacctgacatattgttcagcattccacatgatatagagtggagaactaacaggactgtaattcatcaatttccctgggatggttgcatttgtatgttagacaaaaacttctgtcctggtcagctgcaagtgcagagatggcagagaagctagttgctatccttcaaagtgccacaaagtcacgggggagagtatggacaaagcaggctgaagccagcgctctcaagttttgctgcccacggccttctgtaattggcacatggacattattctaacagcgatagacggtggatacaccaaagcagaaaatgaatgggttggttggggctggggactcaaaggagacagtcttgacagcaaatctagcagctaaatccaaattaagcaaacctgctaatgccactcacttaaaaaaaaaatctttcttgctctcgcaaccagagcacccaagcatgataactgagaccacaagaaaaggacaatgtgtgctgaaaggaaatttgagggctaacttctgttgagggtaaatttgagtgatattttacttatgagcagaaatccaattttaatgttgagaaagtgagctctaatggtccgtttggagcagtgagaaggacgctcttctctgaaacactgcatcaaggacaagaccacgtctagccggaatgagaagaaaagtttctggtttaccctaaaagtgaagtgaaaacaacactggggaagggaggagatgttgtggggggtgggggcgcatgggcggtagaggtggagagccttggaaggacaggttgtttaactggaagcaactaggggcctacattatacctattttctgctatcatctagaaatcaaagcagcagcattagaaaaattcacccttgttccctttttgtattggctgtcaagaaactcaacactgcttctgaacctttatctcatcaacagcaaatatgtcagcagaatataataatgttttcatagtaccctgggttaaataaaaaggctgctgtagggctagaggctactgctgagggctcctgggaatgagcatctaaggaatgtcagtattccatcagtggcagttagtggacacacaccagttaggagattctgaattacaaattggcctattatatgtatctatatcttatatattacatattatgaattggcatattatatatatcatatgtatgcatatataccatatatgatcttagttttaggcccatatattggtccatatttttgtagtacttgttctttcctcataatagatggcgttatatcttttatttctctttacataatcttacttgattttaatttcaaatttctcagttattctttaggtaacgtgtggagtacaaatttaaaataccatgcatattacttggtgtgtttgctgtgtgctaggacctatgattttactgctgtaaacccacagcaataataataatcctacttcttggcagggtgaggaagccagcttttttgaggattggataaaatcaattcagataaaacatttagccaatgcgtggcacctagtaggtgggctttacacggtagacttattatttttccatttaatactccaatttccctttgtggggaatcggggggataagaaaatgcaagcttcaaggagtaaagggctggacacaaccacatagatacaagacactaagcaagaattaggagtgctccctggcttcaaagctggtgtctaaaacgtctatcccctaaggggcccttgtatcgtgtcatgtgtcagaccccgggttgaacgcgaggatttttgtgctgttcccagggtctctcaagagctctcctagtaccgacctccttgtgctcggtggcccctggcccgaggaccccagatgggtggcggagaaacgcaggggatagagactagccccctagccgggctccgtgggcccggagtggattcaaggaccggtggcagagggcgactgcaagttggccccgcaaagccaacaaggggaagggtagggtagtgacgacatcacctggtccttcaatagcctcccgggaggcttcaggaactcacatctctttcccttgacgaacaacgcaggtggtttgctgaattaagtgttcccgccccaaattgagatacaacgggctttttagccagattggcgcagactgggagttaaatccagcattttcccggcaaagctgagcctggccgccgcggagccctctttccgctgtgcggtgcctccggctccgatcgcgggcccggcgccccgggacgcgccgccgagggtagctacgcggccgggctgcggcctctcccggagagcctgcgtgcgtggtctctctagcttgctgcccgccggccaggaaaactctggggacaagctggagctggcggaggttcccatccggccacccttcccgtctgatttcctgagctgacggtcaccgccggcgttcggggaccagcggttccctgtgcaaagggctcgtttctcgatcgccgctggatagaccgcaaccgggttctcagaaaacacccgagctacagaccgcatgtagctttaaacagtttttaaaatgcgattatgcttgcgtctttatgaaagcacatggatgcagttatacgtatgcattaaaaaacacaaacaattctgcattgattgcaaaggagcgctttctggtggcaatgtaaacggtctagtttgagacccgtgatgacacacgtgaactgagttgccaaactcatagaaactccacacggtagatctgtacattgtgtcccgtgttaattgtacgtcaactgaaaaatcagaacttacatgaaaagtacgaagtgccactgcatacacgcatatctaaaagccggtaagatgcggctatagatgagcacatttacagcaatgaagggccactctgccgggttgctagcttattcaagcttcgcatcgccgggaaagggatggaaaggcagctgacatcactcggggcggggccgtgagtcctgtgaaaagtcgatgggactcgagcagcagcctcagctgccttgcacagcctcgcaatgagctgccacaactgctccgacccccaggtcctttgcagctccgggcagctsttcctgcagcccctctgggaccacctgaggagctgggaggccctcctacagtcgcccttcttcccggtcatcttctccatcaccacatacgtgggcttttgcctgcccttcgtggtcctggatatcctgtgctcctgggtgcccgccctgcggcgctacaagatccaccctgacttctcgccatccgcgcagcagctgctaccttgcctggggcagaccctctaccagcatgtgatgtttgtgttccccgtgacgctgctgcattgggcccgcagcccggccctcctgccccacgaagctcccgagctgctcctgctgctgcaccacatcctgttctgcctgctactcttcgacatggagttcttcgtgtggcacctgctgcaccacaaggtgccctggctgtaccgcaccttccacaaggtgcaccaccagaactcgtcctcgttcgcrctggcaacgcagtatatgagcgtctgggaactgttttctttgggcttcttcgacatgatgaacgtcacactgctcgggtgccacccgctcaccaccctgaccttccacgtggtcaacatctggctttccgtggaggaccactccggctacaayttcccttggtccactcacagactggtgcccttcgggtggtacgggggtgtggtgcaccacgacctgcatcactctcactttaactgcaacttcgctccgtactttacacactgggacaaaatactgggaacgctgcggactgcatctgtcccagcgcggtgatgtggctgcggtgggtgcccctaagactcgggactgctgtgcctttcacacttgaatgaagagaaacacctgagctatatatttttttaaagcaactaacttattgctttatgtttatctatgaaaaccatagataaaatctgatgcatttttgtaatctgacaaagtaatttacatactgtttgtgtatcaatacaattttgtgttcttggtattcttagtctagctcacctcaatagccttgaatcctgcatatgaattagacattcatcactggcatatttagaatatctctaaaaggacttgtttgtagaataaggaattttctatgtttcaaagtgttctaaaacctggctaaaagaatgtatttttgtggatggtgttgacttctgactctaaaagcaatcaaacatgtttctgctggacagtgaccaagaattatagtaccttcttatatttttttatagaactgtatatttattttgaaagaaatgttattcgtgctttaaaaaggaaaaaaaaccatgaatcaaataagtattgacttccgtttcactggtattttgactgataaaaaagggaagagggagcgggcataccaagtgtccttctaagcctccatcagcctcaccatggaaagagaggaatctgggtgtagggtgttctgttgggggttgttagagaaaaggaggcaggagaaggggctctgtttgttgtgctctagcaatttcatggaggaaaaacacgctaatattcttaatgcttttcagctgatttctgtataacaggcaaatgataggattactctgtaaagtttcatagaaagattaacgctgagcagtcaatcattttattatttgtgggaatggattaggggaagaacagaattggaggcgtgccttgctttgcaaaactggtgagtcaatagtatacactagagtggctgatagatgtgcaaggggattctgaggaagcccctgttttcatgaatccatccatagctactgcaaatgaacatcaaagcattgcttctgaaatctggaatttctgtatattcagttttcttaattaaaacatacatgcagcaggtacagccctttctaaaagaaagataaagtgaaatttggccctggatccctgattcctcatgtggaaaaggaggaggtgtcccagatgttcttgcagatgacagtaaatattcctattattaaccacacacccatcacccatcactcaccccatctaactcctgcctattcattttagttttgtttttggaatatatatagtgtagagttaaaaatcaagacaatttagacacaatataaagaatggcagctttgtgtgtaattcttggctcattatatttgaaccaaactgtcatgtttaaaggtaaagcatccatttagagacctggtctccacggtctgccaaatgagactcccaagaaatatggttaggccctccaaatgtttggcagaatgccccagaatgtggaagctcacagccagttttcccatgttcccttcaacgtgtgtgttcctttagcttcttgactgaagttacctcctcctctgtctgtatcaggaccaggctgggatttaaagatgatattgatttataaaagtgaaatccatgaaaagaggaagtgagatgtgaggagaaaatgctacattgacggtagtatattattatcatgatgcacgtggcacctggagtaagaagagacggataaacaggcaggtgtggaatctatggtgcaactatgagttgtaagcagctgtaggcactccaaagctgccctgtaaatcatggataataacaatttatcacagcgtatcctcagagaattgtaaaaatgtatcatgttgcatcactgcataaggtaattttagattttgggcaaattatacacatggaaagtgcacaatttggatttagaaatactttcttacaatcgaatgtcttaacagtttttaatgccttgggaggtagaaccgcggaagtggaaaggatgagcaatttttcagatagcttgagaacctgttaataaaaatagtaaagaaaaagttcatatgcgcatgcrctgtcacacaatttctcacttgctccttacaacaacaccatagggatgtagaatagttactattatcatcatcacctctgttatggatagaggattggtacccacacaggttaagtacttttttccagattacaaaataggaggagtgggagccagttctactaaacttaggtctggtggtgtatactgtgcttctcttctgataactgccagagagctgcaaaccctgcaacaccaacaaatggcctccctctgttgttcctcctttgttactacccctaaaacagtgttaccctggcccactacttcacttccacatggctgccaaagcctctgcctgggtaggggagaaagccaggggaggtagagcaaggccagtctaagcaagccctgggagagcaggaggcaggtcaaggactgttttctgcatccttcattgcacctgtgctacaaacgcaactattgcagccagattacctgggtgggaatctgggttctgggacttactagctgagtggctttggataaggtacttaacctctctgccttagcttccttatctgttgatcatagactgttccttgctgagttgttgtgagggatttttgagttactagacgcaaagtgctagatgaatccgaaatcctggctgtagtcgtgtttgctgtgactgatgcttcccagtgtgagtgctaggactgcagttcagaatggtcaaagctttttgttcacaaacatgcttgtgctcgctcatattccggggaatcaaataaagccaagttgttggttctgcttccatcacaagctacttctcccaccatcctttcaaggcaaaagttttataaagagaaagaagtctatgtttgtttgattctacttctttacctctgagtcattctactcccattcctctggaaacttttgctctgggttgcctactaatttcctaattctcaaatccagtgacttttccctgcttggtgttccatttccttggctttcttttcttcttcttcttttttttttttagaggaattttatttacaaaccagctcatcttggaatgtggttcttgctttgctttagtgaggtttctctcaactcctttccatcctcattctccagctgttccttctctcttcaatggctcttctttcaccacaatagggaggcaagcctcaaggtgctcctcattttactaaaaaatacctgtattgtttataattaatatcctccctaccatctcctaatgtagtctataaatgtcctactgcattgcattctagtaaataagcacaatgtgtatacgcatgtatattcacatacaccatgtatatgtgcatatgcatgtaacatgtagacacgctatatatgtacacactatacacacaaactctatgactacatgctattatatgtacacatagatgtatttaaacactatatacatatgctgtatatatgcacacatatataagcacactgtatagtatatatgtgtacacattatatgtacacacactatatatgtaaacatgtacaaacctgctatatttgtactagatgtgtatacacacactatgcctcctcttctctctctcttcacatacataaacataaacacacaactatttttttcctatctaccatttatttctgcctgtagtactatgcctagttcttaataaacattggttcagtgttgcatgaatcctggaagaactagaaacacaccttagccattaatcatgcatttctcaaacattccttcttgttcttctccatcttccatcactagtcagttccagatttctaactcaggccatgatcaccactcataaatctctgttctagaggaagtcacactctactgggaaagagagtcaggcaagcaaatgcatttaatctaatgtggccagtgctgtaatggaggatgttaacaggttgttaagggagttcaaaaagagatgggacatttgagctaaatcatgaaggatttgtgtcttcactaagcagggtacagggcatacctggcagaagaaacagcagttgcaaaattagagagagatcaaagaacttgacattcctgaaacatggcaggaagctctgagcactgaataagcaaggaagaaatgtgtccgacactcaaggtattcaaggtacatgtctaacaaggcagttacagcctggaattgggtcccagcaacaaacatttgctgtcttgcctcttcacaagctattgaaactttttagaactgttgactcacctgcttatgtcccagggtttttgagagattgtatgtaaaattgctttgaaacaaatgttagagcttcttgttatttgtcgatttataatgaatagacggataaatgcattgaaacctggacttgggctattgagggagtggggagggtggtccacagatttcaagcaagggagtgacattagatctggttcaagaaggtaactggcagcagtgaacagtgacagtgattccagttaggcgaccgtggcaagttctgcctggattccaatcctggctccactgcttataaactctgtgaccctgaacaagttacatactgtctcttgctgagtgagtatcaagaaggcagttatgggacactacttagaaattgctgctatcaatattctttgctaatcatttgcctaaacccaacataaatagctccgccgacttgtagcaacttgagtgaagtgtttatttcaaattttgctaagatccaccctgccacatacttttgtgggttcatagtgtgaacatttttttttatttctgcgaactctgaaaagctttgtttaaaaaatgtttaaaaaagcattcacacaacggactatgactcagcaataaacagaaaaagatgattaatacatgcagcaataaggttgtgtcctaattatgctgagtaaaagaagccagacaaaaaagattatttaccatatagttcaatatagttcaatcctataaaactccagaaaatgcaaatgaattcatggggacagaaagtagatcagtagtttgatgaagggaggggcagcaaacataaattaccaaacgggtatgagaaaacatttagtaatgagggatatgttcactatcttgattgtggggatggtttcacaggtgtatacaaataccaacaattatcaaatcgtatactttaaatatgtgtagtatatagtacgtcaattagaccaaatgttgatggtgatgataaattaatctaggacctcatgttctgagttttagctttgaagtcaatttaccatgaaaacmcacacacacacacacacacacacacacacacatacacacaccagtctataatccatcctttgctcatccattctcctgacctaccagagaaagcctctggtaggaaggcatgtctgggagcctgcaaaacccatacccctttctttaagaacttcctcaactcccactatgtacacacacaaacacagattgggtccctgtatctattgttatactatatgatccctacatcatggccacagctttctgtaccaaagttggaaatctgatccacctgggaagaattaggctattttccaggaatttaggatatgtaaaccagcagatccaggtgaccattttggggctgccattcgtactgtgtgaataatgatgccaagaaagcccatctgtacatagaatgaaaggaggatgagcagattttcagggagtgggaaatgagagacacatacccctagaaggagtggaaagggcaatggcagttctgggagcagaccactgacctggtttctggaagctctataggcccaggttctcgaccctaaacctgctacactttttgcctttgggttccatgactttctaatagattcctcttcttgggctggttaaatacctttctggttcttgtatgtaaagaggacattggttaaaacctgagggttctgtggtgtccttttgcatttaggttgtaggaggaagccccttagcacaaacctctataggaggttttttgtggttgtcatcagtggacaatgaatagccacatcctaattgacagccagaggctgtggtgccccacaggccaggaaggcaaactgactatgtgtggttgttaggggccaatgtggagaacaaaatgagcattctgacattatttagtaccagccaaccccatcttgacctcctattacccaaggtgagcaagtgctgttttatagcaattcaaatacagactttattccaaatgtttgctaaagacatctcaagtctcataaaaaagactttgaaccaaagcctaattggaagcccaaactttatctcaatcccatccttcccatggagggtatatccttatttcctaacagacctcttatgggtaatgggtcctatagtgccacattgtgttctccatgggtttgaggtcccggcggatgctagcagctttctaatacacaccttgacttcctctgttgggctaactttccatttgtcacatcttgacacctcttggtatttttcctgtctcagtgtttgtttccagctgtgtctcttttctgccttgttcttttgttttgttcttggctgacatttatcaaatgcttactaggtacgagattctctcaactcattttacatccagtaactcatttaattcctaacagcaacccatgaatgacacagagacattcagaaactcatctcatatcttttagctagtaagtggcagaaccatg

SEQ ID NO: 95204 - DNA, 141158 bp, Homo sapiens
aagaaggtaataatagcttacaacaacagccaaggaagttagagtcaggtgatgtttggttctctatagaaaccaaaaatagggtcttaagcgtgagctgcgggattctccttgcatggcaacccgcaaacaaatgccctcctttctcttgttgcaaaaccccactgtgggtgtttggctttactgggctgggcaagtggaccccagttttgttcagtagcagacaatgtgagcatgatacctctttatgcttaaattgcatgaaaatgtttttttggtgaaagtccttttgtcctttttgtatacactttttccagttgaaagatctgcgtgagaatgggatataactgaacaaaaatatatgattgctgaataggactctctgactttgtcgcaatggaaaaaaatagaaactcagcccccagggaggcataaaggagaggaagtcattaacaatctttttgtttttcagaactgttcctggaagatttcccttctgtctgacggaaatcttcccacgctgtctttccaaactcctacttaatgctttgaattcagattgctgagcctctgagcacaacagacagcactggggttggaggtggggatccactctggaactttccatccagaaaacctcagatgtcttcctcactcctgtgtttggaactgatagcttgaaggcagttcctctgaaagcaaggacttcagtgtattttttggactggaatggaaaccttacggtggtaggccccaccatggaaggccacatggtgggggttgtaaacctgtactgcctaaggcatgtcccgcttgggctgccatgcatgtcctctgggattgtgctttgtgtctgtgtgtacctgactgtcatgacactgtctcagcccaggaaggtgatcaggtccactttactttcctggcctcagctgtgatgtgccaccaggttaaaagtttaatatagacatgtacggaggaagctctctggacttctaagatagacctttataattaatcagatttgtttaagctggctaaattcaggatccttaaaagaggataaatactgaatgtattggaaaaaactgagatcaatactgacagagatcctagaaataataattttactataaagttgccttgctaaggactaaggggatggaccatgcagagttagcatggcaagtttgaaactgttatctttagaaagacttgcttgcaaggttggcccttggctaacatcagggaacttggatttttaagttttctagctattctataaatgatatgggtggcttactatgctaagactgtttatgcaaatgatggagtttatgctaacacttgctttccttctcgaagtctggaattttggtacatgctaggcagagggtgcatacatgatcagtccccagtaaaacccttgggcacacagtctaactggcttcacatgtgttgtcacaatttgatgctggaggaattaagcacaacctgatgactctaccggccctcttggaaacctatacctgattttctttggacttggccccatgcactttttgtctgtgctaattttgctctgtatacttttgttataataaggcttagctgtgagtatgaccatatgttgaatcctgctcatctttccagtgaatcatcaaatctaggggtagtcttggagaccctgatgtcaatttcctagaattctctttagaaaaaaacaatgcagcaggctattagaatataacagctccctctgggagaccaaaggagagaaaagacaggctaagcctgactgagtgtggctctttctccaacctacgcaatttcctatgaggatttccctttgtaagattttctttccacacaatagctgtccccagattcctcagccatcatgcgcatggctggggatgttgcatcattcttgggcatacctaggacacctgtccatcccctggtggatcttggttcaggattttgttgctggtatgttccacataaatcagaagaaaagaaggtgcagggtcatcaaaaactcttctgtttattgcgtcagactggagtcaatgtctttccctttataatcaagagggagctcaggagggttgtgaaatgatatttggcaggaaatcaagggaagtgaatattctaacaggaaccaccctgacctttatgctttatgagatattcatataaagggaccatggcaaagagaaaatcattttattcatcaaactctagttgagcagagcttgtgttgcagggtgaattatgacactgtgaacaaaggtcattttggggaagatcccaggttggatgttgaactagaaaaagaatattagtgggacaactggtaaaatttgaacaagacttgtagattagttgattatatgttgtcactgttagtttcctgtcttaaagattattctatgtttatgtaaggtgttaacatgatgggaagctgcgtaaagggtatatgggaattctgggcaccatttttacaactttaagtctaaaatcatttcaaataaaaagggttaaaaagtcaaattataggctgacaattattttctcttggcattttgaaactatttcccactgtgttttggttgctattgagaagtctgagcttaacctaataccaattccttcacagatatttcttctgttttttgtcgttttaaaaatctttctgcctcaaaggcacttaaaagatactactatgtttttaggtgacatctgcttgggtgatcttttgtggaattcatgtatttgaggattagcatttttcattaattccgaaaatttcggtcattgtctcttcaactattgcctttcctccattcccttttatttgttcttctgcaactctgatcacatgcattttaacttcctcactttgttctccatgtccctgaatatctctgttgattttccatctcactgtttttctgtgctgcattctgagtagtttcttcgaatctgtcttctaaatcaataaatgcttttcagctgtgtataaattacttttcaacaaatcctttgagtttctaatttctattattttagtttttatatttctaagttttgtttggttcttgtgcaaatatgcctaatcaaatttaatacactattgttcctttatttatttatttatttatttatttatttattttttgagatggagtctcgacctgtcacccaggctagagtgtagtggcatgatctcagctcactgcaacctctgtctcttgggttcaagagattctcctgcctcagcctcctgagtagctgagattacaggcacccatcaccacacctggctaatttttgtatttttagtggagatgggttttcaccatgttggccaggctggtcttgaactcctgacctcaggcaatctgctcacctcagcctcccaaagtgctgggattacaggcatgaggcactgcgcccggcctattcctttgttaaaacttaattttttctttctttatcttgaaatttactaaatacactaatacattctttttttttttattgagacagagttactctgttgcccaggctggagtgcagtggtgcgatctcggctcactgcaacctctacctgccaggtttaagccattctcctgccttagactcccaagtggctgggattacagatgcccgccactatgccttgctaatttttgtatttttagtagaaaccgggttctaccatgttggccaggctggtctctaactcctgtcctcagtgatacacctgcctcggcctcccaaagtgtactaaatacattcttttttattctctattcaattacaatatctgcagttttgttgctctggcttatcgtttattatctggcaacttttgcacattgtggcttatttatttgtgtgtattctttgattttgtattatgacctgatattccttggaactttatcaaacttggaaattctttgagaactatgtaaaaagtgtttccctttgaggggtgtttttatttgcttttgttaggtgcatgggagcactaccaagccagaattgcttaaaatgaaattttctacttgaggtttttttttttttttcttgccgcatggatagtgagaatttcagcccaaaacaatcatgcttctccacttaagattagaaattatcaatgactttttttcctccctgctttacttagggccaaagccaaaaacaggcatgtgtagccccatcatttacgtctgcaaggagtttgttctccagtttaacctctgaatgggtcctggttttatgtgagttctatgatacaatgtaccacgtgcaggccccagactttgtcttccatctccttcataatgtaatgtagtccatgagaaagtgatgtagatcaccaacacaaatgaacacatgcttattctggtggattttcactttcctgtcatttctggacttcagggaattccttactctcttataaatgcagctgtgcatttaaaaaatatgttttgcagattatatagcatttttcattgtgatacacaggctttttgttctgtgtatatctggtctaccataatgcttgtaaggaaacacatttaatcttctgtgaggtataatttattattcccaggttttatgtaggaatatcttagggtcacagaggttaggtgatttttcccaacactgtagagatactaagtggtggaggtgaggttgaaataggtctaaacccaaagccaaggcacttttaaaagattaataaagtttgtcgaatgatacttggactaactcctgcctgaattaagctagaaattaatataagttctttaattcagttaggaagatcccaaatcagaaacaaatcataataaaaattgagatcaggaagcttcctgagtgtagctcctcatatcactgtcccacacataagtactgccccatatggcaatcgggaggccccaggaatgcttgctagggtcaggccctgctcctctaagttagttgaaagctccctccctactcagtgactgctctcatacttcttcactgtagctgttggctctcagaacatgatgcccaaagtatagcgcctcggtgtgctgagtactttgaactgaaagacattggaagggcctccgaagaaagatctctttgaccttctcctgccctcttgtctttcatgcttctttctcccctggagtgaaccatggaaactagaattcctcttccgcaagacaatgatagaaactagaagccctttccccaaagcaagccataaaacttaggaaggtcactctctcccttctcccttctcatttgaagacccttaatccagaggaatcctgccccatacttgcaaagaagaaatgctacacagagagtccaagaagaatttgaacccagtctattaccattagatcatactcttgtccaaacacatctctacagagctgcccattcttcatggaacctaagcacaaaaacagttttccctggatctttgggtcttcatttctgaaggctctcatatcacataaaactttgattaagtaaatttgttatgcttttctcttgttaacttgtcttttgttataggagtgtcagccatgactcttacaatgagtaaggagaggtattacctacctccttttacccctacatgctcttggagctgattatcacagtttgtaatttttccaccttccattcctgcttctgtgtattttgataaatttttgcaggtcagtagacttcccatggcagaatatttcctgcttctcaccagcccttaagccaatccaaggaaaacaaaagaacatcataatgctttgtcatatgacaagattacaaaagcagcatccagtggcagaatgcccaactgctccgggacacagccaatagctgacttcagtgctccccatccctgcttgtcagtgattagtctaaattgttatcacaagcccagtctgaccaatgaatgtgagtgaggggccattttgattgtcagctcctgattctgcagaaaacaygaaactgagctgtacaaagatgctgatgaggggctgcagcatgcaattcacttcaccagcagtcactaaggtctgatctcttttctaaccatacctggaagatggaatgctggacccagggtatgcatagaaaatgggagttattagaaaagcagctttgcttgctttaacccaggaattgtatttctggtatgttgtttccttttagacaattgccctaaaggttcttttgtttaaggagcaggaggatgggggaggttatttctgctctcagcaaaagtcttagaaccagggtctcctcgtttgtaaggaagcaagtaggtccctggacctgggctgsgatatgatttgtgatcagccaggcaagagttaagagtggaagtctgtgctctctgcccatcttataatatcttaagggtgatcatctgtggtattcttgagtggtatgtcccattccatctagcatttcattagaattattgtataaaggatgacaggcagaggacacttgacatgggaatgctggacctattggatgtttattcattagctgcagttaccccccattagccttttttaatacaaagtaaaaatttagttgacatgtaaaaattgtatatatttatggtgtatagcatgttttaatatatgtatacattgtggaacggctaaatcaaattatttaacatatgcattacctcagctacttacctttctttttgtagtgagaacacaaaatctactctctcagcaattttcacgtatgcaacatatcattattaactatagtcaccatgatgtactatgttagcctcttaatacggtataatgccttggcaaaacccaaaatccctagcaggtctggatctttgagtttggaaatggtccaaggtgcatatactatgtctgtgaataccagagggcaactctttatgggttcctggtgtaggktctatattctaaattctgagagatgaactcctttagggccacagtctttctgccacttatgaacctacaagcaagtttccaggtgttaaatcagctagggaatcatttcagaatttatttcaaatattacattaattcctaggggataaggaatttaaaaggaaagtgttcaaatgatcatcttatacatttatatacttttacctttctgtttacacctttgtgactagatattacattcatgagtgaattaaaaatgaactgcagaagttaatctcaagagtccatggaggctattcccccatgtgtttaagagacctttgctgtccaggtctgactttaacctgaacaaaatggagctcaccgtgtcagatgctggcagtttgaaagggactgctgtagacctggatggatctctgcccttttgaccagcctcacactgatgtccctcacactctgtcagggaggcatttgcccagatattcctgggcttacagcaaccctgtctacagcagcagctgctaactgggcatggggcttagttggggctcctaggctggaaagacagtcatagttcctataatgtaaggataggctgccttcagggggagggtgttcattctaagggaggggctcaaatgaacatgtcgagaatagtatggtacggcttagcaattacccactgttcctagtaggagaaattttgggaattaatattactgttatagtcccatacacaaaccacacaattacctctattctaacagagttgaaatgtttggatttattgtagcattactatcaggaatacacattgattatggtattgctatcaagaatacatataaatacatgcctgaagctataagtgagataagagatattccagggttagtcaaaagttaatctttgagttccagaagtctggatgaaaatgagatgagactgcaaattttgttgttaggcagtcaccatttatgacccttggcagggagggcaggaatggtggttatattgtgaactgaatgaaaactgagaactaatcagcatcatgtgggcctgaagcatttattgctaccagtgattagttgtaagaccttcggactatgtaactgtaatgaactataatgaacatgagaaaacaactcttttttttttttttttttttttttgagatggagtcttgctctgttgcccaggctggagtgcaggggcgcaatcttggctcactgcaacctcttccttccaggttcacgccattctcctgcctcagcctcccaagtagctgggactacaggtgccagccaccacgcctggctaattttttgtatttttagtagagacgggatttcactgtgttagccaggatggtctcaaactccagacctcgtgatccgcccacctcggcctcccaaagtgctgggattacaggcatgagccactgcgcccggccaaaaaacaactctttaaaaatgtaccttagagcaacatgcaaagcttccctgctcagcaatcccaggttggggccccctgtcttcctatcstcctacccgtcacaaccaccactgcaggcttctgatgctctgttttcctcctctgtctcagttcagttgctctgagttagagaggagctctctgggactggagctgactgcgccctggcccatttcctcactaccatcctcaagctcagatgctgacaggaaaatactgcctatgcctgaaggggcatcccttagcaggcggcccagttccttctcataacatttggctgcttgcagcagatctccattctgcttatgaattaatccttgaagataccaataattyggtgcattttgtggaagcagattttcrgatacattctgtggttggtctttgatctcttccttgycagttgattttttgcttatggacaaaccctctaaaccatgttgcacagcagtgtcttcagacttcccattatatttctgaaggttgcagtagcgctgatgggattgttgcttttcagcatcagggacttccttattgaatggtgtctgataacattcygtctccaggaactcagcgagatcggagtatgcattcagaggattcagtcccttctcaagagctttattcgaatagtccatagcatattgctttagtgcttcaatcatctctttatttccactagcttcagattctcctgtattctgcatttgtcttacttttgccttgtagcagcacccaatctggtgatagaggtagccattgtttggtgtggattccaacacccgttgaaacagttcaatagctttgtctaggtcaccttttcttctgtaaaatttggctgcactgcggaggacatctgtttggcaaggagacttttccaaggcttcttcaacaaactgctctccttcagcttctttattcatcttctgcagtttcaggcccaagagaaccttgacgtattggttatcaggactcagctcaatggcctgcttcaaaacatcagtagagaactgtttctctgggtgattatccagatggtacatcgcaattgccagtccagaggagaattctgggttgttgggcttttcttccagagcyttctcaaaacacaccttygccctttcatttcttccacayttcagttgtgtccacccttcctcacagtcaagttcagaatactcaatactgtatggatttgaaaatttcttgcaggtttgtttcaccttatctacataaatctgagcatctgagartctgcccaagtgatagtaracccaggcgtagtttccccaagtgactagacttctgatttctgcttggtcagcatgttcttgctggattaactcttcagcttgccgtaagcattccagggctgcctcgttgttaccatctaggtgttttatgtaggccaacaagttgtacattgtagctttgaactcagtgtttaaaaattcaatctggttacacactctatcttctagatcccttgagacactgtcttccttgaataagttccaggtgaaatggcatttcagctgtggaaggattttctccagggaattcttggtgacctcactgtggagaaaataaacatggtcactgtgatgtacactgccaagcactgcaccctgtgatcattaattttatatgtcaattgaactgggccacaggatgcccagatatttggtccaacattatttctgggtatgtatgtgaggttgtttctggaagacatgaacatgtgaattggtggactgagtagagcagattgctctccccagtatgggtgggcrttatccattctgttgagggccttaatagaacaaaaaggcagaggaagggagaattctccctctgaccgactgcttgagctaggacattggtctttttctgcccttagactagacttggactagaactttcaccattggcttacctggttctcagacttttagacttggactgggactacaccatcaactttycttggtctccagcttgcagacaacagattatgggacttgccagtctccataatcaggtgagccaattcctcataataaatctctttatatatagatgttccttgacttatgatggggttatatcctgataaacccatcataaattgaaaacattgtaaataaaaagatgcatttaatacatctaacctaccatagcttagcctagcttaaatgtgctcagaacccttacattagcctacagtggggcaaagtcacctaacacaaagcctattttatactaaagtgttgagtatctcatgtaacttattgaatactgtattttaagtgaaaaacaagaatggaattatcacttttgtaccatcacaaggttggaaaaattgtaagttgcttcctacattcacttttctttagctacagtctgtgcagacacccacaaagcacatcccttacaccgtgtaagcagatatgcaggaggtgaggtaagatgggtaagaggaggcagcttcagtgacaggaaatgagatctctctcacgctgctcaattaccaagtcagccaggaatggtgactcatgcctgtagtcctagcactttgggaggccaaggcgggtggatcacctgagcccaggattcaagaccagcctgggcaacatggcgaaagcctgcctctactaaaaatacaaaaattagccagggatggtagtacatgcctgtagtcctcgccattcgggaggctgagacaggaggatcacttgagcccaggaggcaaaagttgtagtgagctgagatcacaccattacactccagccagggtgatagagtgggaccctgcctcaaaaaaaataaaagtaagaataaaaattaaaaaataccaagtcagttctcattccttgtacattctgggtaaggtttgtttagctatcccatgactctttattgggstacctctttttgtcactttattagatattatggatactaagaaaaatagagattatcccaaccttctctgcccgccaggtgctttcagttttgttaggagacatgtaaagaaataaaagcccagatatgtctgccaacatgttatgtgatttaggtatttttcccttcatcttttccaccacttacaaacagacccacggaggctcagcttgagtctgactgaagtagtctccccaccacacaggccagattcccagacagaatgaatttgttgcaacaaacaaacaaaatggactcatttttgttttgtagttggaagatactaaaggagatcacttgccttatttagctggataaattgcaagagttctctaagtgtgttcccattatctacatttgcctggggcttgggctgtatgtccctcactcttgagtttgtgcttcttccttcttaccagtggagtcacggcaccataagattggaaagaacctccagaaatcattaaaccaagtgtccttatttttggatttcacagacaagcacaatttcagaaaaaaagttatgaaccaaatagggctgctaatgtatctgaaaagataccaaccatctattctgaccaatattttattttaaaagatagaaaagaaagaattttccttgccactgaaaaagtaatctcagaataaacaaaattctttaaattgaatgcattttgttctacaaggagccattgactttatttgcaatttaccatggacgagcactggccctcacaccgctactgcaagtgtactgatctattatacttcctgtctgtctctccagtaatgctgatctaaaccatttttggcccaatatgattgcacatgaaatgctttatagtgagagatgcagaatcaactcaagggcaatgggagtgaggagggaagttgccatctacatccggctagcctctttatgtgtgtgctttgatttggggacagtccttttccttttcttggtccctgtctagggttccagtgtcaatatcttccctgtctattatagggtccttcctttcttccttccttctttccctccctccctctcttcctccctccctattttccttctttcctcccttccttccttccttccctccctccctcccttcctccctccctattttccttctttcctcccttccttcctttttttgcagagacagggtctcactatattgcccagagtggtctcaaactcctggtctcaagcaatccttctgcctcgacataccaaagtgttgggattacaggtgtgaaccaccacacctggccctaggggttttcaatttggctttacctgggtattctaactaccctgtatgaaggactacaagtcaaaagtcaagttagcaattatttaaaaaatgaataccaaaagtaagttataacgatgataattgaacaactctgcttatatctgttatgccactaaatcataataaagtcatggaaacatgagttaactttgctgatgtgtgaattaggaaggttaaaaggagaaagtgtgagtctcagatcaatagaatgtatctgcagatttgtaggtacatatgggtgcctgaaaaaaatagctgaacactctagtaattaatagagagtatccagtggacctgcaggatgacaggtgatgttggatgtattgttggatgtatttgcctcaacgaaaccggaaaccaccttgcaagtctgatgacactatctctctctctyttttttttttttttggagggcagaaggctttgacatatcaatgcaccagggatcttaccaaactaaattttaagcacttatagctcaagattctccctctgagatgaaacatacttccaccctgtcatgtgtcagcttcagaagatatcaattgctcaagaaagtgttggacaagcagaaaagcacactgaacatttctggacttgtgaaagagctctgaatatggatctctcagggatattccatccccaccaatgctttaccaatgcgagagctggccaggctgagacatttaatgataacatggaacaatttattcaggaagatagtcaactactcatgtggctttatgattataaaacccactgaaaattgggtcccttgattctcttgatttttcctaagccttactccctaaagtctccaatttgatgaggtatttgatacttgatctctccttgaagtaaaatttggagcaaaatatattggactggaaggcctgagacctcgataagaagaaacatgaaccccagagccacaggtcaggaggttttcattataatactattgccctcttaaaacaaatactccaattgccaaggtttcctcacttaataatttatctcatatgtgtttttgaaagttactctgaatacttcttatatgtataaataagttagttaacagtaattaatgcagatatttaaataaatacaagcaggcaggtgggatgatgactacagtcacttgataaagaacagctaggtggccgggcgcggtggctcacacctgtaatcccagcattttgggaggctgaggcgggtggatcatgaggtcaagagttcgagactagcctggccaacatgatgaaaccccgcctgtactaaaaacacaaaaattagccgggcgtggtggcaggcgcctgtaatcccagctactcgggaagccgaggcagaattgcttgaaaccggaaggcggaggttgcagtgagccaagatcgggccactacactccagcctgggcgaaagagcaaaactccgtctcaaaaaaaaaaaaaaaaaaaaaaaaaaaaaaaaagaataaaagaaaaagaagaaaaaacagaatagctaggttcaggtgaaacttggggagtagaatgccagtcctacctggatctgcatctagtagaagaccttagggagataggattccctcaggtccagaaagagatttcccatgacctcggattgcagacataagatttcgcttactaaagcagttaaagctagtgctgctagtccttaggaaatccccagaatcaacatagttacagtctctcacctaacccagatcatgaccacctgtcttgcccacagactccagggtagataccacatctccttcccagtcaaagctattactagagtagaatcttgaaattttcagaaagtggctttcttgaagtggtaagagtggggatttccccactcttgtctgcacatgtgcagcttgtccccagcatgtgctggttatgctccaactgactacgtgaaggaactggcagacctgtgctcagttggttggtcagaacaggcccaatccaaggagtccatcacttcagaaagcaagtgaaggaactctccagagccggacttctcaacctttaatgtacatatggacacaaacatctggagatctttttaaaatgcagatctggattcagataagctgggatgttacctttcttacaacctcccgggggatctcagcttcagaccacactgtgagcagcaaggctctgggaagacttccctttttggcagtgatttccaatcaccagtttctcatacttaaattaccctttaaacagtcaaactttgctttatttttattttatttttgtttttttgtaggtctcactttgttgccaattctggtctggagcccctgggctcaagcaatcctcttgcctcagcctcccaaagtgctgggattacaggcttagccactgtgcccagaaacaagctttgctttatttcaacattcttcccacccctcccccctcctgcctcttggggtttcctccttcacatttacacacatacaatgcaggaagccttgtatgcatttaaggaagagaggatttggagatggacatttcttctgtaagccattcagtatgcctatgaagtacttgtggtcctctttaaatatatgtttgtttctggaccttatttctgttttactcaatcaggatttcagaatgcaggacctagaaatttgcattctattagaagactcaggttgatatgattcaggccactcgcagaacacagtttgagagactgcaagcaacaccttctccctgttcattgatcacgtgggaggcttagcaggtcactagacctgctagaggacaactcaagtagacatatcccccaattatgaaaaagtgcatttcaaggtaaaagtgacctcaayataaattggaattttgcagtgctgaattaattattgacacatttgctgagaagcaagcatggtttaaaaataaccacagtcacaacaaaaccacaaacctctgacttaggctttctaaatataagaaacaaaagacgaaccagracctccagtaacttccctccaggccccagctttcactggcccgattttacctgaaagsatctgagcatgggctctctaggatctctcaatatgccccgwcccttcccagctcccagctcccatttccctgtgtcctttggctgcctawctctatacatcacaaagagctacagaaataaaaatgcatgaattggtaaggcagatttatgcttgaattagataaatgyatatttcatctctaagcaaacactgaaatagcataagtcaggaagttgtacataagaaattctgtttcctatcagagaagcagggactatttacctcatgatggctgtttccctgcagttctgaaaagctggggtcccggttgattttgtttttagcttactgattccaagcaaatgctgaagaggtttccacccagggtrctgttaggtctgtgcttttatgaaaggggaaaggaaagtgaaactgwtggaaccctatcaagatccctcttgaggggaaactgaaacasaatctgtgagaactgagctcactcacgccaggaacatgttccagacagatttggaaaactgtggtttgaaagttgtaaaaaggcactgtaaaaagaaaataaaattttagaagcttccaaatgtgttatgtcaagaggcaaagttaagccctgaaaactgactcacgtaacgtgactgttttttttctcaggtgcatgactgttgctctttgacctgtgtggtgaggggttacatgttaaccagactccctagtctcactgcaatttctgcctctcgggttcaagtgattctcctgcctcagcctcctgagtagctgggattacaggcgtgcaccaccatgcctggataatttttgtatttttagtagaggcggggtttcaccatgttggtcaggctggtctcgaactcctgacctcatgatctgcccgccttggcctcccaaagtgctgggattatagccttgcaccaccgtgcccggcctcagacaacctagtctttattaaaacgtagacctcatgttatggaaatagagacccttttgattgttacttttttttttttttttttttttgagacaggatctcactctgtcatccaggctggagtgcagtagcacgatctcagcttactgcaacctctgcctcccaggctcaagcgatcctcccatctcagcctctccagtcratgagactataggcacrtgccaccacgcctggctgatttttgtatttttagtacagacggggtctcactatgttgcccaggctggtctycaactcctgagctcaagcatctgccctcctcggcctcccaaagtgttgggcttatgggtgtgagccactgcggccagccatgttacctctttacaaaagaatattaagcaattcccttggactgtaatcaatagtagccaatcaaattgtatatctgtatgttagcctctgtatggaaaatgttggccaggcacggaggctcacgcctgtaatctcagcactttgggaggccaaggtgggtgcatcacttaaggtcaggagttcaagaccaacctgaccaacatggcaaaaccccattgctactaaaatacaaaaaaattaaccaggcatagtggcgtgctcctatagtcccagctacttgggaggctgggtrggagaatcccttgagcccaggagtctgaggctgcagtgagccatgatcgggccactgcactccagcctgggtgacagagtgagactctgtctcaaaaacaacaacagcaacaacaaaaacaacaacaacaagagaagttgtcattctgttgaacacctctgtctttgcctatgtaaacagtcctcatttttctctacactggaagtactgttcaccattcttgggtgcagctctactcctgggactgctgccctcaactttttgttgaataaactcttttaactggatcctgagccttctgattattgtatattgacagtactgactatgcrgtcctactcccagagattctggtgcagtgaatctgatgtgagcttagaaacctgtgttttcacaagtgccttggaaattcagtgcaggagttcctgtaccacattttgagaagtgctgtcatagaggtattttaaaaagcagttttcccctttatttrtggagctaatgtggtgaattaagcagcattatcaggcatcttgagtgaagggaagaaaaccacaggacacctggatttcagtgacctctttgcttagttctgggatatttcttgagtcatatcactgagcctcattcccttatccttaaaatgccctaggatgaatttccttttcccttcatccaaatgatagaaaattatgccctggggagaaccactttcacccttctccaagatctgggttcagttcttgtggctttggccactctaaggcatgggtaaccatcaaaggctggcccttactctccagataggaagcccatccctggccccctctctaaagtgagcatagttgaaagcattaagatctttcaccttttggccattgggcatagagtcagatgatcagcagtagagtttggtgcctccattaatgactctgctctgacacctgctctctatctgatgtcttgggcaagtaatttgcccttctaagccccattttggtcatctagaaaatgaggctaataatagaaataatagctcttacttcctagggctgttggaagggtgatatgaggtcatgcgtaaaacgtgtttaacacagtgcccacttgtcaggcctctgagcccaagctaagccatcatatcctgtgacctgcatgtacacatccagatggccagttcctgccttaactgatgacattccaccacaaaagaagtgaaaatggcctgttcctgccttaaccgatgacattatcttgtgaaattccttctcctggctcatcctggctcaaaagctcccctactgagcaccttgtgacccccacacctgcccaccagagaacaacccccctttgacagtaattttcctttacctacccaaatcttataaaayggccccacccctatctcccttccctgactttcttttcggactcagcccacctgcacccaggtgaaataaacagccttgttgctcacacaaagcctgtttggtggtctcttcacacggacttgcatgaaaccactaactacagatcacaaagaaatgttaccaccatgattgctggtactaatatatttgtgttataattttaagtgaatttgtgagtgtgtaaagggagcaacagagttcctcagtggatggggcagaggaggatgcccatcagctggcacgtgccagtgagttctccaggtgattttcccatttggaaatttttagcacaactggggaggagcagcccaatctcttcctgttcctatagcctctggaaataggagcaccttgatgtgaacctgagtccagcatagttcagagagcccccctcagacctcctcaggtcagtggctatagacacacctaaagacaggaccctgtaaaacctttcctgcaagctggctactaagacgccttgctctctggtcaatcccactcacacagacacaattaacatcactcttgaccaggaacttattctatataaaagggtattctatatactgaggtatttggcagtgaattcctcttacccatctcatccccaaacatgacattgcagagcatcttcaagtccttggggcagagtaaggtagggaatccagttttccttttctgcccccctgaatggtcgatggggtcttccctccctggcaatcacctcctcactcctttcctagagatgcttggtgggaaaggcatccttttctcttagttctccctaacatgctatcccctgaagaactccaggaggwcaatatataaatttaaaaatcaagtttactgagattatgctttatatacaataagatgcacccattttcagtgtatagtctgatgagttttggtaaatgtttatgcatatgtagccaccatcactacctccctatagactattcctatgattctaaaaagattcttttgggagccttcctactcaatccccaccatctccaggcaaccactgatctgcttcccaccattagagattagactagttttagataatagattaggtcattacacttttgaggagaaattctttttttgctgctgaccagcattcactacatcaataaaaataaatgctaagctttgggtttgtttttatataagaaatgacaaaaatgcccatttgtaagaattgtttcttccacttcccaccttaaagtaatgcaacgtttcagggcaaaattgccttcttcatgagtgggtttgcagtactgattgtatctttcacaatatctgttgaaaataaattcctccttttaaaattacaagaaaaaaagcctgtgacttaatcttttcaaacaaaatgacaataacagaaaaacccaaaagagtaattcccttaggtctacccttgaatcagccaagtttgtggctgagtgaaatacaccgctcctgccaagccttcctctcattgcaggaaatagctgcacacagggaggaaacatgagctgatgcattccccaccctgcctcccsccatgtagttccgtagggaaccattccagaaayttaagaagcctgtgtgtacaccaaaaaaagccacagggaaaaacccctcaaacatcttacaaatgctcagactgataaagacatattgaatctataaacatcaggacaattcaggaatgtgcctgcacagtaagaaactcaacttacaatttgcactcaaaaacaagcatgattatgcattcttatttcactgacctcatgactgccctctgtgtctctgctgttscgaaaagctggtgaccaggctgatttgttcttcagaagtcttcctgtctgcctcaagtaaatactgaaggaactayataaaggggtgggagagtagggcacgcatcagctgatgttttctccgtttttgagtaattgcttttaggggaaggaagaggaaactggaaagtgaaactaatttaaaatcgttgggaggaggaaaatgaaacctaacggcttgagacctgcaatggctgagccrgagtacgttattcaaaactgtgactaaaatttgtttgagagaatgtggaagcattcctaatgtaaaccaaaaaattaaattctaaggccatactcaccaaccatgtgactggacccctgcttttggccaagggcattccaaagttaacctgaaaactgatgtgaaggggaagctggatatgcctcattacatcctttttccttttggaattactaatagaacacactctttttttgtttttgtttttgtttttttttgagacagagtcttactctgttgcccaggctggaatgcagtggcatgattgcgtctcactgcaacctctgcctcctgggttcaagtgattctcttgcctcagcctcccgagtagctgggattacaggcacccaccaccatgcccggctaatatttgtatttttagtagagacgaggtttcgccatgttggtcaggctggtcttgaactcctgatagcaggtgatccaaccaccttggcctcccaaagtgctgggattacaggcatgagccactgcacccagccagaacatgctctttttaagtgtattaagaaacatttacaacctattctctctgaagcctgctacttggaggcttcatctgcataataaaaccttggtctccacgacccagacattcctttctaatgattgtctattgaatttctattggatgtctccaaacattcctttctattgataataactctttcaacaaattgtcaatcagaaaatctttgaatctgcctatgacttggaagctgccccgcttccctgtttccaattgtcccacctttctggacctagccaatgtacaccttacatgtattgattgatgccttatgtctccctaaaatgtataaaaccaagttgtggcctggcacatgttctcaggatctcctgagggctgtgtcacaggccataggtcattcatatttggcttagaataaatctcttcaaatgttttacagagtttgactttttttgtcaacattaggtatctgaccatcagtctagggtggggcccaggaaacagcattttttaagccaattcttattatttttaaaaattttttgtggacacatagtagatatatatatttatggggtacatgagatatttgatgcgagcatacaatgagtaataatcacatcagggtaaatgacttcaagcatttattctttgtattacaaacaatccaattatactcttttagttattttgaaatgtgcaataaactattgttgactatagtcatcctcttgttctaacaaacactagatcttattaattctatctaagtatatttttgtacccattaaccatccccacttcccccgctactactcttcccagcctctagtaatcatcattctaatctctatctccataagttcaattgtcttaatatttttagcttccacaaacaagtgagaatatgtaaaatttgtctttctgtgcctggcttaattcacttataatgacctccacttctatccatgttgttgcaaatgacaggatctcattctttttatggctaaagagcactccgttgtgtaaatgtaccacattttctgtatccattcttctgctgatggacacttaggttgcttccaaatcttggctattgtgaatagtgctgcaataaacatgggagtgcagatatctctttgatgtactgatttcctttctttttgatgtattcctggcagtgggattactggatcatatggtagttctatttttagtcttttgaggaacctccgaactgttatccatagtagttataatagtttacattcccaccaacagtgtacaagagtttccttttttccacatccttgccagcatttgttattgcctgtcttttggataaaagcaattttaaccagggtaagatcatatctcattgtaggtttttttttaacttatattttatgtkcaggtatacacgtacaggtttgttatttaggtaaattgcatgtcatgaggctttagtgtacagattatttagtcaccccactcataagcatagtacatgataggtagtttttcagtcctctctcttcacccattctttaccctcaagtaggccccagtgtctgttgttcccctctttgtgtccataatgttcagttcccacttataagtgagaacatgcagtatttggttttctcttcctgcattagtttacttaggataatggcctccagttccattcacattactgcaaaggacatgatattcttttttttgtggctgcatagtagtccatggtgtatatgtaccacatttcccttatcctgtcttctgttgatgggcatttaggttgagtccatgtctttgctattgtgaatagtgctatgatgaacatacttgaacatgtgtctttatggcagaatgatttatattcctttgggtatgtacccaataataggattgctgggttgaatggtacttctattttaagttctttgagaaattaccacattgctttccatagtgactgaactaatttacattctcaccagcagtttgtaagtgttcccttttctctgtaacctcaccagcatctgttatttttgttgactttttaataatagtcattctgactggtatgacatgatatctcattgtggttttgatttgcatttttctaatgattaatgatattgagtattttttcatattcttttttttagggtatctgaaggaagaaatttattttctttttttattattatactttaatttcttgggtacatgtgcacaatgtgcaggtttgttacataggtatacatgtgccatgttggttcatatgtttattgcggcactatttgcaatagcaaagacttggaaccaacccaatagacygggtaaagaaaatgtggcacatatgcaccatggaatacaatgcatccataaaaaaggatgagttgtgtcctttgcagggacatggatgaagctggaaaccatcattttcagcaaaatatcacaaaggacagaaaaccaaacaccacatattttttcatattcttattggccgcatgcatgtcttcttttaaaaagtgtctgttcatgtcctttgcccactttttaatggagctgtttgcttttttgcttgttaatttgcttaagtttcttatagattctcaatattagacctttggttatgcatagtttgcagatattttctcccatctgtcagttgcttgtttactctgttgatagtttcttttgctatcagaagctctttagtttaattaggtcccgtttgtcaatttttggttttgtcgtagttgcttttggtgtcttcatcatgaaatctttgctggtttctatgttgagaatcgtatttcctaggttatcttccagggttttaatatttttaggttttacatttcatccakcttgagttgatttccatatatgatgtaaggaaggggtccaatttcagtcttctatatatggctagccagttatcccagcaccctttattgaacagggaatcatttccccattgcttgttcttgtcagctttgttgaagatcagatggctgtaggtgtgtgcccttaagtttgggctctctattctgttccattggtctatgtgtctgtttttgtaccagtaccatgcattttggttactatagccttgtagtatagttcaaagtcaggtaacatgggctctctattctgttctattggtctatgtgtctgtttttgtaccagtaccatgstattttggttactgtagccttatagtatagttcaaagtcaggtaacatgatgcctccagctttgttctttttgcttaggattgctttgggtatttgagcactttttgttctataggaattttaaaataggtttttctaattctatgaagactgtcattggtagcttgttaggaatagcattgaatttgtaaattgctttgggtagtatggccattttagcaatatcgattcttcctatccatgagcatttccatttgtttgtgtcatctctgatttctttgaacaatgttttgtaattctcattgtagagatctttcacctcctgcgttagctgtatttctaggtattttattctttttgtggctattgtgaatgggattgtcttcctgatttggctctcggcttggattttgttagtgtataggaatgctactcatttttgtatgttgattttgtatcctggaactttgctgaagctgtttattagacctacgagcttttgggtagagacgtgggggttttctaggtatgcaatcaaattgtctgcaaagatagatagtttgacttcctctcttcctatctaggtgccttttatttcattctcttgcctgcttgctcatgctagcagtactctgttgaataggagtgctaagagtgggcatccctgtatttttccagttctcaaggggaaatctttcagctttcgcccattcagtatgatgttgaccttgggtttatcatagatggctcttattatctggaggtatgttccttcaatatctagtttgttgaggatttttaacattaatggatgttgaattttatcaaaagccttttctgtatctattgagatgatcacgtggtttcagttttaagttctgcttatgtggtgaatcacatttattgatttgtgtatgttgaaccaacagaaacaagaattttataaaggaatgggaaatgagaatttggctgtgggacataaattggaagctctagcaggcatggcttgcctggctacaagaggccagggtaggtggggttgcctaccttgcctgaatgtttcccaggacaacaggaggctgtgctctctggctgaattcagacagaagtggaaccactgggatggaagctctagcaagtgttgcctgcctggcaaccagtggcaggggtagatgtagtcacctgtcttgccctccaggtgcttcctgggagaacaggaggctatggtcactggctgagttcagacagagaagtaggaccagtaggctggaagctggcaccaagccccatccagaaagggtttgagatggggcaatcttactgctcctaggcactgggactgcagcctttattgggctatggcaccagtgctggtcttcttgggggcacaaggcttgcagaagtctccttggactagagagttgccctccaaaatgtctggggggctctctgcctcagtctagaagcacggtggtggggtcgggggtgggcaggggtttcaggggcattctcccatttccagtcttgcacaggtccctgtcgagagtgtgaatcccctagggggttctcactcactcaccctttccagtgttggagaaattctcctggatccacgctgagcccggacaggctggtatctagcttcacccctttctgctctctgtaatccccttacatcttgaaggatcccgaatccctgacatgatttctcagatgattggcctgcagggtcaatgctcactagcccttttgtttcctttccgtgatagcctggcacatgagttgcttctagtttaccatcttaaccccgagctcgaaactgcattttttaaaattttactttaagttctaggatacatgtgcacaacacgcaggtttgttacatatgtatacttgtgccatgttggtgtgctgcacccattaactcgtcatttacattaggtatatctcctaatgctaaccctcctccctccccctaccccatgacaggccccagtgtgtgatgctccccatcctgtgtccagttgttcttattgctcagttccgacttatgagtgagaacatgcggtgtttggttttctgtccttgcgatagtttgctcagaatgatggtttccagcttcatccatgtccctacaaaggacatgaactcatccttttttatggctgcatagtattccatggtgtatatgtgccacattttcttaatccagtctatcattgatggacatttgggttggttccaagtctttgctattgtgaatagtgctgcaataaacatacgtgtacatgtgtctttatagcagcatgatttataatcctttggatatatacccagtaatgggatggctgggtcaaatggtatttctagttctagatccttgaggaatcgccacactgtcttccacaatggttgaactagtttacagtcctaccaacagtgtaaaagtgttcctatttctccacatcctctctagcacctgttgttactgactttttaatgatggccattctaacgggtgtgagatggcatctcattgtggttttgatttgcatttctctgatggccagtgataatgagctctttttcatgtgtctgttggctgcataaatgtcttcttttgagaagtgtccattcatagcctttgcccactttttgatggggttgtttgatttttttcttgtaaatttgttkaagttttttgtagattctggatattagtcctttgtcagatgggtagattgtaaaaattttctcccactctgtaggttgcctgtccactctgatggtagtttcttttgctgtgcagaagctctttagtttaattagatcccatttgtcaattttggcttttgttgccattgcttttggtgttttagacatgaagtccttgcccatgcctatgtcctgaatggtattgcctaggttttcttctagggtttttatggttttaggtctaacatttaaatctttaatccatcttgaattaatttttgtataaggtgtaaggaagggatccagtttcagctttctacmtatggctagccagttttcccagcaccatttattaaatagggaatcctttccccattgcttgtttttgtcaggtttgtcaaagatcagatggttgtagatgtgtggtattatttctgagggctctgttctgttccattggtctatatctctgttttggtaccagtaccatgctgttttggttactgtagccttgtagtatagtttgaagtcaggtagtgtgatggctccagctttgttcttttggcttaggattgtcttggcaatgcaggctctattttggttccatatgaactttaaagtagttttttccaattctgtgaagaaagtcattggtagtttgatggggatggcatgaatctataaattaccttgggcagtatggccattttcacgatattgattcttcttatccatgagcatggaatgttcttccatttgtttgtgtcctcttttatttcattgagcagtggtttgtagttctgcttgaagaggtccttcacatcccttgtaagttggattcctgggtattttattctctttgaagcaattgtgaatgggagttcactcatgatttggctctctgtttgtctgttattggtgtataggaatgcttgtgatttttgcacattgattttgkatcctgagactttgctgaagttgcttatcagcttaaggagcttttgggctgagactatggggttttctaaatatacaatcatgtcatctgcacacagggacaatttgacttcctcttttcctaattgaataccctttatttctttctcctgcctgattgccctggccagaacttccaacactgttttgaataggagtgttgagagagggcatccctgtcttgtgccagttttcaaagggaatacttccagtttttgcccattcagtatgatattggctgtgggtttgtcataaatagctcttattattttgagatatgtcccatcaatacctagtttattgagagtttttagcatgaagggctactgaattttgttaaaggccttttctgcatctattgagataatcatgtggtttttgtctttggttctgtttttatgctggattacatttattaatttgcatatgttgaaccagccttgcatcccagtgatgaagctaacttgatcatggtggataagctttttgatgtgctgctggattcagtttgccagtattttattgaggatatttgcattgcatcratgttcatcaggggtattggcctgatattctctttttttgttgtgtttctgccaggctttggtatcaggatgatgctggccacatcaaatgagttagggaggattccctctttttctattgattggaatagtttcagaaggaatggtaccagctcgtctttgtacctctggtagaattcagttgtgaatccatctggtcatggactttttttggttggtaggctattaattattgcctcaatttcagaccctgttattggtctattcaggaattcaacttcttcctggtttagtcttgggagggtgtatgtgtccatgaatttatccatttcttctagattttctagtttatttgcatagaggtgtttatagtattctctgatgatagtttgtatttctgtgtgattggtggtgatatcccctttatcatttttaattgcatctatttgattcttctctcttttcttctttattagtcttgctagtggtctatcaataatgttgatcctttcaaaaaatcagttcctggattcattgatttttttgaagggttttttgtctctatctccttcagttctgctctgatcttagttatttcttgccttctgctagcttttgaatgtgtttgctcttgcttctctagttcttttaattgtaatattaggtgtcaattttagatmtttcctgctttctcttgtgggcatttagtgctataaatttccctctatacactgctttaaatatgtcccagagattctggtgtgttgtgtctttgttctcattggtttcaaagaacatctttatttctgccttcattttcttatgtacccagtagtcattcaggagcacgttgttcagtttccatgtagttgagcagttttgagtgagtttcttaatcctgagttctagtttgattgcactgtggtctgagagacagtttgttataatttctgttcttttacatttgctgaggagtgctttacttccaactatgtggtcagttttggaataagtgcaatgtggtgctgagaagaatgtatattctgttgatttggggtggagagttctgtagatgtctattaggtctgcttggtgcagagctgagttcaactcctggatatccttgttaactttctgtctcgttgatctgtctaatgttgacagtggggtgttaaagtctcctgttattattgtttgggagtctacatctttttgtaggtctctaaggacttgctttatgaacctgggtgctcctgtgttgggtgcatatatatttaggatagttagctcttcttgttgaattgatccctttaccattatgtaatggccttctttgtctcttttgatctttgttggttaaagtctgttttatcagagactaggattgcaaccctgctttttttattttccatttgcttggtagatcttcctctatccctttatttttagcctatgtgtgtctctgccatgagatggctctcctgaatacagcacactgatggttcttgactctttagccaatttgccagtctgtgtcttttaattggggtatttagcccatttacatttaaggttaatattgttatgtgtgaatatgatcctgtccttatcatgttagctggttattttgctcgttagctgatgccgtttcttcctagcaccgatggtctttacactttgacatgttttgcagtggctggtaccggttgttcctttccatgtttagtgcttccttcaggagctcttgtaaggcaggcctggtggtgacaaaatctctcagcctttgcttgtctgtaaaggattttatttctccttcacttatgaagcttagtttggctggatatgaaattctgggttgaaaattcttctctttaagaatgttgaatattggcccccactctcttctggcttgtagagtttctgccgagacatctgctgttagtctgatgggcttccctttgtgggtaacctgacccttctctctggctgcctttaacattttttccttcatttcaactttggtgaatctgctaattatgtgtcttggaattgctcttctcgaggaatatctttgtggcgttctccgtatttcctgaatttgaatgttagcctcccttgctaggttggggaagttctcctgcataatatcctgcagagtgttttccaacttggttccattctccgtgtcactttcaggtacaccagtcagatgtatgtttggtcttttcacatagtcccatatttcttggaggctttgttcatttctttttactcttttttctctaaacttctcttctcacttcatttcattcatttgatcttcaatcactaataccctttcttccagttgatgaattggctactgaaggttgtgcatgcgtcatatagttctcatgccatggttttcagctccatcacatcatttaaggtcttctctacgctctttattctagttagycattygtcgaatcttttttcaaggttattagcttctttgccatgggttcaaacatcctcccttagctcgaagaaatttgttattaccgattgtctgcagccttcttctctcaactcatcaaagtcattctccgtccagctttgttccattgctggcaagcagctgcattcctttggaggagaagaggcactctgattttttagaattttcagcttttctgctctggtttctccccatctttgtggttttatctacctttggtctttgatgatggtgacatacagatggggttttggtgtggatgtcctttctgttttttagttttccttctaacagtcaggaccctcagctgcaggtctgttggagtttgctggaagtccactccagaccctgtttgcctgggtatcaccagtggaggctgcagaaaggcaaatgttgctgcctgatcctttctctggaagcttcatcgcagaggtgcactctgccgtatgaggtgtcagtcagcccctactgggaggtgccttccagttaggctactcagggaggagtaacagactaactcccacttgaggaggcagtctgtccattctcagatctcaaactccgtgctgggagaaccactactctcttcaaagctgtcagacaagggtgtttaagtctacagaagtttctgctgccttttgttcagctataccctgccccagaggtggagtctatagaggcaggcaggcctccttgagctgtggtgggctccacccagtttgagcttcctagccactttgtttacctactcaagcctcagcaatggtgggcgcccctcccccagcctcactgcygccttgcagttccatctcagactgctgtgccagcagtgagcaaggctccctgggcatgggaccctctgagccaggagcaggatataatctcctggtgttctgtttgctaagaccgttggaaaagcgcagtattagggtgggagtgtctcaatattccaagtaccatctgtcatggcttcccttggctaggaaagggaattccctgactccttgcacttcccgggtgaggcgatgccccgccctgctttggcccacactgtgtgggctgcacccactatctgacaagccccagtgagatgaacccagtacctcagttggaaatgcagaaactaccatcttctgcatcactcatgctgggagctatagactggagctgttcctatttggccatcttggaacctcctctgaaactgcatttttaataatgtctctaggagattctgatgtaggggtttctgggagccggttatatgaaagacttccaaaatgttttgtaaaaaaaatagtagttttagtatacatatgtaactaacctgcacaatgtgcacatgtaccctaaaacttaaagtataataaaaaaaaatagtagttttgtccagtaaattgtcccccagaagtaaatttagacctagagacctagatttaattatctctgtttactttactagttctcgaattttccaggggccatatcattgagccagaatttcctttttgcctcacactaaacatacgaagccaggccctggaggratctgtgagctgtttagctttccaagctctggataataatttagtttacccagctgtaaaatgggcaaaagtaatacacatattattgtttaatggatggattatatatttatgctttgagctctgaaggagttgatactaccctgagaggttttttttttcttttcatttttataatacttcccaaccatgatgtaaatattcataaaaacctagggagtatagttgtcatgactaatttgataaygaaggaattgttagctagaagcgtttcctccatcctgtakctgcacaaagcagagactcttgtgtagcaaaattaacatgacatatggtgtttccaacaacagagtctcatgagatacttcgagttcagaggttgttatagtctaagaaagaaacctgcaacttggaaaagtctaattctgattggttgtttaacttaacaatttgttatcttggtgataataaagtgacatatctttataaaaggtacatatatttgtgatatcataaatggtataaataccatccttatacccagttagaaggtgcctttggccccgtgctttagagggtcccatatatcacagatacaaacatgtaaaattttgaaagaacaaatagcacctctgttactcagaatccagtgcttaattctggtagaattggacttgaaaccctaaacatccagcccagggaaaagttgcctatcttcccttctttgctcacaatgaatggagattatatcatgcatgtttgtgcattgtgagggagctgatttttagagacagattctgctttggagttcagagaggattgtagcaataaagatcagagaaaaggcaaattcagcaaactgctcaaagactgtctttcaccagaatgcaatagattcttatgtaatgaataattatttttccagtacagtaggacctattgtccattttcttgcttttctttttgttctaattcctggctcaaaaagtactcatgaattagcagtatttgcaacagttgcacatggtgactgaataacattctgcatcattaagaaattcatactattcttttttttctttttgacagagtctcgctctgtagccaggctggagtgcagtggcacaatctcggctcactgcaaccttcacctcctgggttcaagaaattcacctgcctcagcctcccgaatagttgggactgcaggtacccaccaccatacccacctaatttttgtatttttagtagagatggggtttcaccatgttggccaggatggtctcgatctctaaacctcgtgatccacccrccttggcctcccaaagtgttgggattagaggcgtaagccactgcgctcgggcataaattcacattattcttaaacttgtacacatgcagatttgaacttacatatggagtcaaattctcttctgtatttggactctttctttgtgccaatttgccaatcagtaaggttcctgcgtatgagtatttaaatataaaatcagatgggaccagattttcatagcacacccaactcagaaaatagaatacataacttatctaacatatctaccgaatgtgaaagcaatgacagtattcaaaatgctactaataaggatacaacacaatgaaaacaaacttagaagtaaaaatagataacaaaagaaaaattttctttattatatttggaataagagtgcccatttttaacagctataataaaatataattcacatatcatataatccactcatttaaagtatacaattcaatagctttcattatattcacagttatgcaaccagcaccacaatcaattatagaacattctcaagctgtcatctcccatcgtcacaaccccctcccctagccttaggcaactgctaatctattttctgtgtctataaatttgcctccgttccacatttcatataaacagaatcatacaatatgtgactttttaaattgccttttgtcactttgcatgttttcaaggttcatctgtgttgtatcatgtatcagtaagtacttcacttatttttgtttccaaataatattccattatgtggctctaccatatttaatttatcaattcatcagttgatgggtccactttttggccatcgtgaataatacagctatgaacattcatgcacaagttttgtgtgaacctatgttttcatgttttcctttttcttacatatgtatctaggaatggaattgctgggtcatatggtaactatgtttaaccatttgaagaactgtccaactattttccaaagtggctgcaccattttacattaaacatacttatttttgaggtaatacagattttcttatctgagatctcaagagatgagttactgaaagagagagaaggctgtaggaaggaaaatgtgctggtatgatcttcatttctgactaaaggataaactgaaaaatggaaccagattgaattggttgcagttcagtctatacctctgctattcaaggtgtagtttacagactacaggccttgttttgacctgagagcttgtgagaaatacagagtctcaggctccacccagatctactgaatcatagtctacattttaacaagatcctcaggtgattgtgcacatgaaagtaggcactgcacattaaagtctgagaaatactggtctagttagaactctagatattctacaggtaataacatgtaagacagtgctggactacacacaaaagtgtgtgctcgtgtgattgaaagctagagtgtattctaggtatgcaagccatgtcctctgccagtcattttctccctcctcccatgtctccttcttggataatttgctctcattcctgcagaaagcatgcactctaagcccctgctttctctggaatatgatctcattctcttggtcaactggattattattattattattttttttttttgagagggagtcttgctgtgtcacccagcctggagagcagtggtgcaatctcggctcactgcaagctctgcctcccaggttcacgccattctcctgcctcagcctcccgagtagctgggactacaggtgcccgccaccacgcctgtctaattttttgtattttttagtagagatggggtttcaccgtgttagccaggagggtctcgatctcctgacctcgtgatccgcccgcctcagtcaactggattctattggtaatggatattgacttgaaatgagacaaacagatatttctttggaattttgatcagaagaaagtgattctagaaagtctttattgaattattattattatttattttttgagacagggtctcatctcactgtgttgcccaggctgtagtgcagtggcacgatctcagctcactgaagcccccacctcctgggctcaagtgttcctcctacctcagcatcccaagtagatgggactacaggtgcatgccaccaagcccagctaagttttgtattttttgtagagatagggtttcaccatgctgtccaggctggtctcgaactcctgggctcaaacaatccgctcacctcagcctcccaaagtgtggcgattacaggtgtgagccactgcacctggcctttgttgaattattaggagaagagataaataacctggtaggcatgttttccacttcatgcacagagacgcaaagtcatctctagaaagagaaacttgaaggaagaagacgtaaagggaagataaaagtgagaaagaaggagagaaaaaggaagagagagatggtggggacagacagagagagaggagagaaaactagcattctgggtgtggagaggatttccgtcatacagattccacacttgaacattttatttttctgtgatctatacgccagtgccttttttggaaatatatgcatgcactcatcagattgacaaaaattaaagactggtaacattcagtattggtgaagatgctgaaaacagtatttctcatacattgctagtggaaataataatttcctttttaacacctagacaaatcaactcttttccataacctaaaagccttaatcattatttaaaatgtttctatttaaatattctagtgaactctagttttccttaatcaacaattagaagatatattacaaagttttatacatatgttttaaagctccaacttatgtaggtgtttcactaaatgcaaaaaacgtacaagtaggtttgagggtttttttttttttttttttttttgagacagggtctacctctgtcacccaggctggagtgcagtggtaccatctcactgcaactaccacctcccaggttcatgagattctcctgcctcaacctcctgagtagctgggattacaggcacacaccgccatgcctggttaatttttttttgtattttttttggtagagatggggtttcaccatattgatcaggctggtctggaactcctgacctcaggtgatctaccctccttggcctcccaaagtgctgggattttaggcttgagccaccacgcccagccaggtttgagtttttaaatgtagtgcttgatgacaaattagtaagtttmatttaaaaatgagaaaggaaaatgtgtgctcagtggttttatatcacagtgcctttgctctgtaatatctgtgaatcaaaagcagaacataaataggctcatttacttgggatatccaggattctggaaaggtaaagaaagacttttcaaatattttaattagattatatctgtataaacacactggggccaatttccagatctctagaagggtttcaggaatttctaggttcagggcagaatttactrtrtatttttacattttactcagaaataacacaaactatgactcattatgtttccaaaacaagtgagacataaaccaaggctctggggtctatttgtatcgtttacctgtttggtagcctccttttcaacagcagcctacagagaaccagaggagaagcagaactgtttgggatttgtttccacaggcttccaacaaatcctgcctctggtctcttctctagtcttaagtcctgtatgtaaagcagctgaagggaggccccatgtagagctgagaatgcctctcttacaagtgcatgcacctaggtacatctaaggattttagtgggtttccctctttgcagcctccctagaaggtgtagataatcagcaatgaggtagctgcactattaatcatggggaaaatttcttacatattagtctaagttagtcccttttccaaaaagggcaatagggcaaatgtaggttgcaaactgcaaccctcagattggcatccaaggttgattgcacgtatggtagggatcctaacacaaggcctatctgtgttataatcagaattctaatgcttccagtcttccagttgcactggatccagttgtattggatatgtcaattgacatagggtatgaaggaaggtgaaagtgcagcatgactcaaggtcagctgtccccagggactgtgtctgagctctatggagaaagacaagcagaagtgatgaatctttttcactgaggactctgaggcagagaaataaataagaactacttggaaccaacacagagataagaggaattcttctcactctttcactggcactaacacacttgaaaacattgttggcagagatattagtactctcaaggtggcaatcaaatacagagaatgtgaaatgtattgaaggcagttttaggggcaatggtcattgatggatatgggtgttgaagctacataagtagcagatgtggtccgataactctgataaacgggttcatgagcacataggagacatctactaggggcttgccgtgttggatgaatatatgaagggagtcaaatgtcctgccccgggaaatgtggctaaaaggctgggaattacaagtcaagcccaattaatgtgacttcatttgttattcttggatagtgaaatttcaggaaactggagctatgtacataattttcattgttttccaatcatttgttaactttaagccctcatattaagtgtaatatgttatgtttcccttttctacccttcttgctgttttcccactaagggtcctgttccagcaagggactggaggcatgacatgcaaggacaagattacatacatccatctttagcacacacaggtaccaagggtcctctctcaaggtcggcatacctgtccattttaaccttycactcagaatacgtgtggtgttccttcccaggcaccagatgtagtcctaatttactcagatcaaggtgagctagatcttcccctgaaacatacacttgtccattttgatccaatgaaatgagtttacctttgcagttggtgtgatttgtgttttccattagaggcctmttgaaaaataatagagattttgggccttcttgtctcttcctattctttacttaatagggaagactctttaacatgcatttggattgcgtccaggatggggcataaaatggaatcagtgacttttatttctcataacagaggtcagaatagagaaaatgtgatgaaagcacaaaatttaacaaagaaaaggggagcagcccacccaccatcaaggtggagacagaatgtctgtgttcacgtaggtcaatggtagcaggtggcagatggcagctgttatccgaagccctggactcttaaagctgaggaaaaagttttgttctgttcaggtgattatgatagtagaccagtcgaggttatttggatttggttcacacctgtgtaacgtttcatttatcagtagctgagtctgaaagatttaaagtacagcaaaattccagatgaaccagaacactgctttatgttttatcatatttaggttatttattaatgaaaatatatgacattttcaggaatacaaattttgcaccctgatgacctcaaatgcgtgcaacaagatgtttaatacagaaaataacacaaaaactgttgttacagtggttagaatttttaactttaaaaaaccatgaatttgtattgttttaattgcacaataaaataatgttgatatatacttaagcttaaattaattccaacaggcaaacattttccaacccagagtgtggctgatgctgggtcagctgactctattttggttcacaccaactttgatgtctaggctattcagcatctacctagaaaatctcaatcgttccaagcataccgtgaattttgtgatttctcagaagattttcggagttaaaagaagtgtttatatcacttaatatccaacatttctaaaggggggaaaaccccaccatctattatcaatgacatttcccaagtccttgcaccaggcccttagtcaccaggttcccacgttttgttgctttcctaccgtctcaaaccaggttcatgaaagcatttgaacagagttcagtcttcattttacaaaaaaaaaaaattcctaatagtggctaaaatactgcaaatttctccattcgattacaatctacaaagataaaccagcattcctttctctttctctcttttggttacttttcccctatccctactggtggaacatttattttttcacacaggttttaaagaaatacattatgttggtttctagtgtattgtacagaatccattctcattctttacttgctacattatgactatgaggagggcagagtagaggtgaactctctgtatacttgctgaaagtcttcttgtacacattgctttttgtacccgtcgcttctagctatgtatcttcctgttctctgccctcgtctcaaactatgttgccacctcaattaatcaggcacttgaattcacattgtgtagaatactcaaggttgatgatagactgggaaggaggaggaaggaggcagagataagcgatgggggatactgagccctatttagactttggtccsccagcttttggatgaacttagcacattactggctatgcaggactaacctctatgggatgcaaaatgactccaagtatggaacaacattgcaaaaatggacttcaatattacatgaaggatttggctgctttatataaatatagaaacaagcccagtrgattactccactaaaggtgactaagcaaatgttacagttcaaattgcactcaagaagtcaatcgagaaataattctatcaccaagcccgtggacctaccccccaatctggtccctctcccagaactccttgggctctctcaagacccagcaattcaggtgttaacataaccctgtccagtggtatggccagtgtcttagtccaatcttttgccataccagtcattacatattttgaataccaacttggtggaggaatttcagctccctttcagcagtagcctagtgggcaccacatctctattcttcattccccattccagcttgatgctgaagggatgaggcttccagactccaaacccctctcagagtcttcatctgcttgttgcattttttcattcagctcctgaaggaatgccaagacatgcaaagcctcagaatctgctccatttttagaaagtcgcattttggcaattttttgcagtttgtctttcatcttttctttctcccttgatttctggtttatttttacaccctctataaagtggtggatggccttgtcttcacacttcatttggtacagctgaaagttgccataccgcagatggagcagttgtttcgctacaggagtaagctctttactgaattccttttggaagtaatactctgcktcttcatactgatctgctagagcatggaggctggcaagaatggaacagacacggaagagattatcattggcctcatcagctttcttcagatgagccacagcgtgtcctattagttccagtaactttcttttcccayacattccattctctcttagattcattrcttggaagacttttgccctatagcagcacccaatttggcaatgcaggtaggcattgtttggtatgtattctaaagcctttttaagcagttcaatcgctttgtctggctcatcttttcttcgataaaacttggctgcactgcgaagwacatctgttacacctggggctttctccaaggcttcttcaactaacttctctccttcaccttcctcttcaccttcttcacgcatcttatgaagcttcagagccaggaggactttaaggtactggttgtcaggattcagccgaatggcttgcctcagagggtcaatggcgttmtgagatggtggccagttgtccagacggtagcttgctattgccagtccagaggtgaattctgggttctttggcttcttttccagagccttctcaaagcacaccttcgctctttcattttggtttcctccacactttaacsgtgtccacccttcctcacagtcaagctctggactctcaattctatagggactggaaaacttctcacagacatgtytcaccttgtctacataaatctgaacgtctgagagtcggcccatgtgatagtagacccaggcatagtttccccaggtgaccagacttctgatttctgcctggtcagcatgctcttgctggattaackcttcagctttacgtaagcattccagggctgcctcgttttgccctttgaggtgctttagataggccagtaggttgcacattgtggctttgaattcacgattctgaaactcagtccggtaaaatactttgtcttcaaaatcatccaaggagttttctccctccatcaagttccaggtgaaatggcattttagttgccgtaggctgctctccaaggaattcttattgttctcactgtagggaaaaacacaaagatggactttgagacacagatttatatgtcaagaaatgggagcatggcaaataaaatgctcctcctcctaaaggctgttaacacaaatcaaagaaactccccttcttttctttctataatatgtttttccttattgttaattcctgcatgtggtagcaggagtttagggactgtgggcagcagaagaattagggcgagggcagtgggttgttctctgagtctgtggctaggttttcatgaataagacagtttttgttaaacagctctgccctctctgctttcgagggtctctgtggaggcttggttttatttatgtagttttaaagaagtaagtctttttcattgctgtttctgttcttcattcttccctagctttacttttgtactttgaaaatttcagctttataattttttattcttttaatgttttgccatggtgattttaatttctcatccctccgaaatgcagcttcattttatctttgatattcttaattccttagttctccttcatttgcctttaaagaaatctttatcactttcgattttctgtctatttcagcttttaatatatccttcatttattttgtctattcaaactttctgagcttttatcagattggttttattttgtattggtttattactttaacatgctacattctcatttttttctgtgaatttttccattttaaccatttgaatcttattttcaaccattcttaatttttactcattttatctgcttttgtattattctctcatttaatttcaagtattatttatgttagcaatgtcttaaacatttattttggaataaaatgtaattttttttcctcccctcccccccatacctctatttcttaaactggtgatttctgttcttaacacatctcattgagttgctctattaataattttgtactttattgttttaattttttttttgaaattttatttttctcttctgggttttgcttttataataaggggcaagaagtgcagctacagggaaggctcacaaggccactagctccttttcttatagaaagagctcttttttctttagggtacccttatgactctcctggaaagattttccattccctttagtgttggtcctcaaaataaataaataaaccaaaatcaaccaaaccaaaaaacaaaacaaaacaacaacaaaaaaamcccgaaaaaacccagagaacagacaaatgagcaaaagcctgtatttcgaattactttggagataaatagtattctatgccccaaattatttctcaacactgtctgtgtattggagtctctgtaatgttgccttttcttatttaaatttttttttcgtggtatctatacagcaacccttgtatcaggagctgtatttctaaatagtatggcttcttatacaaccaatagatatctggaatgtcatgcaatgtggcaggatcacttatgaaacatatgtctagatagaagattatgtgacccctctttctaactgcccctctctctcccactttttataccactgcttcccactcccattttgattgggaatcttcctgtaacctcactaagaataaaaacagatctgtttggacatgagcttttcaacgggaatgcatctgccattaggatgcctgataccaagccaagcactctccggggctcccgcrcctggggttagttacatcaagggacttagacaacctggctctttgctaagacctatttggagctttgaatggaaggcgggtccttcctataaactcctgcctattttccatcctatttttgtttgtttgtttgtttattctgcctgggatagttaagtctccatttgttccaagaaacagaggtgagcaggaactgatttaaagttactagagtgcttcacaggaccatgggtaggactgtagtgaccccaggaggatcagaacaggacactggggagcttggagggctcagaccctgtgttttctccatgtgcatctcagtcacactctctactgcattcattacagaatatggtgagtcctacagaatatgaccactctcagaccccaagcatgtgcagcacgcatcctaacacctgaagactcactatagcttccttgctccctctcaattctatttccaacttccagttgagtttgggagctcattcccttaacacataaactccttagctcctttctcattttacaaaagaaacagagagagtaaatagaattgaggttatctccaccatataaaacataaagtctattgtgcatttgcaggatagagatatttaatatacacacttaggtaaaagccctttgagcagccatttaaaaggcatccaacttcactgcttgattttgggtttttatttccactggtaagttagagaagctgatgccagacacttgcttcctgggctctggcttgtgaggacctattctcccgattcctatagaagttccagttgtatacacaacaacaacaatttcttcctttgcctcttatctggatgaaagccacagtgacattatcaaccaggctcagaactaatgctaccaccgcagtctcagaatcactgaggagccttttagaaacacacatcctcagactctaacccagacccacttaatgagaatctctggggagtcaaccctaggactctgtccttaataagctgtccaggcaatttttatgcatgctcaattttgagaaccactgtcttagggcacaagggcaatgcccagtgaaagtcacaatagataaagaattaaggaaagaaaggacagatgggtctgtattgtaatgggaaaaattctaagataagaccatgctaaaattctaagaaataagaaaagggttctatagattctgggtgactacaaaaaaaagaaatctgtaaatatctcaaatcttttttttttttttttgaaatcaggcagaacatttagactagcaggaaataatatcgtttcaagaagagaaatcaggaacctcacagacagarggcaaggtgtctcataggaagtaagcacaggggttggtaacacgggattccagagctcccaggatgagggttaggcaaccaggtccggccaccccaccttcaaactggagaaaatatttcccttcctattcaatgagctaacacttcctctccagggcagtctcatgttttggggatagaagggaatgttagaggtgagaacagaactattttctccaagcactccatctctaattcatactcaggaggcattttggggtgaaaatatttaagtttaccagcccttgtgcaaatctgagatgaagaactacattaaaagtaaaattcacctttgcaggaagtggggtttgctattctgtgtatatctttaacagtatctgctgaaaagaacccttttgttaaataattgtattacaagtccccaacttaatcctttcaaatatgaaataagacagggtcagtgcacaagagcaatgcccccagacccatctttaagtgaagcaccaggccgatgaaacatcatccctctctgctgccttctttctctgattgcaactcaactccccaggcgtgcagttctggagatgaatttaggaagcttgccagtgtgaagcagaaaattgttcaggagggaacaaaccaccattggtaagacagatttacaaccaacagaggtagaggcatagtaaggctataaacaaacactaaaatggagctggccctctttgggaacatagcttctcaggatttgcattggacaagatgactcaacagcactaccgaatacgaagggaaaatatttacctcatggttgcagtgcaattctcagctgttcggcagggctcggttcaggcagctgcactcttcagaaatcttcctcttctgccaccaataaatgctgaagagacctatatatacaagtggcctctggttcctttttgtttgtttcccttcagctgacgttayaaaagggaaagtgaaactagaaagtgaaattggcaggactctttttctttttttctttttattatactttagaggactctttttcctccggagctgagttgtgatcagagaaagaaggcagcagagagggatgtttcatcggcctggtgcttcacttaaagatgggtctggggacattgctcttgtgcactgtccctctcttatttcatattcgaaaagattaagttggggacttgtaatacaattatttaacaaaagggttcttttcagcagatactgttaaagatatacacagaatagcaaaccccacttcctgctaaggtgaattttacttttaatgtagtccttcatctcagatttgcacaagggctggtaaacttagatattttcaccccaaaatgctcttgagtaagagccaagcccagctgcgtagtgagttagaagaacttcctctttgtggaatgtactgatggcatcaagggagcacaactcctaggaggacacatttacaaagctccctgccttgtgattaccatattaacccatctttgctctgccttataccaatatgatccacaggccactgtaaggagcagttatttagcctcgacagggcaggggattttagtctgaatcattgctgaatctccagtccctgcaaaacaacctgcacattgcatggtatggcaagcattccaaaagtagttgttgactaaatgaatacatgattagaagcatgggcagtgatgtctgtctatctggatttgaaatcagcttccacctttatgctatgaaactctggggaaaattattgaatgtctctgcttcggttttgtaaattgggaataatacaactactggtttattgtggtgttgggaggatgaaatgagagaatacgtgaaatgtccttagaataatgcctggcagtaataagtaaatgctagtttctattataattattaactaaaatcgttaaccaaagtgatcagaggggaaactctttttttcaggctggagtgcagtggaaagatcctggcttactgcaacctccacctccctggttcaagtgattcgcctcagcctctcgagtagctgggattacaggcacgcaccaccacgcctggctaatttttgtatttttagtagagatggggttccaccatgttggccaggctggtctcgaactcctgatctcaggtgatctgcccgccttggcctgccaaagttctgggattacaggcgtgagccaccacgcccggccaggggaaatttcaatgttggctttttccagaactttatctcctctgacattcaacaatccatcacaattactgacctaagccaaacaattcctaacatctccttatgttcttggcttccccaagccccacaatattttccccctttttattgatgtataataatttacatatttatgagttgcatgtgagtgtttgttacgtgcaaagaatgtttaatgatcaagtcagggtaattggggtatgtatcaccttcagtgtttatcatttttatgtgttggtatcatttaaagtcctctcttctagttactttaaaatatacataatattgttgctaagtatagtcaccctagtcggctatcaaacattagaacttattttttttatttaacggcatgtttgtacccataacctaactctcatcttcccaccaccccccttcccagtctctggtatctattattctattctcaatgtccatgagataaagttttttagctcccacatttcagtaagaacatgcagtatttgtcattctgtgcctggcttattgcatttaacataatggtctccagttccaactacattgctgcaaattacatgatttcattcctctttaatggctgaataatatcccattgtgtatatatacaatattttctttatccatttgttcactgatgagcacctatgttgatttcatatctttgctattatgaatagtggtgtgatgaacatgtgagtgcaggtatccttttgatttactgatttattttcctttggatagacatccagtagtgtgattgctgggtcttatgaaaattctatttttagttttttgagagctttccatactgttttccataatgactgtactaatttacattcctaccaacagtgtataagagttccctttcccctgcatccttgccagcatttgttatttttttttttaataatagccatactaactggggtkagatgatatctcattgtgatttttatttgcatttccttggggttgagtgatgttgagtattttttcatatgcctgttggtcacatataccagagctcctttataggtgatgagatgcttttcctttgctgtctttaaaattttctttttgtcactgactttagatagtttgactataatgygccatggagaagaacgtttttcactgtatctgattggggattgctgggcctcctgtatctggatgtctaaatctcttactagacttgggaagttctcatctattatttcattacataggttttcaaaccctttcagtttcccttygcctttggagatactgataattcatatatttkgtcaccttatggtgtcccatagatcgtgaagactttgttcatactttttaattctttttttttctttattttcgtcttattggattatttcaaaagacctgtcttcaagttctgatgttttctcttctgcttggtctagtctactgttgaagcttcttgtatattttgtatttcattcaaggaattcttcagttccagaatttcagtttggttatttttatgatacctatttctttggcaaatttctcattcatatcctgaattgtttctccgatttctgtgtattgtttgaattgtattggatttggaaatctcttgtatcttgctgagcttctttagtattttttatatatacatatatattatttttttattttttatttttttgagatggagtctcactctgttgcctaggctggagtgcagtggtgcgatctctgctcactgcaacctctgcctccctggttcaagtgattctccttcctcagcctctcgagctgggattacaggcatgtaccaccatgcctggctaatttttgtatttttagtagagatgggttttcactatgttggccaggctggtctggaactcctgacctcaggtgatccaccctccttgtcctccctaagtgctgggattacaggtgtgaggcactgtgcttagtataattttgaatagtttttcctggatttctttttgattgggatctgttgctggggaattgtattcctttgaaggtatcatatttccttgcttttacatgcttcctgtgtcctttcactgatatctgagcatctaatataatagtcacttctttcaatttttgaatttgcttttgtaggggaggactttttcctgaagatatatcaacaatattggttgagtaaggcacttcaactttgattctgagtgtgcatggtagtgtagcctctgtacaatttatttggctgtgatcagtgatatatatgatttccttgatggtttagggtggggtttattcttggaggctatcgtgacattttactgggaacagggttgccatgtgggccagtcttcaggccccagtggtggcagcagtgggttgaggatgtctgatcttcggccccagaacaacatacactggcactggtgttagtgggaccaggtaggctaattcctgggcccccagatagcttgctcagatgctgatagtggcagcagtgggccaggtgggtgagtgggttctcaagtccctgggcagctgatgtgatctgggcaatggcagtagccaacggtgggacaaacccttgggttctgataagtgtacactgatgttggcagtggctgtggtgcagggttgccacctataccacagacacacagctctcaggctctttcattctctgtaatagcaaccccgcagcactgtgcagagagaggagagacgctgttctttaggtgtgagcctaggcacagaggccatgcgtccagtgggggtgcagtcaccactcacagcaccagacaggcggccatctggcttccctgccccagcctctggtagtagcatcagtggctgtgcctgcagcagtgtgtagaggacaagaaggggctctgctctctacatgtaagcccaagcacacagcctgcttcactagtgggagagtatctcactatccacttgtgaggccgagtacagagtttgtggtgctgctaagggtagggtcacttctcacagccccaaacaggaggctctggaaaggacatgttttagtttcctttgtatcaggggctgtctttttggcacattgcaccattctttccctggggagtagtactccctgtgggctggggtgctgcggacactgtattacctttgggtctagccagtgctgtgtcactgtagcccactgggtggatactgggaaatatcactgggggctcctgggatatggagatatgggagctgcggttcccaggataggatgtaattccatgactatagtctcacaatggtgccgcttaggtcttgggggagctgagagacccagcgtgagttccctgtctcatgaaatacccttgtggggtctccaaatcaccacccatactggtgtcagagtttgtatgggtagagaaactctctcatgtttcagattgcagcagtttgcaggagggatgtggactgctgaagttctctcatttgacctttccctgaaatgccaaggccctctgttatcctggccaatctcagccaagctggccacttgataccttcttcttctgcgccttgggtgtttcccatgacttctctgttgaattctagtgttgtctcctagatgttctattcgaggtataattatctattcataattttggttcttctttctagagagggtgggtgtctgatgtctctagtcagccatcctgaaccagaatccccaccatattttaaatccctgcttgttgccctggtatttgacatccccaaatcacaatgtacagccatagtgttttgtaatgatagaagaaatgtattttccttattcatacccttagtcacaaagggggtaatcatgtatataggcccaaaagaaaataatagtacctcaaagattgaggtcagaaaattacacaaagcacagatagaacacattctccagcaaaactgaggttgttaaggtaggttattcagtcttgggaaaagttatttaccataattttttttctgcctagggcagggaggaaaaagaaactatccttcctaaaaagtctccaccctttgattaggatgcacagctaagcctgtcccagttggaaacccttacttttgtgtcttacgcaagagtttcaagttccttttctgtttacaagttcttcttcttcttttttttttttttttttttgagacagtctcgctctgttgccaaagctagactacagtggtgagatcttggctctctgcaacctctgcctaccgggttcaagcagttctcgtgcctcaccctcccaagtagctggctacttggcccagctaccaggcccagmtgatttttgtatttttagtagagatggggtattgccatgttggccagtctggtcatgaacttctggccttaagggatctgcccgccttgggaagcactcccaaagtgctaggattacaggcatgagccacagtgcctggcttctatttacaagttctattaggtacttacagaaatgtatgttaggtttttaagaaatgctgaaataggaaagtggaaatgctgtgggtttggtttgatttattttttgaactcagtattcaagaaaactattggataggaattttaaaatcttgtgaataaaggtactggttggggagaagcatagagaaaggttttgccatggtcactgtgctttgaaatggttgagatactgatttacacttcagaaatttgtatggctagtgcctgtatataatgttaccacagcaggtatgcatcagctgatttagtagctgggttagtgtgagactatgcatgcaatgtgattgcaaaatagcaactgaaaaggaaaaccaactttctcctggtgttatttctattttgagaaaatgaaacttattagaaagagttctgcctaacctcgttgctacaaatatatatgtgtctttttcctggaatataggccctgttcatatttcctagaacaatagatttcatttatatagaatatagatttgcttcctgttcctggaatgggttacatcaactacagatggtataatgcaataattctcatattgctacttgccaccagcaatatcagcatcacctggaagtgcaaattcttaggccccattctagactgatagaatcagaaattccagtgtgggacccagaaatctaggtgttgataagccttccagataattataatggatgctaaagtctgagaaccaaataatatattgaatgtaagcaaaaatacttttacttctataaaatgaaactctatgctttttccttgagattttttaaaaaatttgaccctcttttttgttttgagtctatttttaactgaagttttgtccacctagaagagctggtgactgttcaatagtattcgcacttgttagaggaatacttaggtagcccagtgggttctcttgatccccacaatgggctgtaatttgaaaacaatgtgttcccacctatatgacattcccttctgtactcattcacaaatacacgtttaaaatggtcttccacatgaacttcaaaaatattgatatagttaataaaatagctccccattcttttttcctttccattcctttcctttcctttcctttcctttcctttcctttcctttcctttcctttcctttcctttcctttcatttcatttcctttcctttcttcctttttttcttttttcttttcagacagagtcttgctctgtcacccaggctggagtgcagtggcgcaatcagagctcactgtcgccttgacctccctcccaggctcaagtgatcttcccacctcagtctcctgagtagctgggatcacagatgagtgccactacacccagctaattttttatttcttgtagagatagggtctcactatgtttcccaggctgctctcaaactcctgggatcaactgatcttcctgcttcagcatcccaaagtgctgggattacaggcataagccacagcacttggccagctccccattcttattcttttttcaaaaattaattaaacaccatttcttcttgctgtggtttgaatatgtcctccaaagttcatgtgttggaaacttgatccccaatgtggcagtgttgggaggtgggacctaatgggaggtatttgggttatgggggcattgtcctcttgaatagattaatgccattattgagggacggagttccatataaaaggatgacttcaaccttctcttgctcaccctcaccccctatttacccttccatcatgggatgacccagtaagagggccctggccagatgtggccccttgatcttggactttccagcctccagaaccatgtgtccataaatgtctgttcattataaattacccaatctcccaatctgcccatctgtggtattctgttatagcagaaaaaaatggactaagacatttttcagcattaattttttagactgcagttgggcagtctttgagtggaaacttgatgcgggtaaatgactttatctttccatagtcctattcagaaataagaccatgctaaataaacttctgctgggacaatttgtacacttatccctgttagaacactaggagtatttgtttcattcattcattcaccattcgttcatcaaatcaatacttactgagaatctactatgtgccaggcaccattctaggctcttaagatacatcagtacacaaagatctctgtcttcatggagcttatattctatcaggaagagatggcaataaacaactgctttggactgaattgagttcccaactcctttcccaaaattcatcattgaagccctaaccctcaacgtaactttgtttggagatagggcctgtgaggaggtatttaaggttaaatgaggtcttaagggtggggcccctaatctggtaacccctaatctggtaacactgacgtcttcatacaaacaagaagaaaaagaagagacctcagatayctctctctctctctctctctctctctctctctctctctctctctcgtctcacacagaggaaaggccatgtgaagataaagaaaaggctgccatctccaggtcaggaagagaggtctcaccagaaaccaacttggacttctagcatctagaactgtgagaaaatagatttctgttgcttaagccacctagtctgtgatttttcattatggcagccaatgtagactaatacaataataaataaattagacaatatgggacaagtccatggggaaaaaaaagagtaagtggagaccgtaagaggaattacatatgggtggagaaaagggggccgggatctgactgctgctgttaagtaatagagatggaaactgtgttagtctgttctcatactctagaaagatactacctgagactgggaaagaggtttaactgaatcacagttccatggggagggctcaggaaacttgcaatcatggcagaaggcaaaggggaagcaaggcaccttcttcacaaggcagcaggagggagtgaatgtaagcagaggaaatgtcagatgcttataaaaccatcagctctcatgaaaactcactcattatcatgagaataatatgggggaaaccacccctatgatccaatcctcccatcaggtcctgcccttgacacatgaggattatggggattataatttgagatgagatttgggtggggacacaaagccaaaccatattagaaacctttctgtgcctcaatttcttcatttttaaaatgagaattgtgcccaggtacagtggctcatgtctgtaatctcagcactttgaggggcagaggcaggagaattgcttgaggccaggagtttgaaacaagtctgggcaacatagcaagaccctatctctacaattaaaaaaaaaaaaagtagccaggcatggtggcatgagcctgtcctcctagctacccaggaggattgctttagcccaggagtttgaggctgcagtgaaccaagattgcaccattgtactccagcctgtgtgacagaacgtgactaggtctctaaaaaagaaaaaggaattatgttagtatttaccacatagggttttgtggagattgagtggactactatgtataaagctctgagaacagtgcttggcacatggtaaatgcccaataagggttagttattactaccttctactgccacccataccatttaccatctttgaataccacttacttctagggccaggggccactcacctgaaagtggtctgttctctaatgtggagctttgactatagtattatcaggtattggtggctgccgctggattgctatttcagatcctttttttctttttattcgctttgttggccacagtgagaaactgggatgctactccagaagaagacaaatcagtgcctctgtacaaagggatctttgtgctgccaaaagagtagaaaagtttatcccagaaccaaaatatttcagaattgtggaaaatcaagttttggaaacctactcaaaagaagaagaaatattgctatcacagaatccctgaattagtatacacctagccgctgtaacaaagatgctcaaaaacataaatgacactgtaaaagaagtttatttcttgttcacataactgtccaaggctggtgttcctgggcaacttccagttctcttccatgcaatgattcaaggacacagagttcttccatcctgtgactctaccatcccctagagcctggaaattgagagtaaagagggtacacctgattcttaaccatctttacttggaaatgacatacatcacattcactcacattctattaggaagcactagttcatggcccacctggggagaagtgaaggttagttcatgtagctgcagagtaggaagcccccttcctggtgacgacttcatattatgaaggggaaacactaatttggaaggatcatgagttgtttccacaacagtatcctgctctggccctaaataaccatgtatacacttcttcccaaacatagaacataatgggacctttcccaggggagccaacccacagtcaaggaatcattgcactcagctcatggtcagggatttctgagtaaagcactgtcctgcctaaaggtcagtatgtgactccttgtggtctcatgcttaaaagaaaaaaaaaatcaaaaggctagttaagactatataactcatgtgtatcatggtatcatgtattgtggtaggttaactataataaatactttaaactgaaaaaagacagcatggaagaatctcagggtgtggcaacaaatcacaaaataggcaccaaaagagttatatgtggttacctctggagactgggaaatagggtggaatggggaagggggttgctatgtctcctaccttgtagatcacgttgactatttaaatgatgtgaatgtatacatttaattaagctaaaaaggaaggaatctggaaggcagggaggaaggggaaaaaatgaggaagaagagaatggagggaaggaacaaaggaaggaagtaagaggaaggattggagagaaggaaggaaaaaaggaatgaaggaggaaaggaaggaaggatggaagaaaggaaatgaaaaaaagaacaaagaaaggagaccgagaagtcatcctacatcctacatccatattttgcaatattattatgaagctctcaatacccatgtcattgaaaaattgtaataatatcagaaaacactcacaatataatgttaagtgaaaggataagatgaaaccaactgtaacatacacccttaactttgaaatattttccaaagaaatctattttatatagtttcactcttttccacgtgaagagaccaccaaacaggctttgtgtgagcaataaagctttttaatcacctgggtgcaggcaggctgagtctgaaaagagagtcagtgaagggagatagggccggggccgttttataagatttgggtagatagtggaaaattacatcaaagggggttgttctctggctggcagaggtgggggtcaccaggtgctcagtgcgggagcttttgagctaggatgagccaggaaaaggaatttcacaaggtaatgtcatcagttaaggcagggacaggacgttttcactttttttgtgattcttcagttacttcaggccatctggatttatacgtgcaggtcacaggggatatgttggcttagcttgggctcagaggcctgacattcctgtcttcttatattaataagaaaaatagcataaaatagtattgaagygttggcagcaaaaattttgggggtggcatggagagataatgggcgatgtttctcagggctgcttctagagtgggagagattaagctgaagaaagattttgtggtaaggggtgatactgtggggttgttagaaggagcatttgttgtataggatgattggtgatggcctggatacggttttggatgaattgagaaactaaatggaagacataaggtccaaataagaggaggagaaaaacagataataaaggactaagaattgggaggacccaggacatctaattagagagtgtccaagggggtccaagagggtttagtgtaattacttgcttggttggcaagtttttaggctctatctttgagttttttttattgttgtcatataccaggccagattgatttaggtaaaaacagcactcttcatgtgaaaatatacagagtccccccccccctttttttttagcagtgagtaagtcaaggcctcagcgattttgtaggaaagagaaatgcaaagccagcaattgtttgttaaagaaggattagaaatggctaggagagagtgactgagattgatagtgtggtggagatagctggggagaggtagagggtggcctaagaatgggaacgagaataagagtaagtgtaaaagtaaagaataggacttcatcggggtgaaagtattagagtatactttgtcaccaaagatcttctatccgttcaaacagagacttaagggtggcagtttgaggtaaaaccaggcgccactgaataccaagagcctgagaaactgcttgggtgatttgactaataaaggccggttcgttattagactgtatagaggtggaaaggccaaacagaggaattttgtctcacagaagggaagaaatgaccatggtggccttttcagaccctgtgggaaaggcctctacccatccagtgaaagtgtctacccagaccaaaagggattttagtttcctgacttgaagcatgtgagtaaagtcaatttgccagtcctgggaagaggcaaatccccgagcttagtgtgtaaggaagggagggggcctgaacattccctgaggagcagtagaatagcagatggaacactgagaagtgatttccttaaggatagatttccatgatggaaaggaaatgagaggttctaagaggtgggctagtggcttgtaacctacatggaagaggttatgaaatgacgatagaatagaatgggcccgtgaggctggaaggagatattttccttggtccaagaaccatttgccttgtgtgggaagagattgataggtggaagtttcagtgggagagtaggtgggagtgaccattgagaaggagaaaaactggccgtgaaggacagaagttggaatgctagctgcttctttagctaccttatcagcataagcattgccctgagcaatgggatctgatgccttttgatggcccttgcagtgaatgactccagcttcctttggaagtaaagcagccttgagaagagtttttattaaagaggaattaatgatggaggacccttgcgtagtgaggaaacctctttttgcccatgtaacagcatggtggtgcaggatatggaaggcatatttagagtcagtataaatattgatgtgtggtacttttgcaagagtgagggcccgagttaaggcaatgagtttggcttgctgagagataatggagggggcagagtggtagcctcaatgataggtgtggaagatactatagtatagcctgcctttgctggtgagtggagattaggcctggtggaactgccatcaataaaccaagtgtgatcaggatgaggaacaggaaagaaggaaatatggggaaatggagtgaatgtcaggtagatcagagagatacagtcatgggggtgggggccagcctaaaacaataaggtcaggttgtttggacagaaaggctacaggatgcagtcctggctcttgtgtaagaattttgactgcacagccctgtactttcgctgtgtgtaatgaaaagggttgggatgagttagggagagctagcatgggggcagcttctagggctgtttttaaggaatggaaagaggagtggcaaaaggatttaggatctatggggtcagctaggtttgcttttgtcagtttacataatggtttagtcaggatggtaaaactaggtatccaaaggtggaaatacctaaccatgcctaggaaggaaagcagttgttttgtagaaggagttggggtttgggagattagtcagacatgatcagcagggagagcacatgtgttttcatggagaattatgccaagataggtaacagatgaagaagaaatttggacttgactgaagtaatgggggctgtccgcaaagccttgcagcagtacagcccaggtaatttgctgagcctgatgggtgtcggggtcagtccaagtgaaagtgaaaagaggctgggatgaagggtgcaaaggaatagtaaagaaagcatgtttgagatccagaacagaatactgggttgtggagaggttgtggagggaggtattgaggacaaaagagtgtacgagttgggcactacagggtggataggcaaaacaatttggttgataaggtgcggatcctgaactaacctgtaagacctgtctggtttttggagaggtaaaatgggggaattgtaaggagagtttataggctttaaaaggccatgctgtaacaggcaagtgataacatgctttaatcctttttaaagcgtgctgtgggatgggatattggcattgagtggtgtaagggtgattaggttttaatgggatggtaaggggtgcatgatcrgtcaccaaggagggagtagaggtatcttatacttgtgggttaaggtggggggatatgaaaggaagacatgaaggaggctttgggttgggaagaagggtggcaatgagatgtggctgtagtttaggaatagtcagggaagcagataatttggttaaaatgtctcagcctaataagggaactgggcaggtggggataattaaaaaagggtgcataaaagaatgttgtccaagttggcatcagagttggggagttttaagaggtttagaagcctggccgtcaatacccacaacagttatggaggcaagggaaacaggaccttgaaaagaaggtaatgcagagtgggtagcctctgtattgattaagaagggaatggacttaccctctactgtaagagttacctaaagcatctgtgatggtccaggaggcttctcaggtgatcgggcagtgtcagtcttcagccactaagcccagaagatctkggaagaagtcaatcagagagccttgggccagagttccaggggctctgggagtggctgccaggtgagctggacagtctgattttcagtggggtcccacacagatgggacacagcttaggaggaatcccgggctgtgggcattccttggcccagtggccagatttctggcacttgaagcaagatcctgatggagaaggtcctctaggaatgcttgactgctgcggcttaggcattttgaagttcttgtgtgctggagatgtggctggggtttctctcacagtggaggcaaggaattgcaactcagaaatacattgttacttggctgactctactctattattgtacaccttgaaggcaaggttaattaaatcctattgtggggtttgagggccggaatttaatttttggagttttatttaatgttgggagcagattgggtaataaaacgtatattgagaataagacggccttttgacctttcagggtctagggctgtaaagcatctcagggttgatgccaaacaagccatgaactgggctgggtttttatatttgatgaaaaagagcctaaacgctaactgatttgggagaggttggataaagaaaaaggagcattaaccttgactatgcctttagctccagccacctttttaagaggaaattgctgggcaggtccgggagggctagtcgcagaacgaaactggaagctggactgggtgtgaggaggggaggtgatagaaggattatagggtgggggagcggaggctaagggagaattggaactggctcggcctggctaggagcagcctggggaggaggggagaggtcakatgggtccgtagaaaaggaagattggaaagacttagtgacacttggggttggaactgaggggacaggcaggagggaaagaaggaagatttgggatgagttgcattgggaacagagattagggagggacgagggaccgatgtgtaaaagaatgcctggacgtcaggcacctcagaccatttgcccatttttcgacaaaaattatctaggtgttgtaggatggagaaatcaaaagtgccattttatggctctttggaaccactgtcgagtttgtattggggttaagtggcattgcagaagaaaataaggcatttgggttttaagtcgggtgtgagttgaagaggttttaagttcttgagaacacaggctaagggagaagaaggaggaatggagggtggaagtttgcctatagtgaaggaggcaagtccagagaaaagagagggtagagacacagagagaaggggtggggggttcttgcaccccaggaacatggggaaggggtggggtgtttgtcccccagggaagtggagagaaaagagagggtagagacacagagagaaggagtggggggtgcttgccccccaggaaagtggagaaggggtagggggtccttgccccccaggaaagtggagagaaaagagagggtagagacatggagagaaggggttgggtgagcagccctgggctgcaaatgtgggtgagcagccaaagcaggtgtccccacaattgccttgccactaagggaatgtgggtgaatgaccaaggcaggcatccccacggtgatcagacaccaatgaaatgtgggtgaataatcaggcaggcatctctgcagtgattaaacaccaagggaagactgtcttcccgaatctgtgaccagcactggagttttgagtccacagataaaacacatctcccgtatctctaccaaaaaaggaaaggaattgaaattaagagaagggaaagattgaagtgtggtgccgagattgaaaggagaaagaggttgagggatagtgagagagattggagaagagagtaaagacaggccacttacccgatttaaaattggtgagatgttccttgggctggttggtctgaggagcagaggtcgtaggtggatctttctcttggaacaaagagcaggaggacaggggattgatctcccaagggaggttccccgatccgagtcacggcaccaaatgtcactcgcgtccatgtgaagagaccaccaaacaggctttgtgtgagcaataaagctttttaatcacctgggtgcaggcgagctgagtccaaaaagagagtcagtgaagggagatgggatgggctgtttttataagatttgggtagatagtggaaaattacagtcaaaggcggatgttctctggctggcaggggtggggggcacaaggtgctcagtgggggagcttttgagccaggaagagctgggagaaggaatttcacaaggtaatgtcatcagttaaggcagggacaggccattttcacttcttttgtgattcttcagttacttcaggtcatccggatttatacgtgcaggtcacagggtatatgatggcttagcttgggctcagaggcctgacatatagcgtatacaggtgtacacagaagcataatgtttaaatattttaatttcagtgggtgatataaggggcagtatgattttttttcgcttatacttgctggcatttttccaaagtttctttagtgtgcctatagtattcatatcctgagaaaaatctttcatgattctaatctttttattattattattttttaaagatcactgagaactaagagcaaaatgcaaagggagatctttttgaggtctgatcaagcccagcttcactggaggcttttaggggcctcagaggtgtagatgctggtttagtgcctgactgtggctccttagaaaagaaccagctaaatgcagcctgtcctttgctagagctgccaatgctgagctctgacacagagaaaccctgcctctatgatgaatatagcctcatgctcctgactttcaaatgaaaaacagaaacacacatgcttgttaagaacgtttcagcctggtttgcatcattaactgatgaaaatgtgcctgcaaggacagaatgaaatagatttgcccctcctcctccagcaacccctcctatgagggacgttcgtctctggctccaggctctggccacttcctggttaggattgctaaaggcttccatcagggaatgttgatatgagtctggaagcgccacagattttaaaatgcctgaattaacaagaaacaagtattctctaagatatgttaaatatttaagcagatgcccaaatccagcacctaagaaaatctaccttgaggttttcaaaggcacasaacataatttcaagggataaatgcaagaaaaaatcctttacctcatggtcgcaggctgggcgctgcactggtgtcctgcagtgttctggcaaaggctgatttgctgcttagaaatctgcctgagctgatggcagattcagaggaaaggaagcactgtgctgctgatgaaggatacctttatgtgtacttgcaaatatgaaatggaagtgtatcctggcaagtacaaacaacataactacactggtttcctgctggagggaaaggagatttcagcagggagagctttaatctttctggctgggcactcaactggaacaacgtttagggggaatagtgtgtaaggaagttcaaggtagatgaaaatttactagaaggaggattagcaatgtagtggtcagagaaccagaaatctaaaaatgaccacaggactagggtggattccggagaactgttgtcatcactmgctaatattaatagtgacatcagtagctaatgttaaaagaaaaaccttagacaaattaaatttagtagagtttaattgagcaaagaattattcaccaatcaggcagacttccgagccagagtggcctcagagagactccggtgcagctgcctggtagaagatttatggacagaaaaaggaaaatgacctataaaaaacagaagtgaggtacagaaatggaagtgttggttacagcccagcatttgccttattttaacatggtttgaatggttggccacctttgattggccaaaactgtgagtggcacaggagtaggttacagtctgtttacacatccagttaggttatagtttactatgtacagaaaaactgtcagggtgaacttaaaatatgcaaggaggcagctttaagtgaaacttaattcaacactaatattgattgagaatttttgctcakggctttataggacttacctaatttactccattttacactcatgtgaaatatggccatttaacagatgagtaagagaagattcagagaacttaagtgatatgcccaaggacagaagtccaggtctgcccaattctagaacttcccttgttcagtgtgttccttaagtgcagcaagtctctggatctaaactatatagtttctgatttcaactctgaaatgcactgcttgtgtgaacttgcatccgttcttcatctgtaaagagtggtagcacctatttcataggcttgttgtgaagctcttagaatagtgcctggcacataatggattcgatgaaagtatctgttttctttctttcttttttttttatttttttgagacggagtttcgctcttgttacccaggctggagtgcaatggcacgatctcggctcaccgcaacctctgcctcctgggttcaagcgattctcctgcctcrgcctcctgagtagctgggattataggcatgcaccaccatgcccggctaatttttttgtatttttagcagagacggggtttctccatgttggtcaggctggtctcaaactcccaatctcaggtaatctgcctgcctcagcctcccaaagtgctgagattacacgcatgagccaccatgcccggccaaaagtatctgttttcatttgctgttcagaatgagttttggcctcagctgtatttcctacttctgtcaccaactgtttgtgatattagataaatcataaaacaggtctcagttttatgctcagagaaataaaaatcgttggtctggatgatccttccaggacctttctcagtatgaaatatgatgactaacatttcatgaatccatatcctggaatcaagttcaaggtgcaaaccagtctaggtctgaggttctgggaaagtcacagtagttctgtgccttggtttccatctctgtggaatgagaagagtaaagttgattaactcttgcctcatcaacagcaacagtgtagaccctgcatgtgaatgcacatggaacactaaagggaaaactctaatagtaccataactgtttattctgatggagaaccaagagccagggttgaatatctcagccaggaacactaagtagggatagtatgtatagttctcagtagctggccctatgatgttcatgccagaggactggatttcataccccaatagtgtggcttattgccaaataccatcatcatacatcctgcctaatactttccctaaaactggcatttatgacctaaactggttccaaactgagatgttttcacaaactattgagctgagaaagtcagacaaaaagtgcagtagcgaagtgtttgtttggtttctggaatatcagtgcttgagttcacatctgttcctaccacttaccagtggtttgaccttggataattacttgatctattggagccttagtttccacatctgtaaagtgttgagtattgatagcaaccttgtggagttaaagataaattttgcagtgggcacctgttaaaatgtcaagagagacttttattttttttcaagactattacaatgagagagacagactattgcaatatgggagaaagactaaactcaacactgaatacaacaagtgtggatttgtagtcaacaggcyggatgaaggagtggatrgaaaattactaaaaagaacttgcttagatatcaaggcctgggaaagaagtacttaattgtatatcagggtgggggggcattcttgataaagtggctcagcaggattctttgctaaaactggtctctgaaggagaaggatgagagccatgttgaggcctagtcaagaagagggctctgactaaaaaggaacctgcctaaagtttggtcaaggagggaatccttctcaagagttgcaaatacttaacagacaaatatttgccttctttttaaaatcataaatagccactgtttttaaaaccaaagttatttattatttcctctgtggcatgaccatagttggaaatatattaacgtgctttttcttcttgtacttctttgtttaagacttttcacctataatatctgaggcaagagtttctttagggtaaattgggattataatagctggaatgcaaagaggtaaacagaattaatattcagccatgaattccaaaattggccattgaaaccaacttcagaaatgataccattaaaaaacactggagcagcttagtcagaaatttctactttggartaataacgaggaagaaggcatcagataaaacatcctcacacattctatctttagtgaaaccagatggtgaagaaaacttcagacttccaaccgacacataaatatgggctacggtcaaaagtagcagaaatcagcagaaccaacatgagaaactctgactggagatgaatgggtgaagctgggaccaacttaaaatggggacagtgtttggagatggcagatcacaaaattagaattgagggtcccctcctaggagagaccgtcactctgagtgcaaacttctgaaagcagaaatgtaatccagctgtgtttaacgccaggcgaggcagtgggaggcgaagggagaatgtacccaggagacccctcccctgccttctagtgtctcaaggaacctttcctgtttgcctgagagcacgttcactttttacctgactatggagggagattcttccttttgtttttttctttgctacacattgatacccttaaattttttgcatatgttttctaattataaaaataaaaatctatatattataaattcatcagtataaacaaaataaaagtctgaagttaaacttggatcataatgtgctttaatcactccccatccatgttgttttgtagctgtggttttcaattcaatgataaatcttgggtatctctccatgtcagtacttataatcttgctattttttttcaaggacaacatttaataggcatattttaatgtttaattaatgtatttttgctggacatttaagtcattttcagattatcactattacaaacaatgttgaagtgaatatcactgtatgtccgtctttgtacaattgtgtgggtttttcaatacgatgcattccggaaattagaatttccaggtcaaagaaattgaccagatgcttcacaccatgtcttaaatcctggccccattttttgtccaaaatggtgttgagttgctatttaattcacacttggctaccatttcccacttccttacttaagtacagtgtgtataggccaggtttaggctggaaaatccctccttccactgtcaattctgttacccctctgggagcatgggaaggtcactttttgtttgtgggtttatattttcctattactttctcaggaaatgaatgaatttttctatcaattgttctctatcatcccttgtggtttggctcgaagccctggtctccaatcaagggtcatgacaggaacttggctcctgccaatacatttagaaatctggaatccttccataaatgcaaaccccttacactcccatctttccctatattctgccacctggtagaaagcaaatccctgaatgcttctccaaaactctcttccaaccctaggaccaccaaaggcctccctcacactcttcatttatctgctaattcattctctctctccttttctagaaaatagtcctctttggcttaactggttggaaattacactctcagtaagctaagagggaaggaataagaggatataccatactatgggcagggagggtggtgaaaggccagggttcatttcagctttaaagcactggagctccaaatggacacaaatcatcacatagaaactcatgatcagtgcactttagaatgcttctcatctccctttgggggttattctatttctattaatgtagtcaagaatggtggctatttttctgggccagattattttggtactaactggtctttcacagaagccattttctcaagtatgttctacattagctacaagcaattgttggtaaaaacctgttaccattctgtatgtttccattatatatatgtctctgtgtgtgtgtgcatatgaaagaagactatatattatttttatcaaaatatatttagaccatgtacattcttttaattatactatatataaaagtaattttatattacatattttaaaatataaacatatgtaaataatattactataacacatatgtaagtaatatatattttgtgttcttccataattactttttttaacctagactgaagattttacatttttcacaattcaattatattttatgagacttcttacttttccaaagcataaagaactatttggagcctgtctttgtaattttatatttttggttaatattccaaactaagataacattgccaggtcttccaggtctgaagcaaaatagagcagcattttagttgtgtggccctggggaacttgcttaacctctctttccctctgcttcctatcacagatgtttattgtaaggattaaatcagctaaaccaagaaaagcctcagggatggtgcctggcaaactgcacgctgttaatacatgttagtggacccttctccacaccttcctgctacactaaagcagagagaattacctcctgaatcatgtttgcagaacttctgggcacagtgactcaactcccagctattcttgtcatggattttttctcttggagccaatccagccatggagatcactggtcttgtgacttattttttctctttcagtatgaaatcattagaactgagaaaatgaaaacattcctgttattacttcctgagagaaagaaacttagtaacatgctttggtaggaattgttcttctttttcctgctgtgtccctcttgctggtcccaccagggctcttggtcctgagcctgatttacaccaggagcataatctgatcaaaaagagggaaactaaagaaaaaaggcaggattgtatgaggggttctcacaatggcagtacataatcccttatacctcgtattatgtagacccctgtgtttccaagttacctttgtaatttaggtaagtgagcacgaaacacttaaaaaaacacaaatgaaaacaagagaaaggaaagagtggggaggggtttgtttatttttgaaaacaacgacaacaacatagagtaaaagttaccaggtaagttcaaatatagtagtactttgttttcttggaagatgaatgaaagaagtcaccttactgcctccaatccagtcatatccctgaacccaatcatgaccagcagaggttgttctaaattgtttcctccaatatagagataattgccaataatttttcagtggttgttttctgtattctctgtattttttagggaagctgaactcagaaaacatactttgtccatctagccatccatttatctttatggatccatctttattcattcattaattcactcagtcaatatatattgaatttcaaccatgtgtcagacactgttccatgcctctaatgttctgcgtataatgcaagtaaaactaaagatagctaacatttattgatccctaccgatgtgccagtaaccctcttaggtgttttacttaaaatatgtgtttaacctctgaaacagctttatgatatatattgtgattatctgctttttaaatacgagaaagcagactcaaaaggattacataacttgtataagatcgcacacttgtaagtaaaaatgcagtaatgcagaaatgcagtaacgctatttcctctcgtattgcagccactccactcccagcgaaccttcctactgcatgcaggctttattcttccatcactttcctcctctgtttctaaatgacattttcacccccatttcctggatacttccttcttttaatacacagtaagtttatgtgactgggtttggcattcatctaataaaaacagccattaggtatatattcaataaacatttagtgaagccaactgatgagctctggggtgagtactagggattcagcagtgaatgagacggagggtcgagacagggctctgggggctaggctgccttcgttcgacctcagacctgccactcgctagctcctctagccattatttagtatttctgttgcagtttcctcatctatcaaatgggaataataatggtaattattaattaattgatattctaattttcaattaaaaatctaatggagttgtcaggattaaatgactttatacatgcaaaccacttagaataacactttgcagccactaaatattaaataactggcatatgttattattattagatggatcctaccctcaaatgccttacagtttsgtagacagaaaaataagtctcttccaacgatactgttaaactaatcagaaacttggttaaggtcatttgatcatctaaggctctacaacagtacagttttacagctcttattttaaaatgttcccctctaatccrtaaagatatctcaagatagggcaatgccattacttggtgtattatagttaaccaatactgtatgtggaacataatgtggtgtgatacttttgaatttgtgtctatctgctgttaaagagcctggctgctaattgagtttctggaaaaagttgagaaatgtcttagctcaggctggtataacaaaataacagaggctgtaactacaatcacacttgcaagtagaagatctttgcttcaaacctagcagtctggctctagaaatcaggacttggatgagggtgaagtgagtgagggcctagggcataaaatttaaggagatacttactctgcaggtagttcaagtgctgaccacacatttgcaagacgtgagagtgagtgtcttcttaatgtgcattaagtgccttgcttaccttacctatctagwcccagccctatccagagcctaccttttacaactctaccttttaaagcttarcatcctctacaaaattatactatggagtagaaaggttgtactgtgaactgagctggcattattctcacacaagctatgtacttsagcatcaaagatagtattaaaatagatgcaatcataacataatctccatacactgcagttagaaagttatttatgaagcatctggtatatctggacatacaatcatcaagtcacctgatagccctagagctggaatgaaatttgagaggatcatttggtaaaaggcatatactttaaaaaaactgaggcttaaaaaagtaaaataattttcacaaaacgacagagccagaattggcagaaatgaaagtagatcactagttttctaatcccagtttcactcgatatctctgattgtgtattagtcaggatccagcaacagaggcagagccactggaagggatatacacgtttcttttgggtatttgatcttatgcaattgtgggagctggccaagccggttctgtaaggctcttgatttcatgtctggtactgaagcttcaagtacataaggcaggtggaaaaaatgggaagatggatgaatgtccagtgggcaggacaaggacaggctggaaccacaaccacgagctgcagttccacaaatacggactagaacccaagtcagctctcactgcctctaacccctcctgcaggagaagcaggagcccttcatcatggagctaactacacacctggcccaggattcagagatgctgaaggaggattcaggggaagttggagtagttgcaggtctggtacaccaaggagttaacccaggagatgggccatagtattctgtggttcacaaacacamctgcttgaacgttccaagcataaaaaggctaaatagttgcttcttttccaccctctaaatcacatgcaaaaatgtctactgactcatcctgactgaaaacacgaggaaattctgggaaacacagttcagcctagctgagttgagacattatttattataaagccccgacagtttcaactctacttctttacctagctcagacactgtcatgtgagccttttggcagtgtctcttaagatagaatgccttttcattttaagaaaacattaaagaataaaatgcattcttgacttctgcaatgatggcagaagtcatagcaccagaagcctcttctaataatgcagcagcatcaacaaattaattcattctgcatctttgtgtgttataggaggaagaaaactccaataaagtctgtctcaacagaggtcacctcccacccatcagacacrgaaattccagtacctgctgggagttctggtggccatccttatccctagtctcttgtcattgttcaaggattagggaaaatwcctctcaacctgctagatttcagcagcaataaacgggattgtttatagggtcagtgagcccaggatactaagggacagrcatcagtcaaaagcattttccaaaaaaatcctttatattttaatcaaatcactataaagacatgatgtgtcctagtttctcagatgttcaacccaacagtctctttctttaacttctgggctgcctttcagaactgagcagagttgtatccaacacaaaagactgtctggactcaggcaccgtacacataccccgtcactgctcctctccattgaggtaatctgttttttctctaatcatctccaaatgattgataatgttgatacccacatataagtttttctttatcatttggacattaaaaggtgagtttcctgtgttctttaaaagagacaatagaaagcaatcctttgctctactttagacctttattattacttaattaaattatatctcacaggaaatgttaaatcatttcaaataaccaaaaaatcccccagtgagcttctgcacttttgtccaagggccactggcacacaaactccagtagttcctatagttttatgtgtctcatggatcccaggaatgtgacttatgtctataatgctgttctatagtggcagtggcaaactttttctgttaagagctaaatagtaaatattttcttcggctttgtgggcagtatggtctatgtatcaactactcaactgtgctgtaaaagtagtgtaaaagcagtcatagacaatacaaattccaataaaactttatttacaaaaacaggtggcagactggtttcagcccacragctgtagtgtgttaacctttgctctctggccctatgaattcttcatgttcacagagcatcttgaagaaatgaggcccaataaaatacctggttttatttcaaatctgccttcttgctgtaaatgacctacagctcaggaatatctcaatgaatacccacacatgttatctgtctttacatyggctaaaacctttgactagattatgagtactgtcctgtcagttgtgaytcttctttccctagcaggctcctcacagctccccaattcacaatatttttctcagcacaacactttccagggtgtcaaaatgttcttaaccatcagctctgttttctcagagcctttgttgatgctttacagaagcctaggtaaattgggttccagtgctcctggtctcctgagctcctgctacattgacactgtgtttatgccacttgtgttgatccasatgtgatattaacttcccagtacccccaaaacagtcacacatagtgccacaaatgcttcctctggctcatccagcaacccctacctctgactccatttccatttttccagaggacactcagctcatcctctcatcttcctcctataatgagggacaatatgttctactctgactctagaaaatgtatcaagttaatttcttttacaaaaaamaaagagaaaaatagaaaggaattccttatgcttccctcccctccaccaaaagaggaattctgatgttaactgtttagtcttcatttctawgacagggcacaaggttgtagctagtgtttataacttctttcttttacctatcttcagagtgaccagacaacctacagaatgggagaaactttttgcaatctatgcagctgacaaaggtctaatatccagcatctgtaaggaacacatttataagaaaaaaacaactccattaaaaagtgggcaaaggacatgaacaaacacttctcaaaagaagacatacatgcagacaacaatcaagtgaaaaaagctcaacattactgttcattagagaaatgcaaattaaaaccacaatgaaatatcatctcacgccagtcayaatggctgttaataaaacgtccaaaaataatagatgctggcgaggttgtagagagaaaggaacacttttacactgttggtgggagtgtaaattagttcagccattgtggaagacagtgtggtgattccccaaagacctaaaggcagaaataccattcaacccaacaatcccattaccgggtatgtacccagaggagtataaatcattctattataaagacacatgcacgtatatgttcattgcagcactattcacaatagaaaagacatggaatcaacctaaatgcccctatgatagattagataaagaaaatgttgtacacatacactatggaatactacgcagcaataaaaaggaatgtgatcatgtcttttgcagggacaaggatggagctggaggccattatccttagcaaactaacacaggaacagaaaaccaaataccgcatgttctcacttataagagggagctaaatgatgagaacacatggacacatagaggggaacaatgcacattggagcttactggagggcagggggtgggaggagggagaggatcaggaaaaataactaatgggtactacgcttaatacctggatggtgaaagaatctgtacaatcaacccccataacacacatttacctatgtaacaaacctgaacattgtgcatatgtgcccctgagcttaaaacaaaagttttttttaaattttttttttttaagacagagtctcactctgtgtgcccaggctggagtgcagtggtgcaatcttggctcactgcagcctcagcctaccaggcacaagtgatcctcccactgcagcctcctgagtagctgagactacaggtgcgtgacaatgtatctggttagtttttgtgggtttttttttttgtagagttggggttttgatatgttgtccaggctggtctcaaacccctgaggctcaaatgatctgccggctttggcctcccaaactgttgggattacaagcgtaagccactgagcccagcctatgacttccttcttttaccacctgttccatattacacttgcccttggcaaacactggttcttgtcatgactccttatctggtgagctgtcccataccttcattcttaaagggtcactgccattagcagtcctcactgcattgaattgttttcattttaatattgatttcaggatatggaaatacaaagaggcaccccagaagacctcctgcaagccaccatactcctccttaccctcactgtgtggtagcaaccccattttcccttcatagccaggataaatcacccatcagaacaataatcaccttttttaagcctgctggttaattagcataaggagtacaaagtggctggggacagttttactttccaggttaatgaagctacaaatcaatgtaaatccatcactctggtcatctctccttctaggaacaatgaacatccaggtgaaccgttcaaagctctttccactgggggaatgtcccataaccactgtccttcagaatcatccctaaatgtgacaggagtactgcattggccatttttgggtgatgccagtgtattgtgcagaaccatctataaagtagaccaaatagtctcttcctcagtcaactggtcacatggaactccccatgagaagacagatgagagagaaggggcaatgtagtatgagtaggggtcacaggaatcttgctcatgtgacttgtgccttcaggacctacataagtctaatttcatttaccacttccatgtgatggaatactgctgtgcacactcaactttaaggtttgatgggtcagataacatccaattcatagctcaggtcttgggccatcgttaaacattcagtctctactagagccccaaagtaagccagccactgttcatcaaaagaatagttatctgcaggggatgacatagctgtgctccaagatcctaagggtatcttctgtgatttacctgctaaaggtgccatagagcctccctatctgtcacagacacttcgagcaccatcagatctgttgggtcgtataacatgagtagcagagcagcttgcctttagcttagagctgttgcattctcttgttctgggccctactcaaagctggcagcctttatggttattcaggaagtgggctagaggagcaggcccaaatgaggtatatgttgacctccaaagaggtccactaggatcagtgcctctttttcagtggtagaagaaaacagatacagaaatgtatccttcatattggaaaggatatatcaacatgctccagaaaatggacttctggaaattgcaataaggtggcagtcctctgaatttataaggggtttatttcccacccacttgtgtcttgccaaggtgtctagaatgcttgctatttcctgcttacttggtctaaatcagcaaatactgtcagtatcacattggaccacatgatgtattgtgaaayggagaagtgataagttttggcaggtaaaaatctttgcagttctggagaattacatatccctaaaatrggacaatgaaggtggatttctggccctgactggtggaagcaaactgcttcagctgatctttaccaacacaaatagacaatataacatttgtcaaatatattgtggcacaccacatgctagggaatgtgtcaactttctccaaggaaaagacatttagaatagtagctaatttggagtgaccacctggttaagttttaataatccacagctattcaccaaggtccatctgcactttgcacagacataattgagcaatccttcaaagaggaagaaattggagtaaaggtcacacaacttatgtctgaccagaatacaaagctgtgtgtctccaaagtctaggcccacatacccacaactgaagaccttagtggctctgtaaactcatcaggttgctacctacaaatctgtacctgcagattcattactaaaaattagtctcacattttagtaaagaataaagtttaaaaaaacctcatcctcccccaaatttttaatacagcaaagtatggagagtcagttataggacattaacctttggtaaggaaattaatatttttgaagctacaattgcattgctgtattgccaacgcatcgctttaaatttccccaaaagaggaacatataagcttcagaaactccagtctctcatgtacaaactttcatgtcatcttaaagtattatatggttgacttcagagaaaattaatgattatgtcatcaaagttttatttgtcgaatatgttgaagcctttgcacaatgttgaagagaagaataaaatattaattagagcaaaaaaaaaatccttaaagatatacctacattagacctaaaagttttgtttctaggacatgatcctagtgaaattaccatggatatagagcgtatcctggcttaaaaaatagaaataaactaaacttcttaaagtattattattatttttttgactctgtcaccaggctggagtgcagtggtgagatcttggctcactgcaacctctgcctcccgggttcaagtgattctcctgcctcagcctcccgagtagctgggactacaggcatgcgccaccacgcccagctaatttttttttgtattttttagtagagacggggtttcactgtgttggccatgatggtctcgatcttttgacctcaggtggtccacctgcctcagcctcccaaagtgctgggattagaggtgtgagccaccgtgcctggccctaagtatttttaaataaagtaaatcatttaaagtatttttatactttttttttttttgagacagagtctgtctctgtcgcccagactggagtgcagtggtgctatcttggctcactgcaagctccgcctcccaggttcacaccattctcctgcctcagcctcccgagtagctgggactacaggcgcccgtcaccgcgcccagctaactttttgtatttttagtagagacagggtttcactgtgttagtcaggatggtctcaatctcctggcctygtgatccacccgcctcagcatcccaaagtgctgggaagcatttttaaataaagtacatcattcaaatgatttaaagtaaatcattgtaactccagatgacaaaataatacatgcaaccattaaaaatgatttcaaaaaatactgaatgacatatttagatttctactattgagtgggaataaaagtagataactaaataatatatatagcttgagcctatttttgtgaaattatgtatcagaggaaaacaagtttgaaagtacataccaaaatggtaactatattgaacctacatagtaactagaatccattaataatcagcaaataaattggatttataaaaaaaattactgtcaggaaaaatatttaaaaaacacaatcaactaacatctattgagtgcaaggcactattctaagcacttaacacatattatcttatccaaaatttgagatgtccctagacaatattaattctattttacagaagagaactctaactcaagaagaasttaaaaatcttacactagtttgcacagccagcaaattgtagattttgccttgaatgtgggcagcctgacccctgagtctgcactcctaactacaatcctggacctcctattttcctcttccaaaggagagtggataaagatcatatgaaggatatctcccatgtagtattgagtattggggcacacattacatgaacaggagggttgaagataattttaaaatagataatttgtgggagtaaacttgatgttcataaacaaagatattttaagtttcatactcatagccacccacagcttattccccattccttaactcccctgagttccactttccattattctccaccctgccctataaagtgggaggtttacagcagagactatacttgccggttccagtgtcctccggctactggttgggttttgttgacaggcggcacctgcaggagattgaaaggatggagaaagtgatggtagagtaattatttctttcttttttttttttttaagtttctttttttttttttattatactttaagttttagggtacatgtgcacattgtgcaggttagttacatatgtatacatgtgccatgctggtgcgctgcacccactaactcgtcatctagcattaggtatatctcccaatgctacccctcccccctccccccaccccaccacagtccccagagtgtgatattccccttcctgtgaccatgtgatctcattgttcaattcccacctatgagtgagaatatgcggtgtttggttttttgttcttgcgatagtttactgagaatgatggtttccaatttctttggttctctccctgctgggactgcctggagcaggctgtgtcagtctactaaggaataattttcctttcagggaagcttctgtgagactttctccttccattttccagtaacaatctcatctctctgagcctaagggtggttaacagctgaactgctactacctggggctactgcactatcttatgcttcccctgcccaacaactgttaaatagtctgtttgcaaatcagctgtctttgaatcattccattttgaatgcccttgttaggatcctgacatacaagttgtgattcctgtgttcataaagctgacactgagtattttggaaacacatcacgtgaacaggagggttgaagataatataaaaatagagaatgtgtgggagtaaacttgatggttataaacaaagatattttatttgacattcatagccacccacaccttattccccagtccttatttctctgtcctggatagactagatacacttcaggaatatttgtaaagcatgttgcatggtaatcttgatgcactctgcagttttacagatgctgctatctcagaataattacacaaaagcaattctctctgcagttctcagggcaatatacagagcttctggcaaacacagacattaagtcacagaacactttgtagaccattcttgctctggaacagatttatgaggttacttggtagaccctctttaattagaaactgggaaatggaaaatagtcagacatgagtaaaacatttttttataaagcccccttattttccactcaagataacacaaagtacagattgagtatcccttatccaaaatgcttgggactagaagtgtttcagattttggaatatttgcatatacataatatttcaggcacgggatccaagtctaaacatgaaattcatatgtgtttcatatacaccttatacacatagcccgaaggtaattttatataatattttagatcattttgtgcataaaataatgtttgtgtacactgaaccatcatcagaaagtaaaggtgtcactatctcagccacacatgtggatagtctgtggttgtttggcatcaccatcattcttgaytgaatttatatgctaccaatacacagtcattttcttacattaattcacacataagaattttacataaaaaaagacatatcattaatacagtaagaaagaatgtgtttagtgtaactaaacagcaccgtagcatcactggaatatctgcgtcagctgttaaatgacagcaacaacaaacaacagcaggctttcagtctccacctacgatgctrtgttttgattaaaaagttactgtacaaggtattttttatgtgagaatctgaggatagaaaacatatatcatatgtagaaaacatacatcacagctgaagggggctgggaggttctttcttagggacgctgaataaactgtgtgttgtacacatgcattttgattgcaacttgtcacatgaggtcagaatggaatttttcatgttggcccaaaaatgctttgaatcccggagcattttggattttggatttttggataatggatgctccacctgtaataataacatagcatcttctttggtttttagttctctcatgttgaggtctctctcattaactagtgagctattttacaagtctgaacacagcaaagattggagaacttgcaatttaggaggagccaatggaaaatgtttgtctatagtcaagcaccatggacaacatcttttatgagtttccaatctttcccagtgttagaaactagactgcatattatcaatactcactagatattaattgaccctatgaacaacattttaaaaatgtaaaaggaaagtaaaataattccaattcaagtcccaaagaacaaaagcatcttttctgtatcacttggtttatgtagctgaaagctacttatacactgttcaaaaatgattttccacaaaaggatatgtttactgattctgatggcagcagcggcccatctggagtggcctctgcgaagacgccagctgcaccaggggaggtgtgaccaggactgtgtactccatggagatggtgggagccctgtccccttccgagttggcaggtcaggagccccaccctcccaggcacagctacagctgcccagctgtagctgcagacctaggcatccctgcagtttgggggcccaggaccccatggcccccactccccaaccccctgcaccccactcctttcccctcacccctgcaagctcagaagtgcctgctcctactgcctggcctctccctgctcctggcacccactccagaacaaagttgtggccaagcctaggtgctgctgtgacctggttaggtgtggatgtgctcagggtggcaccaacatgccagccccctgctgcctgggcctcctccagactttgggggccaatgagcatgggagggaggctgaagaggatggtgctgagggttgcttagcatgggcctgtgggttcccctcagcacaaacagcccaggggccgtggatgacacgcagatggcagcaggaagcagataggcccctgggcagaaaggggcagtcccagtgaagcaccaccttgaagccagggagggcctgaagcctgggggccaacctrtcagttccaggtggtgtccacagcccagagtgagaacttatggtgctttttctgggcccacccatggccgcccatggaccaatcagcatacacttcctcccttatgagcccataaaaacccaggactcagccagactgggacagatgtcaggatgacctgcctacggataggagctacccactctgggtgtcctctctgctgagggctgcacacttgtcaggacaacctgcctgtgaatagaagctacccactccaggtttcctccctgctgagggctgcacacttgggattacctgcttgtggataggagctacccactccaggtctgctctccactgagctgcacactcattgggacaatctgcttgaagataggagctacccactgggggtctcctctccwctgagggctgatcacttgttgggacaacctgcctgtggaaaggagctacccactttgggtctcctgagagctgtactgttgctcaataaaggacttcttcaccttgctcaccctccagtcgtctacatatttcattcttcctggatgtgggacaagaactcaggaccccctgaatggtgggactgaaagagctgtaacacaaatagggctgaaacatgcccctaccaccccccctgcttgccatgtygccagcaatgagaaggagagaagggcagcagagaagagcagaggcccttccaggagcccaaacctagaggctccccaagccagggctgtgccaccctctttggggcactgtggtttctggcttctccaagtttctggatgccagcacactccccttatccagacttgggtgtccataggagaagctgcttgtggtgcatctgatccagcagtaggcttgcacagaactggcatctgtactggtgcctgcagctgcccaccccaccagagcagctggcttgctgactctccacagtggctggaccccacactcacttgcttatgcacctctcaccactctacacctggctkgaccttggaggcgtgggatctggttggttagcatgagccaagcacagcctgccaggccaagtgggcaaaacaagcccagcaggcctgagtaaagctcaggcaaaggtgccaacagccacacaggcttctggctggaaaagtgacaccctaaggatcttatgacagttccatatgctatcagtacttctttgaactaaatctatgcttctcaagcaacttttgattaatcataactttctgtgtaggttttgtattgcttttgcatgatatgtttggtagggttagaggacaggagagtttttaccatggcaaatagaaaggatcacagagatgaagttgttttcctgaacataaaaccaaccaaagatgcaagcatattaaaagtgacatttgtagtttttggtagcaatccaccaaaaggtctctggtaatttcccacaaaatggagcacttagtaagtaaagtccaataccactaacacaaccttctcttgtttttataatctttctaaagtcagaataaggtcaccatccctgcagcaaaaccaaacctgttgtcatccagcagaaattcaggatctattcatggcccaataggcttgcagttcatttaagaaagttcactgagggagtcttggaggcggtgaagggcaattaggaggaagagaagtgaaagtcaaagccaaaytggccctgataccctatatctattttgtatgtgaagagaagttctaggaagaaagaggtaaggaattcatgaagacttgatggaatctctagttgcctctcccttttattctgcctcagctgccaacagcaacatgttagtatgttttaaagtaactccaacaactgcacatgtaattgggcttggcagtttttactgttcccttcacaaaaagtgattgtcaactgagaggaatcctagacaagagtccactgagatttctgaggaaatgtgaggaaagagtttggaattgttttgatgaaatttactwcaaatatgaaaaatacgtttaatatatagaattagaatcttgtaaagagtgcttctcaaacattcctcatgtgagtcaccctgcgatctgataaatttgcactctgatttagtagtttggaggtgaggccggaattttggcatttcttacatactcccagatgatctcaaggtgctgggccagggaccattctttgcatagcaaggttgtaaaaaggctgggatactctgatgatatctgcagaatgaagatataaaaatgtcaaggtttgcttagcaaagctgtgattcagacaggaagaaagatactgagtttccatgaccctttgctcattgtgctgtcatttaggagccttaggctgtaggtacagagagacaaagaaaagagagactccaacaagtgctgaatggagaatgcagaggcaaagagaacagcttgtgagcagactccagggatgacttgaagccactgagggaagccttactagatactcaatgctgtttaattcatgcctcattgcctgcatagtagcttgccactgtcagatggtatatgctgatttttttttttggaacgttcagtccatttgtgtgtgctaaatgagagagctagcaatcgtatgctttcccatagggaataccaggagtttacaagtcctcagcactagtcaggtaacaataaaaatcttgttttctattatctcatctttccctgattctagcttgaagaagccagcagtaagcattgggtaggtgagtaaggaaagacctgggaaaagggaaaaaaacagatcacataccccttcccatggctggacttcatcttaagcaggcctgaagtaaaagagggagagaaacttttaattgaaaagcgagattggaattggattggttacggcaaaaaaatcaacygggctgttcagggatagggaggggagctcaggaatagcacattgcagggcagcaatagagagacagaatttcttaatgaatctgagcaagttcagcccattcaatataaactagtgttagatgcacaggtctgaacaaggaagaataagaataaaccacagaaggtacagaatgagactagagttctattctcctctgcactgagagggggctggacttgacctatgccaatgagttttcccacatttctaagacatttatttcatcttgtaatcaagagccagcattctctctgtttttcaagagaagccaggattatatatttttatgtgagctcttctgattttttwaattttaattttaattaattaatttatttttttgagacagagtctcgctctgtcaccccggctggagtgcaatggcacgatctgggctcactgcaacctcctcctcccgggttcaagcgattctcctgcctcagcctcccaagtagctgggattacaggcgtccgccatcaaacccagctaatttttgcatttttagtagacatggagttttgccatgttggccagtctggtcttgagctcttctgatttttaactgttgactactaattcaaatttctagaacacccagagggtccagctattttggcaaaggatgcatatctgagggcctctggctatgacttctggactaggcatcacatccaattactcacatttatgtaggagggcactgaaagcttggacttagtcatttctgtgtcctcagctccaggctagttctttagtaggtgtccatacatgtcgttaataggaatcaaaggcaactatgggctggaaattaaagacccttagacaataatttctagaaattcttctggtgctggaatgtgtcactactagctacctttcaccttttgtgatgaaactgactgagaagcccagcataggaaaaggaagaggaacccttgctcaccatcgcgggtcaaagcctggagcgtcctggatatctgaactccatcttcaagtgcatgctagtaaaccttttatcagcgcttccaaccgatacaaaacagaatgggacatgtttaaattgcctccctttgggaggcagagcagtctgccctgtatgtgctctgtaaagcctccttccctttactgagcacacggagatggagggccttgaactgttaagcactgtaatgtgtgtggaggtggggaaaacacagccaaaggcctgtgagactctgaggccccatgtaccagaatgtgtcggcacctccaagtaggaggcccaagcgtgcataggcccagacacggtcttcctggggaactgctgccccctgctggcaatgaagggtgagacaacattctgttctaatcagcttagccaatcttctccacagctacccaacctctcatccataagccaggtgagttgggccttcctgttttgagcctcaggttccccagcttctcgcttcctccactatgcactgagggcaggagccaggtatccttgttcagctcggaatctgcaacccttaggagagtggcctatcacacaaagaactgctgaatgaaaatgggttaaattctcgttagtgaagaagagctggatctttggcattaggctacttgagtttaaatatcatcttcatggcttgagtctctatatcatcatctgaagaaacggaaaacacctctgttgggtggttactgattcaacacgataatgaatgttaagtattaggattatatctgtcatatagcaagggttcaataaatagtaactattagtatttttttaaataggcttatcgaagtatgacagatgaagattaaactgcacatatttaaattgtacattttgatgagttttcacatrtgtatatacctgtgaaaccatcactacagtgaagataacaaatatatttattccctccaagtttccccatgcctctctgtcatccagcctcctctcctccccaaagaaaaatgtcccctctccaggaaaccactaattttctgtgactgtagactaatttacaatttctatatttttatgaaaatgaaatgagacatgtactgtttttgtttgtcctctttctctcagaataattattttaagagtcattcatgttgctgtgtgcatcagaagatcattattcttttattgcagagtaatattccattgtatagatacaccacaatttgtttatccatttacctgttgatgggcatttgtgttgtttccagtttatggctattacaaataaaactgctatgatcatttgtggacaaacactttcatttctcttgagtaaatacttaagagtagaatagctgggccatatggtagatatacttataatcttttatctaaagtgattgtaccaktttacattcccatcagcgatgaaagagtttcccagctgcttcacatccttgccaacactttttaattttagccatcctggtgggtagaatagtgttatctcattgtggttttcatttgcattttcctaatgattaatggtgttgaacatcttttcacatgtttattcatcatccatatatcttctttagtgaaatgtctgtccaaatattttgctcatttttgatcgggtttttagtttttaaggagcagaccaaatcattttataaagttaaaaaaacttactgagatacaatctgcataccattcaattcaccatttaaagggaacaatggcattcagtatatttgcagagctgtgcaactatcattgcaattaattttagaacattttcatcatcctaacttcctcttcttccccatcctttagccatcaacccaccatcatccctaggcaactactaatctacttgctgtctgcagagatttgcctattctggacatttcatgcaagtggaagggtcttttttgagtggctttttaaatttggcataatgttttcaagattcatccatgttgtagttagtatcagtgcttcatttttaaattatagaagaatattccattgtatgaacatatcaaattttatttattcatgtcttcatcagttgatgaacatatggttgtttccactttttggctatattgagtgatgctcytatgaacattcatgtacaagtttttatgtaaacatcagttcttatttctactgggtatatacttgaaagtgcagttgatgggtcatatgataactctatgtttacctttttgaggaacttccagacagactgttttccaaagtggccacaccatttcacatttccagcagcagtgtgcaagggttcacatttctccacatcctcatcaacacttgttattacctgtattttttattatagctatcctagtgggtatgaagtggtatctcatcatggttataaaacgtcttttttttagaaaaaaaagttaytttactttgaaggggtccaatttgttgatattttttcttttataggttgtgctttttgtgttgtatttaaacaatctttgacaaaactcaaatttcttaagattttctccaatttttttccaggaactcctatatttttaactttcaaatgtatgtgtatggtccattttgagttaatttttctatgacttaagggtctaggttcattgtttygcatatagctattcaagtgttctagcaccattgttaaaaagattattctttccccattgaattgtcatggaaccttggtaaaaatcaattgggggtctacttcccagtattcagtattcttattcttattcagtattcttatttttaaaaggcagccttaacttagggctgatcttgctccaatactgagacaatagtcttatgaatcttttattgagtgccttctgtgttacaatgttttcccactctggctggttgtaacttaaaccattccaagttttgtgtgagccttggggatcttaccgtttgcaggtggttctttccactaaactatggtctagcatagtttcttcacatgcaaactgttagttaaagacttgaaggaacccatctgcagctcgccacagcctctctctctcttcagctctctctgctccagcattctgccctgcaactctgctgccttaagagaattcctactgccagatgagaatgcttttttaattctcatttttctcctctatttagataaactgctggattttgcttggatttggcctccctaaactacagcctggaaaatctgtccaggcaattatctgaggcattgcagggatcatttcatttgttttycttttctcaaggattgctctttcttttgcactatttgttgtccaatgtctgaaattatcgtttcatactttttccaacttagctgtttaaagtaggagagtaaaccaggtcattgttactctatctttgctggaagcagaactgctattagtattgtttctgtctttatttcaccagtctggcttatgatataaagtgaccatcccaaacacacatgttcatatatgcacacacacacacacaccactactacctcctgttttctataaaactttctttttatagttgtgaaagttgtcaaaatcaaaatgaagtcctttatattaaagtcctggcaaatggacccatggaaggccataaagggagtattctcacacatatgcctgaaattcagaactatcacaaaagactgccaaaaatgcagtcttgcacagaaaatacttctgcaaggatgtctattcagcaactgtcagtccttggaccaatgccacccttgttattgatcctcgtagccaaggacaattgattcaaaacaacttatttattctttctcattttgcctttaaaaacttccccttgtcttaacttctttaaatatgcacatagtataatatggcacacttattcacattgcaaacctgaataaatatcattttcttatgtagagtctccttttctctctttattaagtttaacttggaaaaggtataggtcatccaccagtcactgtggctcacaatggcccaaagcaggaagtaggagaaatcttcccctacctgagtgaaggaacctcgtggttatattttcattcattcactcacggatgacaacctggatttagtttgcctgggttgcattttgggctacatcactttttacttttgtgaaattgtgctaagccctctacatacagtgtctcasttaatcctcaagactaccttcatacacccattttacaagtgaagacgctgaggcttagaaagggtaactatattgcccaatgtctgacacacagaaatgctgctcaatctgttgctcgtttctcagtactcacttcacttaagctgtcattggcacttgcctgggctgatcatttcctctttcatgaaatttctttcttcagttcatgtcaagtacaacacactcatttctcctccaacctcattgtcttctcagcttttatatcttctgaatctctacgtgtgttctttgctacttatgcttactttataggggatctcctccagcctcatgtctttaaatactgtttctaatctgattagtcacaaatcatatctctagcctggagcttgaatacatctatatatcctagtccctactcaacatctccatgtggatgtttttccaatcttctcctttttgttccaaatcctttccctgtcctacctctgctctgctctgtcttgtggagggtggagtggtctgacctctgcaggctcttgtgtcagccacctttagcctgcctaggatcctcagaagggacttgtggaagactgaaggaagaaggaagaaagaaggggaggtccagctatttctagctcctctctttcttggccatgagtagtgtctctgacagagactgttgctcaacttctggtctatggtrtgacacttccttcatccaataatgccccagctctttccactgttgctaataatttctgtggtgccacccaaaccctgtttgtcttctcagcaatgtcattacctgtgtaaccatgtcctctgtttgcaatgcctagagtggcttctatttcctgacatggcctgagttgacacaggtctctaaaaggcatctcaaaaccaacacatctagaacaaactcctaatttccctctcaagttgttcttcctggtagtttgtccattcaaattcatggcaactccattagtgccatccttgatgctactgtccctctcatacctgtattcaatccaccagcaagtcctattggttcaactttataaacatacctagagctgcctatttttctccactttcactgctatcaccatcctggtccaagtcattattaactctcacttggactattgtggtagccttctgatatggtttggctgtgtccccacccaaatcattatcttgaattgtagttcccataatgcccacatgttgtgggagggacccagtgggagataattaaatcatggggggcagttttccccatacctttcttgtggtagtgactaggtctcatgagatctgatgggtttataaggggaaacccctttcacttggttctcatatcctctcatgtctgctgccatgtaagacgtgccttttgccttctgccatgattgtgaggcctccctagccacgtggaactgtgagtcaattaaacctctttcctttacaaattacctagttttgggtatgtctttattagcagcataagaactgacacagtaaattggtaccagtagaatggggtgctattgtaaagatacccaaaaatgtggaagtggctttggaactgggtaacaggcagaggttggaacagtttggagggctcagaagaagtcaggaagacgtgggaaagtttggaacttcttagagaactgttgaatggctttgaccaaaatgctgataatgatatggacaatgaaatccaggctgaggtggtctcagatggagatgagaaacttgttgtgaactgtagtaaaggtgactcttgctatgttttagcaaagatactgggggcattttgtccctgccctagagatttgtgaaactttgaacttgagggagatgctttagggtatctgggggaagaaatttctaagcagtaaaacattgaaatggtgacttgggtgctgttaaaagaattcagttttaaaagggaaacaaaacataaaagttcagaaaatttgcagtctgacaatacgatagaaaagaaaaacccattttctgagcagaaattcaagctggctgcagaaatttgcataagtaatgaggagccaaatgttaattaccaagacaatggggaaaatgtctgacagggcatgtcagagacctttgaggcagcccctcccatcacaggcccagaggcctaggaggaaaaaatacttttgtgggctggctcaggtcctccctgctgtgtgcagcctagggacttgtgtcccagcctgtgtcccagtcactctagccatggcaaaaaggggttaaagtacagctcaggccatggcttcacagggtacagtccctaagccttggcagtttccatgtggtgttgagcctgtgggtgcacagaagtcaagaaytgaggtttgggaacctccacctgtatttcagaggatgtgtggaaaagcctgaatgtccaggcagaagtttgctgcaggggtggggccctcaaggagagcctgggctaggtcagtgcagaagggaaatgtgggattggaggcctcacacagagtccccaatggggcactgcctagtgcagctgtgagaagagagccrctgtcctccagaccccagaatggtagatccaccgatagcttgcactgtgcacctgggaaagctacagacactcaacaccagcctgtgaaaggagccaggaggaagggtccccctgcaaagccacaggggcagagctgcccaagaccatgggaacccacctcctgcatcagtgtgacctggatgtgagacatggagtcaaaggagatcattttggagctttaagaaatgactgccttgatggatctggacttgcatgcggcttttagctccttcattttggccagtttctcccatttgaaacaggtgtatttatccaatgcctgtacccccattgtatctaagaagcaactaacttgcttttgattttaccagctaataggtggaagggacttgccttgtctcaggtgagactttggactatggacttttgagttaatgctgaaatgagttaagactttgggggactactgggaaggcatgattggttttgaaatgtgaggacatgagatttgggagtggccaagggcagaatgatatggtttggctgtgtccccacccaaatctcatcttgaattatagctcctgtaattcccacatgttgtgggagggacccggtgggagataactgaatcatgggggcagtctagcccatactgttcttgtggtggtaaataagtctcacaaggtctgatggttttataagaggaaaatccttttacttggttctttctctcacatgtgccgccatgtaagacaagccttttgccttctgccatgattgtgaggcctccccagtcctgtgaaactgtgagtcagttaaacctttttccttcataaattacccagtcttgggtatgtctttattagcagcatgagaacagactaatacaccttctaattagtctccctgcttctgtagttcagaatgatctttctaaactagattatgctgcccttctattgaaaatattacactggcttctcatcttactcagaagacacggtaagatcttgacaagtggctcccaaggcaccagacttctaggacttcatgttctattactttctactatgtacattctgttttagcctcaaagacctcaccactctggctaggacccaccaggaatattcctaccacagggcctttgtacctgctattttcacccagaatgtgctttctccagtatctaaggctgttaactacctccttgcctgtgctcaggtgtcacttcataagagtcctttcctgattaccatatacatatcatcctccttatccctgtttttttttttttttttgggatggagtctcactctgttgtccatgctggagtgcagtggcatgatctccgctcactgcaacctccacctacctggttcaagccattttcctgcctcagcctcccaaggagctgggattagaggcacacaccaccacacccgctaattttgtatttttagtagagatggggtttcaccaagttggccaggctggtcctgaactcctgtcctcaggtgatccgccgtcctcagcttcccaaactgctgggattacaggcgtgagccactgtgcccagccccttgttgtttgttgttgttgttgtttgtttgtttttgttgttatttatagcacttatcaccacctcatgtattatatagttattcatgatgtgtctcttcccatcagaatatatacaagagaacaggaaccttgtttggttggtttctatacctccactgtcttactaatgcctggcatttagtaggtgctcaataaaatctttgttttagaaaatgattaataaataatatgtacatattgaatattgtttcctcttttaacaaatctttaataataataaaaaatttaaagcagcaagattgctttgcatcaggcacaatgataagcgctttaaatggagcccatgattcactttcatttatagagcccacatgctctctgtcaggcgcagaaggtgccagccctgcaggagcttcgggggcggagcagaaggccgcctaaaacagcctttgctaagagagcatgcgtaggcgacgcgctggtagagctgtggacctgccagcctgcgaggcggaggacgggctccatctcttagaaacgcctacggcgcatgctctatggggtcaactggggggctggcaagcggcmgcgctggtctrgggcggagtctccgaggcacttcccggtggctggctgctctgattggctgaacaaatagtccgagggtggtgggcatccgccctcccgacaaggcagaccaggccccctgcaggtcccctatccgcaccccggcccctgagagctggcactgcgactcgagacagcggcccggcaggacagctccaggtgagagtgccggcgccgcggcgctgccaggtgcgrgtgcggcgtggaagctggtgccttcagcaaggggagggtcgcgccccgaggctctgccggccggcaagaccctctgcgtttggacccagcgagtcttgcctggggtgcctgcgggtgctttttctgcgggcgttggctcaaggcatctgccaatcaaccagggcaacttcagagagcaacttcagagagaagcccactctcttccctgggcgctgtccactttcctggacaggcgcggtctccggtcagtgaagctgcccagtgctcctggaccgcgaggacagcagggatgtctgattcctctctctgcatcctcgtgctctccccttagctcctccaggcatcccatcctacctctcttgttagccaacggcgtggtcgaaagcagacttgggcatcaatcctggttaaagtcccagcgatactgctttttaaacagctgacactttgcttccagtacttcagctgggtgaacctcagattcctgaaaaatggaattaatggtactgccatagggtcggtggaggagtaattgacagtagatcagaagcgctgcctgcggtggctggcgcctcgcaagagcttaaatgggagtcgtaataattgttgttattagaaagttaaatagcatgctgcgttggggccttttcttctgccactgaactgttggactgctcttatcttttttcagaatctgtactatgcatctaatatatacgtggcactttgcttggtcctgggggtacaaagctgagtcagattgttacaaagtctaaataactgagataaaggtgttaatacagcccagaaaagcacacttaattcagcctggaaggttttttttcccccctccttcgagattttcagagtatctccttcttagtaagaattgcttggcttagtatgttgagaaaaacatactaagtatgtagtgttgtgttggaaggaaaacttaactgggtgagattttcagctgagkagctttagctgttactctcatggaccttcctctgggcgrttgatacaggttctgtaggaaaaccgctgaatgaaagcagctcctgcagatgctattctgttttcaattgtggtaattcctttaattttttccctttcaatttactccttattctctagtaataatrgacttttgggaggttgcatttatgataaaaaatagcctggggctgtacaatccttcctatcatgaagaagtacaaagttgtaagtagaagcagtggccttgctttgccaatgcacactgaaggggataacgtttgctcctgttcagagttcacggycgggcgcggtggctcacgcctgtaatcctagcacttttggaggccgaggccggcggatcacgaggtcaggagatcgagaccatcctggctaacacggtgaaaccctgtttctactaaaaatacaaaaacaaaattagccaggcgtggtggtgggcgcctgtagtcccagctacttgggaggctgaggcgggagaatggcctgaacccaggaggtggagcttgcagtgagccaagatctcgccactgtactccagcctgggggacagagcaagactgtctcaaaaaaaaaaaagaaagaaaagaaaagaaaaagaaaaagaaaaaagaaaaaagaaaagaatttcagagttcactacttcttggaaaaaaataatcccaggaggaattccatcaacagaagggagtcagttcacttttgcaatctcctgagaatcaatttcttaagacttgtggaatattcagtttaaacacaaaactaaaaacaaacagctgtatwggagtattattgacatacaatagcatggcatatttcaattgtacaattgtataagtttttgcatgtgtacacacctgtgaaaccatcagtacattcaatattatgaacctgtacatcacctccaaaatattatttgtgcatacccctttgtgatcctttcttactgccccttctctccaggaaaccactgatctgctttctgtgaatatagattagactgcattttgtggagttttatatgaatgggatcagacagtacttttttttttccttattttgatctggcttcttttggcataattattttgagattaatctatatttttttgtgttccttcccttttatagctgagtagtaggtatataccataatttatccaatcatccatttaaagcatttgggtttttccagtttttgtctattacacccaaagctgttataaacatttatgtacaagtctttgtatgggcatacatgcctgcatctttttaagtgattctatttattttttaaaaatgtagaagttctgggatctagtcctaggtttttctctgaccacttgcgtgatcttaggagaggcatttaactttgccttcagcatcctcaaggtctttgctgtgattttgagtcatcactgccagaaaccaagatggtctttgttgatttgatggttagagaatttcagaaggagagagacgggtcaaatttttcctttctgtttcttttgaaagctctattttctttcatttcacttttttcccatgaatgacaaatttaaatrctgacrtataatttggggcaagaacagaagtggttagataagtaggaggaagagctaatagtggttagataagtaggaggaagagctaatagtggctgaacttaaacatgtctaaatcataggtggaaggcaagaggtgggaaataagcaagctcagaaattttgtgtctctttctttttctcaaactatcctcttctaagtcttgccttttgttatttctccatgaccaatttgtttttaactttggggttaggaggtgaatgggtatgctggactccaaaggtcatatatcaactggaggtggtgggtgggaggtttcttagttaaaagtaattcctttgggccgggcgcggtggctcacgcctgtcatcccagcactttgggaggccgaggcgtgatcacgaggttaggagatcgagaccatcctggctaacacagtgaaaccccgtctctactaaaaaaaaaaaaatacaaaaaaatttgccgggcgtggtggcgggcgcctgtagtcccagctacctgggagtctgaggcaggagaatggcctgaacctgggaggcggagcttgcagtgagccaagattgcgccactgcactccagcctgggcgacagagcgagactcagcctcaaaataaataaataaataaataaataaataaataaataaataaataatwataataataataataattcctttgggaggcggaggcgggcaggtcacgaagtcatctgagaccagccttgccaatatagtgaaaccctgtctctactaaaaatacaaaaattagccgggcatggtggcctgcacctgtagtcccagctactctggaggctgaggcaggagaaccgcttgaacctgggaggcggaggttgtggtgagccgagattgtgccactgcactccagcctgggcaacagagcgagactccgaaaaaaaaaaaaaattcctgggcaggcgcggtggctcacgcctgtaatcccagcactttgagaggccgaggtgggcgaatcacgaagccaggagttcgagaccagcctagccaatatggtgaaagcccatcgctacaaaaatacaaaaattagccaggcgtggtggtgcgtgcctgttgtcccagctacttgggaggctgaggcagaagaattgcttgaaccaggaggcagaggttgcagtgagctgagattgcaccactgcactccagcctgggtgacagagcaagactccatctcaacataaataaataaataaataaataaataaataaataaaataaaaawaaataaataaaatttaaaaattccttattctcctttcagatatggctggagtcatttgtttcatattttcctttcaccttttacttgccctaaatctggttcagaactttttgtgggagcattaakttaccagaatatttttgtgtagtaaaattcaagcaaataataatagactgttttattatacagaatgaaaatgcggttcttggggttggtggtctgtttggttctctggmccctgcattctgaggggtctrgagggaaactgacagctgtggatcctgaaacaaacatgaatgtggtaagtttctcaaagttatgtacttttaaaatgcatctatttccccgatccagttatgtgagctacatgaagccatacccatacattcatctctttataactcctttgcttttcaatttctctgawtttttttttttttttttttttttttgaggcagagtcttactctgtcacctgcccgcccaggctggagtgcagtggtgtgatctcggctcattgcgacctccgcctcaggggctcaagtgattctcgagcctcagcctcccaagtagctgggactacaggcatgcaccaccatgcctggctaattttttttgtatttagtagatacagggtttcaccatgttgcccagggtggtcttgaactcctgagctcaggtgatctgtccacctcagcctcccaaagtcctgggattacaggcgtgagccaccgtgcccagcccaatttctctgaatcttagattcaatttgctaggcttttctcaccaggtaatatgtagccaacaaacctcagtttaatgttatatatacttcttaataagataaattatgattttttattaattcatttcatttttaagtctcactaagtttgtttaaactataaaaaagtatttaaactttgcaagaacattaccgctattgagagctggttttagaatacattgaacaaaggttgtgattaagaatgtccagggaacatatttctatacagaagtcaaagtatctgagctaaattttgttagaaaaaatatgcaaaaataaccactcgactaattaaaacatctgaaagttattaatcgtaagtaaacaataaaatctggaaatacctcatttaggcacaaaatatcagtaaagtacaaattattaaagaaaacagcaactttaaaatagatgttgcagtgacccagctgaagaatcaggcaagcttagggactcgcagagaaattcacagtgagccaggagagtatgayctgataacagggtcttaaagttaagttttacttcttagctcaaagcttttcttttgcctcccaatttttccaacttttaaaataattttttaaataagaatgataaaattaaattctttcaagtacttatggtagagagggtatgtgcacttatttacattaaatcccctggataattgaattatccatatcccactgagctcctgattaacaattgtcccatgaatccttccttatagaaaagtgaatgtgaccataattccctattttgttcaacttttcttccatcccaccttgacattctatgtaattattttagtccattgataaaaacaagttaatattttttatactttattggycagcaggggatctctcaaaacaaagaaagtgttttatacattgacagttctagctgggatatttagaaaagaaagaaatgagcatttatttgtgcccrgtaggcaggatggaaacaaagaggcccaagatgtggtaaagttaggcaaatttggtataaaacatgctagaatgatgaaactgaagtttaaccagacaccggtaggtggaacacaagcgtgaaacaagggaggatttactsttgtgatgagaagttggctactagatttagcagactaaaatttcaatgacaaatgctttcttaaagcctggagaacatagtttatctgctcctttgcttgttaatgtgggagactgtttcagattctgtccacccaatttccatcgtcctttttctctacagagtgaaattatctcttastggggattccctagtgaggaatacctagttgagacagaagatggatatattctgtgccttaaccgaattcctcatgggaggaagaaccattctgacaaaggtatgggaaggctcttaaaagtaaaaaccagaattcttctgggttttgtgttagtaaccaagttcagatttaacttaaaaacattgaaatgggattatttttagacgaaagcactaactgtgttgaggtttgcaaggcaaaraaaaataattttcttttaaagaagtaaggacaagagtcatctaattttttgttcaaaggccagattcatttgaggatatgctaaaatctctgaggctttgtttttttaaggaagtgtatttaatgaaatgttttgagcattaaatagatggcttttgctatttaaaaattatttaatttttttgaattcacataatctaaaaatcagagaattagaagacatacagtgaaatgcctcccttctctctcactccctacttcctgcttttttgtgtatctttttraaataacttcattttaaaatctttttatttccaaaaatctcattagaaacaaatacacacacagattcttatttttcccttgcctccatttkaatgcaaaagatggcactattttgttcttygaattttttacttaatatcttggagatctttccatacaatacataaagcacatcttccagaagtgcatgatatttcactatatgactgtatcattatttatttaccaagtgtcctattaatgcatatttgtgctatttcagtcttctgttaacaaatattgctgctgtaaataagcttttgtgtgtgcaagtttatttacatgatacatgtccagaartagaatttttggatcacaggatatatgcatttgtgattttgatatatattgccaagctgattttcatgtgcatgtgtcctgataattactatcactatgaatatatgaaagttcttgtagctttggcttaaaaagtatatatatacatatatatgtatatcttttttctctctctcattttataactcaagcaaaactgcagtttccagtgcagataaaggaatttctagacagactgattgaaattattaagcagttatcagaagaaggatctaatctttattcaattatctctccagatgtagcttatttatttatttatttwtttgagacggattttcggtcttgttgcccaggctggaatgcaatggtgcaatcttggctcactgcaacctccgcctcccaggttcaagtaagatgtagcttattctctaacatttttttgtttctggagacttttcttggggaaattaaggtttagattaaggtagttagatagctatttattcttcaatttaagtgttatacgggcaaaagagccacctttgcctcaattcctgcccaaattgttattcaaagcaaacttaaacaccctttgtgttaatgtgagcattgtattattatttgctttgttttttcttaatttatcctagtttaacttttttcttccatgtgttctagctgtaataagattttaataatgtttaggtggccacgacaaccattttttttgaaatttgatttctaactcttgagatttttatgctttacagatatatgccattaagcttcctttttataaatatgttataaaatgagtgatgagttatagtgagagcttttagtttttcctgtgctcaaaacactcaaaacatatattttatgctagagcgagcatatgatcttggtttccttccttttttttcccccaaagaataacccctgtatactgatttcagacactgtataaagaaaaatgctttatattatttttcttaaaattatagttgattaattagtaacgtgaatcactgttaaatgatggtaagcatctcagtaaaacttgctgagagctctcctcctatatccagcttcagacttctctctccatacagtggttaaaacactcagagtcacatgccctacctgtgtgtatcacactgttgcaggggaaggtgcagtgccctggaatatgaagaaagtgagcatgagtcttgatatgctcccaggtaatagaaaggagacttakgggaccttggtgctacacctgggtttgcccctgacttcttgtgtgctttgttttttcttttttttttttaacctctgtgggatatattatatatactttattttatttttggcaagagggttggggattgggagagtggagagtctaggtctttagaatgggggaatatagactgaaagtatttactctaagctaaatctgttcatagcatttggtcctcatgttctttctctattctgagaggccctccctgtaggggatcactgatgtgtatgtcatacctgctatgagctaacctcagtggggagtcttcaaggaagtctacagtgaacaactcagttctctaaaggaattgtgattttcctaagaactgcataggcgctttcctgatggtttgcatttccacattctaaaacagagcatggacagaggctctttactgtccttcactcctattcaagagcaaggttgttgccactggtgttatttccrgtgtttaaaggcaaatagataaaaagaatggagaaggcctttcacacccaaagtgaaacgcgtcctcttctcatgcatcccrcttcccctcctgacttcctcctctattattaatagcaccarcatcctcctaatgacctagcctggaatctgcagaatcattcttgaccacgggtcctctctaggccacccacgttaaattgcttcagttcatctttttcttctgtttccctgaccaccagcctacattaggctcttgttaccacttaactgggcgcctgaaataagctcagcagctgagagagtcttgagccatttccattttcaaggctcctcgtatactaacagaaagaaagaatttcaagacaggattatggaaattcastttgcttatatagtttaagaaattaatgcttttaatacacacaaaaatactgctatacattcatactatttacaagtaattacaaaatgtattaaaacattattcattttttggtaccacattccttgtggaacctgagtctacagctgaatggtgagcatctttcagtcctgttgccatgggcctctttgactgactgtgtagcctcacttggagatcaggttttttttatgaacacagggcttggccacatggcttctctgctcatgtttgcttaaaggctttacctaactgctcttttctctgccaggcttcctgttctcattcatcctatgtggttttgcaggattaagtttcttaaagcttagctataatgatgtgaaattgccattcagcaatctttaggggtctcagaaatgaagatacacactgttccttaaatattctgtccagctggtatttgtacctttcacctccattctgcacagtagtagcccttggctactcgtgcagtatgtgcatgctgtttcccaccattaagcaaccttcttaggaagtgttgagcaaygctttgctcctgaagggaattgaaattcagaaattacacttcatagggaagtggctctgttttcatctgctcagccttatttcagaaagtcatggggagttagcactggagggatctcagattcctgcctgggctagggatttttgtttttttttaaacacacttcactggtggattccaaggtagaattcttggttttggcaacctgtgttctagactaacatcctcattttgttggataagacagccaggttcaaatagggaaatgaatttgtctcagggcagagggtcatgtcctgacctgtctgactacagattcagtgatctttgaactggagaatgtggccttacataataaatattaaccaagttgatgccatgataggcacaatatatattttatatatatatacacacaccaagagtggcacatttgtatctgaaagttatgcatctgattgccgagtgggtraagtggcactctagactgtgaaagcctggaatgactgccttcagcatgcagaaacaggcttttcaactgtggcctcagcaaagattccccaggggttgtccattgagctattagagtcatagctgaaaattcacagcgtggcttgtgagttaagtctttagaaggagaccatcagcttgtattttgctttgattgtttattttagaattctggttgatttctagatttttctttccttatagaaaaatccttcacttctaaagaaactattttttgaatcactgcagtgctctaacgggctacacataggcsttggtaatctgggatgtaattcctcacccctggtggtgccgaacagacatggtttcattaatcratgcctgagcttggtgacttgggctgagctcaggctcatgtagcactctgatggcgcattgggtaggggattgcattcagaacctttgcctaatggagcagcataagtgaggtcagctgtacagcttatctcatagacccaggttgggatcagagcagaaagccaagtggaaaggaagatagtgctctgccctgtccccttccctcctcttcctcctggttaaccgctctgacctgtcctctgttctcaacctaattttcacatcttcagggaggatttcctcagcctctcacaccaggtcaggcccctggctacatattcttatagtcctctgtgtttttctccatcgcaattaagacaataaacaatatattattatgtaggtgatgatgtgtgtgacctctgtcatccccaccagactctgcggggatgaagacttttctgattctctttacttggtaaattgctttagctccaggctgcagtctacccaagcatgctcctgcagccctcctgtgacattgcgatttaatagtgtcccctgctcaagggcacactgcatgaaggatttcctactcctgggctcctaggagtccacgaacacaacttaaatgcttcctgtggtgggtaaaacttgaagctgtattgcctcatgattaagctgagcatgtgaagagccaccagtcatgggtgtaagttctggctctactatttaactggctgtgtgaccttggcaattttctttacctcttgaagttttgacttattcaattattaaacaggaagaataatactggctacttcrtaggctgttgtgaaaatttgataaggcctgtgaaatatatgcagtatagtaagtgcaggtgatacaatttcttttacaacatttatttatttaaaatattaatgaataaatacataaatattttaaaagtctcaccgtgtctcccaggctagaatgcagtggtacaatcatagcttactacagcttcaaatgatcctccctcagcctcccaaagggctgggataacaggcatgaaccatggtgcccagcctctgtttttaattttgaaatgtcaacatggatttgatggtggtctctgatattgacttcttcaggattaagccctccatgacagggatgtattctaaactgtgtggacaggaggaagatgcatttgtttacratggacagaagtaagaaaagtaagaaatgtcatagaactatgtctgggggtcaggtgacaagcactgtgtcatttctagccctgtgtcccctgcaggtgctttcttctgtggaccctctgctccttctgttgagggagaattttggatgagagctggataatttcccaaaattcgctcaactgtgaagctctggaactcaagttgctgtgctgcaaagctgtctgaggacaggccgtggtggcagagaggggcagggaagacaggcaatttggcatggagatgatgggcacatttgtcacatgacctgggtttgattcccagctgcatcgtatactaattgtgtgtcctagggcaaatgatttagtctctctaagcctcagaggccccaaaggaggaagaatgatgtaaatggcccagcaccatcctgggtgcgtggaaaactctaattatgataatgtcctggaacgttctgcagtgaacaagacagaccacattactgccttcgtgttgcctggtgatcagagtgattattgctggttttggggaaaacagcattctgaggcatggaacggttttcttccctgctctgtgatgcagggtgctcttgttgtgttcactcctgcaggtcacctgctccccagcagggtgacagtgaagtgtgagtgcagtggactgcacagtggcaaaggccacatgactcctgaatgcatcctgtggacaggccaagcgctgtgccctgtgtgaatcatcaggtgaactctcatacaattctagggtgtaagaactcctattacctcctgttttacagatgaggaaaccaaggtttatagggttaattaacttgcccaagataaagcagctgatgggtagtgaaggcaggagtcacacagcccgtgactgtytctgcccacttggccctcttctcaggctagagaacagctatgatgtccctgataaagtcacactgtggaaagtggaaagtatctgacttagatgtcctgcatctgctagatgtcctgcttgtgcctactacagcaactcagagagctgttaggtgacttatctgagataatgcgtgtaaagtgcttaagtgcttagcatggtgcctgtcacattgtcaacacttagtatgcrcttgctgttactatgattatattacctgggccaaagaatgccacttcactctatccttcttcatagtggttatgttctaataatattttattacatttacagttaactctttaacaacatgggggttaggggtgctgtcccccagagttattgaaaactgcatataacttttgcattccccaaaatttaactaatagcctactgttgaccagagggcttacctgtaacgtacatagccaattaacaaatattttatatgttatatgtattatattccatatatacaataagtaagctagagaaaagaaaatgttataaggaaatcataaggaaaakarratgtatttactattcattaagtggaagtggatcatcataaaggtcttcattcttatgttggaacaggctaaggaagaggaggaagaggaggagttggtcttgctgttgtaggagtagcagaggtggaagagggggaggaagtggaaggggagacaggagaagtgggcacattcagggtaactttatgaaaatacattgtaatttctgtccttttttcatttccctagaaatgtttctatagaatagcaattcttccatcatttgctttagtttcagtgcctgtgtcatagaagcgtcagtgttgtaaagraagtcttgaataattgcaattgccacccttctcctgaattgtytaatatcagtttgttttctarcactgcatctcccatgtcttctttcccatcgtctggtgctgttttagaagcactcgtctccatcaaatcatcttctgttaattcctctggtgtgtctattagctcttgactttatttaagatgcatatattgaaactatttacctgctcccaccctccacctttttgccatatccacaatctttttcttgatttccttgattggctaagtcatggatatggatactgtgaagtcatgcacaacatctggatacacttttctccagcaggaatttattgtttcaggcttgataactttcacagctttttctgtaacaacaatggcatcttcagtggtgtaattcttccagaccttcatgatgttctctctgttggggttctcttccaattcaatcctttccatagtgtatgtgtgtaatgagccttaaaggtccttatgacctcctgatttagagactgaattaaagatgtgtttgggggcaagtagaccacttcgatgcctttggtattgaattcatggggttctgggtggccagaggcattttcctatatcaaaagaactttgaaaggcagtcccttactggcaaagcacttcctgacttcaggaaaaaagcatcaatggaaccartctggaaaaatagttctcattgtccagtccttcttattgtacagccaaaagactgacagctgatgtctatattttccctttaaggctcagggattagcagatttataggtaagggcagacctgaccatcaaccctactgcatttgcacagaacagtagagttagcctatcccttcttgccttaaatcctggtgcttgtttctcttccttactaataaacgtcctttgtgggatatatatatatatwtttttttgttagaatggaacactttcatctgcattaaaaacctgttcaggcagatacattttcctctaggaatttatatgcagcctcttggttggcaggagctgcttcttctgttatcttgacatatttttaaagtttttaaaatttttaattcttaaaattaattaatttttggttttttagagacagcatcttgctctgtcaccaagctggagtacagtggcaccattatagctcactgtaacctcaaactccttggctcaaccagtcttctcacctcagccttctaagtagctaggactacagacatgtgccaaccatactcggctaatttttaaaacaatttttgatagagatggggatctcactgtgtttttcagactggtttcgaacacctggcctcaagaggtcctcccactttggcctcccaaaatgctgggattacaaacataagccaccgtgcctggtctatattggcattttaaaagccaaacctctttgtaaaattatcaaagcatcttttattggcattaaattctccaactttagattcttcaccttcttttttctttaagttgtcatataatgactttgctttttcttgaatcttagagtctagaatctattcttgctttatcttgaatattagagtctagaatcatattagagcaatcctgcacccacataaaagctgcattttcaatatgagataaaaggtatttcggaaaaagtgcaaggttttggcacttgctgtcatagctgcaatgacaaatggcttcacaaattttctttccctttttttttaacagtcatctttatgtgtcatttatcttgaaatgaagataattgaagctgcagacctcaatctatgacacatatcaagcaattcaactttttcttgtctggacttttctctgctttttgggagcactcccagatcactattagttctttgtatgggtccaatggtgttattcaaggtttatgatatcgtgctaaacatgatgaaaaacatatgagaactgcaagagatcactttttactgcaatgtgcaatttactggagaaactgcttacgtggagatgattagtgtcatgagaaatttaagcagatatttacaatacttgagcaacaggaggcggctacaaaattattacagtagtacacaataaactctagttaattttatgcagttatgatttaataccacatctttacatttgtttacatttctcttaactgtcaatggcaccatgtttggtctgtaagtgtgtgtctaagttttgaaaatgttaactttttatactttgtgtatatttatggtaataaataaaaaaggccaatatctaaatatattttatgcattcatgacatacttaaccttttagtaactttttattatttccagactacagagttggtctgttagtttttctcaaattgttgcaaatctccaacaaatttttcaatgtttattgaaaaaaaatccatgtatgagtggacctgtgcagttcaaacctgtgttgtttaaggaccaactgtatagatttattattgttactatcagggaccattatttattcagctttactatgtattaactacttcgtcattctcactttagaaaaggacacctatacttcagagagagttgagcaaatcctacaaagttttgtagcyagtaagaactgaggtctgcttcatgctaacgccctggtgtctgaccacctccttgttctctgttttggttctgccctggccctcagctgatttctcacatgtgttttggagtgtgacggagtcctgtccggactcagcatcctggcagagaaggccagtgccttgggaggcaggaggaacttccccacctacccggtcatcttcctcctgcgggactgtgggctcagcacattcagtttcggagcttgagtaatcgcctcctggcttccacccacactgggaaggcagcgttgtcgtggactgccactgggctgcttctttgtcagctttgtcctatttagggccataatgaaatcacttgccatctccaggctgagaaatggtcctttagtcttttcccttaatccccagccctcctagggcttctttttcttcaagttgcatttgcacagaactcccagagccacccgtagggcatagctggggaaggcagcccttgacctgtcatgctggtttgtcactctgacaaacagggcttcagggtgcctgagtgcattgagcaggctgggccttggaggagctgcctgaccaggcgaggctgagtgggtgcccctcctttcattccctatccccctccatctactagagattactttcttcaagcactttgtccacatcctttcaaaaatagctttctgccttcagccggaaggcctcagtgtgttctagagacttctctcttgttaaccttctttccctagcaaagcactgaaaagcatggcctgtggtgtcagacacacctggttagactccaaccctcacgcttcctagctctcgttcagccttgggcaagttacttgacttctttaccacaattccctgttctgttaaatggcagtagtgccaacttcaaaggattttcagtacagtacctacagcatacaagcgtgcaatcggcgctagctatcatttcaatcagctgttctcagcaaggtgaagtgaaatctgaaatagttcactggaagatgtgaacagcaataggttttaccttcccagagagaaacatcctttgccagtcaatccttaaatccttctttggtggtgggatgggaaagaaccacattgtaccttcctttcttccccctggtgggagcaggtgagagaagctggcaacagttggctgggcctgcttccagcgtccagtcttttccattcccttttgtattcacccaatgccagagggaaggggcaagaggtttggaagccatttttaaaggtttttcacccgaggattcgatactattttctttgctgaggatccgtcatgcctaatggaactgccatctctagaagttcagtaagttatatcctctgcatctccctcctcagaagagacttttttgttctgggatgaaaggaaactggcccagcctggaaagatgtgcaccccatgaagtccttcctattccctgtgtccccaggtcagacaaggcactggacttttcctagtggttccccagcctggctgcgcgtcagaatcaggcagggaggctttcatgtgcacactggtcccatctggccaaggcctgggtgcagtgtcagctctttattcatctggctcctatgttttctccagaaccctttgtggaaacatctgtctcttacttagaatccaggtcaaatgtttgtcccactggccaagtaactttctccttcttctgggacttcctgagtggtgttctagccttcttcttgctgggttagacagtcatcgtgtgtctgactccctcgaggatggagctccctgtgggagggagtgtgggttacccatctttgcattcctagcatctattagtttggggcaaaagtaattgtggtttttgccattgcttttttattttgtggggggtgggggtaaatggaatccctctctgtcacccaggctagagtccagtggtgcgatcttggctgaccacaacttctacctcttgggttcaaacaattctcctgcctcagcctcctgagtaactgggattacaggcacccaccacgagggtttcaccatgctggccaggctggcctcaaactcttgacctcaggtgatccacccgcctcggcctcccaaaatgctgggattacaggcgtgagccaccgtgcccggcctgccattgctttttaagggcaaaaaccacaatgacttttgcaacaacctaatagcagtggctggtactcagtaggcaccactaaaggtttgcacgaaacgtaatgtatgttttcaaatcacttcttgatattttaccttctagtgcactgcttaagatacagcagatttccattaaaaacttttcacctgaatgtggaggacacagctgagtggcctccattctctaaagccatgccatttgtcagacgtttacctttcttcatcagcccttttcctcatctgccagcatttcccatgagaaaacagtgtggtctgcagtaccctttgcagtgcttggcccagattctccagatttgaaaacatttagcttgtaaagaatagattcactgtttccttcccatctgctgcatcttttgtgcctgttgttcattgagcttttgtattcagcttgaagtaggggatggaagaaccctaacaaacaaaaaaggacaattagaaaaatagtgtctttgacttattctctggaagcctccttcaaaggataaagtaattccctgagaaaagcgttgtgcaggtgtgaattcggtctgggtggaacaagggtatttaccgatgttcttagaagctgcacagccaccttaggcatggtctcctgggtagcacatgctccagctgtccacaggccattcctttcttcacactcacctcccaggaaaactgcagcagctcctcattgcccttgggaatccaggagttatttattggggatgtttaaagactttcctgatgtatcttcaacttgtcagcttccacatttccccattcaaagctctagaggttacagagggaagtacagagactttagggaaattttaaacattctccatcgagagaaggtggggagctgagtcctggtcccatgtgctggccaacatctccccttccagcctctgtcctggcctggctgccacatatcaccctccttytcctctctcaattatccttgccccagggccctctttggtttcaaaccattcctgcctttctctggacactctcccctgaggagtagactaggcagtcccatgttttccgtgttaactacagaggcacagattggaacaagtgccaaggaattaggccacctaccgagccttcctcttgcctctstctgactctccatcctgagggaagacgattgcagtcgtttttgttggaaatgacctgacctgtgggagcagcccrttcctggcctttcaaagtcaagtcrccttactcatggcctagctcctgatcactcctggtgggtgaaaagtgcctcaacatacctaaagagctgtgacatgagcaggaaagcccctctttctagaaagtgttgggcaccatcagtacagcagagccactgcatcgtacagcgcccggtcaccattctcacgtacagttaccatgagatgatgatggtgcctgtagttacacatttttcaactataatttaatgataaattaattttggtaattataattgtcacttacactgcagtttataattttggatttttaatgatcaattttcatattttcccagctggattatcatcctcttcattgaagccaagaagcctgtgcataagacgctgtatctaccacaatgccttccacttacatttttcgtagtaaatttagtcttgttaatattgcattaaaatgaacctttgaaggcaaagatgagcacataaagcagccctaatcttgtccagtttgctttctattttctccccatgggtagaagttcacctgcatggccctggcatttctattttgtgattagaaaatcacaccagccatacatgatgtttcacttctgtaatccccgcactttgagaggccaaggcgagagaatcacttgaggccaggagtttgagaccagcctgggcaacatagtaagacctcatctctatgaaaagttttttaaaaaattggctggatgttgtggtacacacctgtaatcccagttcttcaggggcctgaggtgggaggatcacttgagtccaggagtttgaggctgcagtgagcagtcatgccactgyactccagtctaggtgatagaatgagaccttttctctcttaaaaaaaaaaaaagttatgggaatcattttatactcttggcctggggtcctgctattttaacaacacgarggtatagcacccccaggttgtacaactccagggagtaccaygtatattttcatgtatgtgagcagtgccttccggagtagtctacggaagctaccttgcagcagaactgtcatttaaaaacaatttgctagttatcaaatctatattaggacattagcagaaatgaacatttgtcaattcacttatagtcttatcatctggacaaatcattcttctcatttttccttggtattttacactcctctttggtgtacattaattttgcayagctgtaatttagagtagtctataattttgtattttgcttttttttcctttgcaaggtataagcttttctatgctgtcactgtccttgtcatggttgatggataattattataccaagtggatttcaatgaattatttgaccacttgacaattagcttatttccagtttttcactgttataaagaatgagcagagggcaaaggaagctctcatttgttcactgtgacccgtgtgtcagtcactatactggatacttacctcacttattcctcttaacaattatttttggaactgagacgcagactggttaagcaacttaatagtatgagttgatatatagtgaactcttactgtgtgtcagactctttgctacctacttttcatataatatctcatatctcactgtgtcctataaaatgtgtattatcatttctactcttcagggaattatattaattttaggagatgtttccccaaggtgtcatgttagaacttggagaggacagagttgagcctaggtttgtttgagctgtctaaaactcatgatcgggctgggcgtggtggctcacacctgtaaaccccgcactttgggaagccgaggtgggtggatcgcttgagtccaggagtttgagaccagcctgggaacatggtgaaacactgtctctacaaaaaacacaaaaattagctgggtgtgktggtgcacgcctgaaatcccaactactcaggaggttgagatggaaggatcacttgagcccagaaggtggaggttgctgtgagcagagatcacgccactgcactccatcctgggtcacagagcaacatcctatctcaatcaatcaatcaatcaaataagtggataaaactcatggtcagtataatgtcagctccatggaggtactttttttcctcttgtttttgttctctgctgtgttctcagtgctgagaagaaggcctggcacatagttggtactcaataaaggcttgtttcatgaataactgaatggtctcagcgttaggtaagcagcttgaggtcaggtttctttggctcccacatctttgttttttctgctatatcactgtctcgggtacaggtgagtagaaaataaattctcacaggcagacacagacacatatatttatgaatttgtgtgtgtgagcctttttatctatttaacttttaytcagctttaaaaatttttattaaattttattttttaaagcagttttaagttcatagcaaaattgagtggaaggtacagagatttcccatacaccctctgcccccacactcccctgttatgaacatccctcacagagtggaattgtaattgttacagctgatgaacctacattcacacaaagtcygtagtttacattagggttcccttttttttttttttttgagactgagtctccctctgtcccctaggctggagtgcagcagtgcaatctyggctcactgcaacctctgcctcccgggttcaagcaattctcctgcctcagcttcctgaatagctgggattacaggtgtggggcaccacacccagctaccttttttgtatttttagtagagacagggtttcgccatgttggccaggctagtctcgaactactgacctcaagtgatccacttgcctcagcctcccaaagtgctgggattgcaggcatgaaccaccacacccggccactacagttcactcttgatgttgtatattctatagttttggacaaatgtatgatggcatgtgtctacctctatagtatcatgcagagtagtcttactgccctgaaaaatcctctttgctctgtctatgaattccttcctccctcctaacccctggcaaccaggatcttttttactctctctatagttttgtcttttccagcatgtcatatagaatgcagcctttacagatcttggtaatatgtatttaaggttcctctacatctttttgtggcttgatagctcatttccttttagggctgagtaatactccattgtctggatgtagcacagtttagttacgcattcatttactggagcacatcttggttgcttctaaattttggcaattatgagtaaaactactatagacatctgtatgcaggtttttgtgtagatgtaagttttcaactcctttgggtaaaataccaaggaatgtgattgctggattatatggtaagagtatgtttagttttgtaagaaactgccaaacttttccagtgtggtgctaccagtttgcatttccaccagcaatgaatgagagttcctgttcctccacatcctcttcagcagttggtgttttcagcgtttttggatgttgctcattctgatacgtgtatagtgatgtctcattatgtgtgatctttttctttcctttkgtttattttgttaggaattattgtgagaaatgcaattacgaaagcaaattgtaaaaacattttataagaaaaaaattgtaaaaacattttataatttcttaaaaatatattgatttttgtttttgctgcttacataagtgtgtcttgttagtggacatgcaaaaaatggtccagtttcactgctaccttgccagtgctgttttaaaaaaattctttactaacattatatgtgagtacatcactatgtcaatctttcaatttatttctagttcattatttscttatggatcttttacgaatgttctatttagcaagatatcatatttgttttgaagcttggtgctactgcctcctaaacaatgaatgtttttcaggtcccaaaccagttgtcttcctgcaacatggcttgctggcagattctagtaacwgggtcacaaaccttgccaacagcagcctgggcttcattcttgctgatgctggttttgacgtgtrgatgggcaacagcagaggaaatacctggtctcggaaacvtaagacactctcagtttctcaggatgaattctgggctttcaggtatatatgaattgataatggcatggatgtatttccttagtactcttaaagcagacaacaggcttccagcagaagaggtagataggtggtaactctgaagttgtatgagaggggaagttagtgtcttttgaaaggttttaaatgttgctaggaatttaatgactagcagtaaggtaaattataagtaaatgattacattaagatttacatttagttaggaattcttaagttacttcggcatttctggtggtgtgggtgctgctgggtaaacgttattccataactttcctcctttctccataaatatgtaatccagatgttcacttttcttctttccagaaattatcctttcctccctcttccttctggctccaccagttaattgctgtatgmcattggacatcttacataagcctcctgtgtctcggtttccttatttgtaaaatggagcgtaataaacacctacctcataaggtcactgggggcttaaaggagaggrtgcagagaaggaacctccacagaacctggcaccttgtatgaactggctaggggttggctcttctcctgccagtggcaacatgcgcatgcatatacccatacgcacacttgggttttggtctatgttttggtaccaggtattagagaaagtcagcagcactatagcagcctccgggcttgcttcccatttttaaaaccagaggcacctctaaggacatgaaacacaagaatgagagcttttaacaaaaggcatatacaagaattggtttattgtcacgctatttgtaacaacggaaaacaggaaactacccaaatgcatgtcagcagtgaatggataaagtgttgtatatttatatagtagaataagaatgaacaacttacaattatatgcagcaaaaaatggattaagccagatacaggagaatacacattgtataattctacttacagaratatttaaaaacaggcgaaactaatttctggtgtgaaaaatgaggacaatagttacttttgggagacacaactggaagagagcccaagggggcttctgcagtcctgctggtgktgtttcctggactcactgctggttttcccagctgtgtttagtttgtgataactcatcaaactgcatactcagtatgtgtgtgctctattttatgtactatttcaatgaaagagttcctttcttggattacagttatgawgagatggcaaaatatgacctaccagcttccattaacttcattctgaataaaactggccaagaacaagtgtattatgtgggtcattctcaaggcaccactataggtatgtatgtaaataagatcagaagttgatataaattcttcattacagagtttgtacttttcttaaaagtgaaatataaaaagatgttagttcaaattccatttatttttaaatgccaaacagaaataatgaataagataaggaatgttggtaacatttagtcttctatgaaaattcatgtatatggttgaaattgaagaaattaatgtaagccacaatatattacatgttttcctagatgaagcaagatagggatgtgagagagtagaaaacaagtagtttctaagttcagagacttacataaagaaaacaagaaaatatactgccttctgaagttaagtggaatataactaactacaggtacatttggtttacaaaaaattttgaaaagttatatgcattttaatttatgctgattatataagtaatgcatgttcactgtagaaaaacagaagaacagaagatttagcaaaattaaagaaaataaaaattgcccataattctagtcagcaagagtttttgtaattagggactaggaacctgtcctataatttatttaattctcccttttaatgtttactatgactarcaccttagtgttcccatcacatgctttccttacaatatattcctagaaggagccttactatatgaaaggtatgaatgttttgaagggtctcaaaacatgtggttatattgccagraaaaaaatggagttaggcatttttctttatttatatttcttctttcatgacttgcctgcttgggacctttgccccactgcttcctaaagtgacattctggggccaggtggcaagacgtcagagagggttgtattaattcgttttcatgccactactaaagacatacccgagactgggcaatttataaagaaaaagaggtttaatggactcacagtttaatggattgtgagctagggaggccttacaataatgacggaagagcaaggaacatcttacatggtggcagacaagagagagtgagagccaagtgagggagtttccccttataaaaccatcaaatctcaagagacttactcactaccacaagaacagtatggggggaaccgcctccgtgattcaattatctcccaccaggtccctcccacaacacatgggaattatgggaactacaattaaagatgagatttgggtgggaacacacccaaaccatatcaagggttaaaatatattttaaagctaggggattctaaatgtgtgagttcctttgaaatcattggtggtttatttcaacgtggtgtctgtaaattgttctttgggggaggggcatgggggagataaaggtgatggggtgaggctcttggaaatagtctgttatttacattgtaaaaggaactgggaagattttctgattctcccagactggatttcttccagtgcttatctaggttgagatttggagcaagcattaacaaatgcttgatttactagtttaaccaaattcagtgttagggcacacggaagttcagagtgccccatgtcaagtgttttggctcctgctggtggtattgtttgcgtgggtctcaggcctccgcgagagggcgtcgcgagtgacggcctttgtgttttctgagaaggaaatcccagatgatggaattcctgttttctgtcctttgttctyacaggttttatagcattttcacagatccctgagctggctaaaaggattaaaatgttttttgcccygggtcytgtggcttccgtcgccttctgtactagccctatggccaaattaggacgattaccagatcatctcattaaggtacttggacccctcccatccctctcctctccccgcagatttcctcctgagatctgaagaamtggcaaggggagggataatctgtgccttcctcccctgcgttttgatatcagtggarcagtgggcttttctttttccgtttacccctccttccagacccaggggtggccggggacgcctgtcgtttcctgcrcactggtgccacgtgtactcatggttagcatgygtcagtacagctctgcccacctcacagggagagcaaggagagtctgggagaaaataatttaagcatttgtggagttgccctttatcccatgaggtgagcctgtgcacagaggatgtaggagatgggagataggaaatgttcccaaaagcccatccctagctacactgagggtgacctaacaacgctatcattattgtattttataatatggctcctaaacacagccagtagcttcatcagggctctgccctaaagctgtggcacccgaacctctgttcagggaggaaatagatttcatgaaaaagagttttaagctaggtaagaccagatgttctattatgcatgcattatatgtcttttatgaaatatatgttcacacacacacatatgaaatcctgtatagaaatatatacatgaaatgaggtataacgtctctcatgggccatttagaagacttaaataggaaagatggaatctcctaggcttaggcagtccttctgccttggcctctcaaagtgctgggattacaggcatgagctaccatgcctggccaataaaaaaaattttaaaaaacaaaataaaaaagcaagcgatgggctggatttggcctgctggccagtagcattgaattagatgggcacacctctggcagacattactgatcaatcacagccttgactgtttcttagaagtaaccaccgatccatcagagtcagatgaaaattacttggggatggccctgggaggggtgatcattaaggccctttcccactgtagaagtccgctgaaaacttatttgattttctgcctccttctcttcatttggagaatttaaatacacctctgtagtgtgtgatttttgctttggtaaacttgtgcaaaagcatcctgatttgatgtccactggttgccattctctcctgaggccattcgtggagacattgggtacttgtctctgcttctgaggtgagtcacggagacttatgcaccagartgaaatgctgagatgttcttgggtttctttttattttgtaggacttatttggagacaaagaatttcttccccagagtgcgtttttgaagtggctgggtacccacgtttgcactcatgtcatactgaaggagctctgtggaaatctctgttttcttctgtgtggatttaatgagagaaatttaaatatggtatgcatgtttatagtaagatttgatttttttttttatctgtgaatgtgcttatttgtgttgaatgatatgggagaggtgggaatgacctcatcagaactctaaagagtctttcatttgagaggcacaagcatgaactttggccaatgcctagaatacggtaccacctgctgccatcctcaggctgactgtggtcaccttcttatgttgtacctagatggagattattgaatgaggagatctgtcacaaattaagctgtaatatttataattactctagtgatttgtttcttttagaaatcattataagtataaacataaagatgggaacaatagacagtggggactccaaaaggaaggagggagagggacaagggctgaagaacttcctgttgagtactatagccaatattgagtactgtggttatgggatcaatagaagcccgcatctcagcatcatgcaatccacccttgtaacaaacctgcacatggaccccccgaatctaaaatacacaaattttcaaaaattactataagtatttaaatttggaacggccatttacatacacataagtgtatgcttgcagtgtgtgtgtatttataaaagtacattttataaaatgtaaacccattttattttataaaatataaacccttggccaatactatgcccgtgtttctaaatatgtttgttagtttgtcatgtggcattttgaaaaaaagggttaaaatcctggaataaaggccctaaggaatttcagtgccatttttcttttgtctgataattaaagcaaggtgtgattgttatatgaaatttgggaaattcaggaaagcatgaagaacaaaatgaaaatgccctgtaaacgaaacccacacagtcccgtgcttaccatgttgttgcacctccttcatatggactttgtatgtggttgtatgtatttttatagggcagatttttagtcaaataatttttttctacctctcatctcacatacttgagattatggctctagtttttagtgctttgaagggcaaaatacaatgtttattatcaatgccaccttaatgctgttttcattcttcatttcaatgtatttattttgcagtctagagtggatgtatatacaacacattctcctgctggaacttctgtgcaaaacatgttacactggagccaggtaggcattccaggagtgcatttggggttcatgtaaaatcaacatcagaaaggtctgggcatgcaaaccctttccaaatagaaagacaacctgcttacaaatctgatctggttttcttccccagagtcctgggtttttgtcatcgtgcttgtgttgcttttgatacctgtggtggggcacactgtgttatacgtgggttcacaaacagctactggggttgacatttttcttttccctcctctcccttcctcaagtctcaggttaatatattctctccctttccttctcccccagctttcttttcctcctcctgtttcctcccctccatctgcttctcattgagtcctagatttttttttatttctgtgttgcttcataaagagtgattttaaatccgttttggagatagaaaccgctgtttcaacactaacccctgatcacaatatgcttggaatagcagtgaataaactggagctaaaccaatgatagatgtgaatgggggcccctgacttttgaaatacagttttgattattttatcatgtaaataagtcatgttcattctagaaaatttagaaactacatctagaaaaaaattatcttaaaatgaaaataaaatcattctataaccctagacagagaggaaatgcatatccatagatattgaatgtctctgcattctattctatacctcttttcaaaaagatgctgttaaagacatggatagaaatagtagatgtagaaatagattgatttttctcctgcttactgttttacagcttgcttttcttttttcacctgacaatatgtcagggacttctttctacctcaggacataattttgtgccatttatttttcagctaacttcatttttaatatgaaacaactcaccatttaagccctaaaccaagacactgtaggtgtcttgaatagtaatttccaaacacctggcagtcactgcttgcatcagaatcaccaaattgctttaaaaagtacactrtttaataaatcattgcattaaaaaagtaatgagagttggaattatagtggaattcttggattggctaccatccaggcttataaaacaaatactcctgtgtcccaatcatttggactagagaatctgtacttttattttttcgttttattttatttttttgagatggactctcactctgttgccaggctggagtgtagtggtgcgatcttggctcactgcaacctccgcctcccagcttcatgtgattctcctgcctcagcctcccgagtcgttttattatttaaaaaaaaatttttttattgaggtataagtgacatagaatatttaaagtatacaatttgatatatttcagtgtttgtatacacctgtgaaaccatcaccataatcgacacagcaaatatatcatcatcctaaaaggtccctgctgcccctttgtgatacctccccccatccctcccctcaatcccactgatctgcttcctgtcattgtagcttagtttgcattttctagagcttgcatgagaacagtcatgcagtttatacttgtttttgtctggcttcttccactcagaatacttgttttgaaattttcctatgttgtgtatgtcagtagttcattcctttttatttctgaggatctgcatttttaaaaaatctgcctggtagattcttttgctccaccaggtttgggagcagacctgttcgggacatcctgatactttcatctccttcttcagttgccccaggaactctaacagtgctatagttctcctttccctggggctcgtctctaaggaactaggaagagcctggcctgaggctcctggtcctttatagtaactagaaggctgagagttaaatgtcagttcctcaggggcagagtttgttgtggcctaaaagaggggcatctggaatgcaaatagttcatgacgtgctgaacagcacatgcttaccacttaaggaatgcccccaaaccttcaaaaatcctcaaattcacaaagattgaggattttcgttcttggttcaggtctctgcttttctccttggtcacatttatgcttatagtcacttgttttcttcatataccctgtcactagaattcccctacatttttgaggatgcctaggacctcttacctaatggacattttcctaaaaggcccaatgtctgtcacctcatcagttattgcacccccagagatgayggagggtgactgagctggctggaggcagatcctgagctttcccaccagcttagtgactgccagcagcccacacacagtacacgccaggcctcagcaaagtacaaatggccaccagacctgggaygtcagaggcccttgggaatgttgaaaccaaggctgtcytaggccaactctattttatattacagacctgtgttgcttcacccttctgtgtcttgggcctccactggkcatggggtttgcagtagagacattggatcggctatcatctaggctactggtcttgttccagccctcttatccagcagcttgccagggtcaaaggctgcagggtgagggccagagcactgctctgtgccccatttgtgacctggtgactttagattctaactaccctggaatatacctccagaatatttgcaaagcccagatttgctgtacaaggcagcctgggcctttgctcttctacccgctgtaccatcttttgtcagtaaaatggttggttgctttgtgcagccattgtatcggatcttccctttggctttccctcctctgggctgttggccaggggctgccactggtgcaggctgcaggctccaagaggcagtgcaggaaaaggcttctgtggaagctgggcaggcctggatgccgggcaggctggggctagaattcaggtgtggcattagagggctcttatggtatgagtttggggttgaccttaaaggccattttgtttacagtccattcagaagtttactttttgtttaaataattaggattaacttgttaataaattccataccttgttctttagcgggattttaaatatagcatactcatctttccattctccttataaacctgatgaatttcggagctccccagagccaagacttgatattacttctcactttctcactggccctgcccagagcccaggtactctcacctgtttgaagaaggccatcccagtgtagttttccagtgttgttctgacctacctaaggtgctattaaaaatactggttcttgggcctgtctgagacctgtggagactctgaattcctagggctgtgaccctgggatctatgtttgagttaagtgccttagatgattacgatgtgctcttttttttttctttaaaggaaaaaacatacttttggtaggcttttaaagaacactgtaaaaaggatattcagtataatttttgttaaacatgtaatatgttttatgaaattttagaaaatacatgagtgaaagaaaaatgacttgtatgtctagcacccagcaatagccactattaatattttggtataatcttacagttttgtaatataatcatttccattacaaaagtcagatcatactacatctgcttttatgtaaattttcatttaaagaaatgccattatatttgttagatacaagttaagctgttgtattagagaccccaaaatacagctgctaaataaagagtttatttctttctcataataaagttcagagagaggtggcccagactgatgatagagggggttttggctgtgttccatgaggccatgcagggacccagttccctccatactatagctctgccatcctcggggtgttgtcctcttctgcctggttgcagcccggtcacctccatgtctcttccaactcacaggaaggcaggggagagggagctcagggcaagtgactttgtgcgaaggagatagcttagaagtgagcggtatggccatagcctggctgctcgcaggaggatgaggatgtggtttctatcttggcagccatgtrcttagggaaagctttagggattctgttactgaaaggaagaaggcaagaatgggaatgggtggcagtctctgccataattaaaaatgcctttccgggtcagtaactaaagttttaaaatatttgtcataaagggcagtttctgttgcttgaattttattatcattttgttttttgcagtgatagttgttttgcagtcataaatcatctgtccttatatgttagagtgttttcttaggatgatacatttatagcagtagacttagtaagggagagkgtaggcatagctttaagacttctaatacatattgtactttagaaaagttgaacccgtttacatttttattaccattcaagacctaaatataatttttaaatgtcattttaaaacggtttatcctaatactataggcatttcctcctgatcattatctacatatactctgtgatatgattatcacagaagtataaccttagtgtatatttggtttcatttttttccacttagtattatttatgagattatctgtaagccattttctgtttstattttatttatatttatgacagtggcatacyccttgtgtatatttatgtaacatatttacccaaatatctattatttgaaatggtaagttttggccacaaggtggcgcccggtaaaaagaaatgcccagacattctcttcaaaactgcttttggtttatgtgaagtctgttcttatcaactgcatacaattctactgtttgatgtaataaaacacagagcgagatgatatactacaagggattgttacttattaaaattgggctttagcttatttccaggtttttgttactggaaatcatcttaatacttttcttttgaaatatcctttcaagtggatagcttgaagtcctaagtgacttagcacaaagtcaaatttagaacttcagtctgagctataggcaagtttcacctttgtattctgtgctcacgctggtgcttcatatgaatgctgaaggacatgtgacaaagtgatgaactgctgtctgtgttcagtggcagaatagtttgcatcaatatattttcactgacaaagatggggaacagatgtaccaacaggtgctgtgaatccaaattttgttttgcttgttaaatatgccacaggtatttaatatcagtcatttgcaacggcaaaaacagatgccaaatatttctcctgtaacaatcccctatagtatatcatctcactctgtcttttattacatcaaacagtagaattgtatgcagttgattagaacagacttcacataaatcaaaagcagttttgacaaagaatgtctgagcatttctttttaccaggcgccaccttgtggccaaaacttaccatttcaaattcatttggcttgccaattttgtgtttaatttttgacatacatttaatttgagagtgtagaggaaatatggatttgcactattttgaattttaaaaataagtgacattttgctaatattttatattatactattttaaatatgaataaatgtaaatttcaatacaatttcaatttcatggctctagtatccctaactagttagaattgtgctggcatgcagtactacttggtgattatactgataccagtactcaagaaaaagtgtttaatcaataccatcattaaaatttgactaatataactagacaagtagaatgggtaaatagaaaatatacagtcatccctcaagtatctttggggactggctgcagacatcatccccaaaccaaaattcacagatactcaagtcccttatataaaatgatgtagtatttgcatatagcctatgcatatcctttcatatgctttaaatcatctctagattacttatgatgcttaatacaatgtaaacgctatgtaagtaggtgttacactgttttaaaatttgtattttttattgttttattatcttttattgtttttttccaaatattttccatctgcaaaatatcacttggctgaatccacagatacaaaactggatatggagggccaattgtatattataattattttatctatatatatccatctctctctctctctctctattwtatatatatatatgtatatatatatgtagctacctatctgtctacctttatttcccaagtaaaatgactaactctttgaaaaagcttaggatgcaaatttcagcagaaaatgtcagcataaagttccgctagcaggagcaactgttgatctagtataattgacagcatatgtgcatagctgctttcttgtgtcaggtggtagctgcttaacaatcatacaatgagaaattgagtcattcagtaaagcaggacaaaaccatgccatctcatttaaaataatgccttggaaatgaagagtaaatctggatattggtataaagttgatttccgaggttgtggctagctccagcaacctatgatgttatctctaactttggtgtcagataactcttttccaaattatcttctttttaggctgttaaattccaaaagtttcaagcctttgactggggaagcagtgccaagaattattttcattacaaccaggtaaagtttttagtcttttcattaaagggggccctgaaaactcatyaagaaagccagcctggcctatcaggattctggccaggctcaggtgctgtgggaaatgtttgcaggagttgactagtgtttgttttccatcagtccattcagaacaatccaagctttgtagctggtgttgtggactgggcctcctctctttgtcctttccccagctctaaataagaatcatcactgttatgcattactcagagtaatcacgaacatagcctgtagagtcagacagtcctatgtctgttatctggtagctatggggccttggccagattacattgcttaagcctcttccctgcactaataaaattagcatttttgagcrtgctaaatgcactgaagtgtgaggcactttgctctgttttttaaatttaattcccagagcatctctgtgatgtaaacgtgattatctctgacttaaacatgaggacagtgaggcttagagaatttctgtgacttgtcttacacccaaagggaagaagtaggagggcatgaccccaaactctttccagccactattgccttgagtctactacctatggagtacaacaccttccttgccggggattaaacattcattttggtgcccagcctacggcagcarctccacagctagtggcgattataattagcattctctcatttggggttagatttctttttttgtgccggtaatggcaacttgaaaagatactcaaagagattttaaaaatttagtctgttagtcaaacttactagacaatgtttaatggagattgcgcttattgtgattttgaaaattaaaacaacaacaacaacgaggctttctctggttccttttcattgtagagttawcctcccacatacaatgtgaaggacatgcttgtgccgactgcagtctggagcrggggtcacgactggcttgcagatgtctacgacgtcaatatcttacygactcagatcaccaacttggtgttccatgagagcattccggaatgggagcatcttgacttcatttggggcctggatgccccttggaggctttataataaaattattaatctaatgaggaaatatcagtgaaagctggacttgagctgtgtaccaccaagtcaatgattatgtcatgtgaaaatgtgtttgcttcatttctgtaaaacacttgtttttctttcccaggtcttttgtttttttatatccaagaaaatgataactttgaagatgcccagttcactctagtttcaattagaaacatactagctattttttctttaattagggctggaataggaagccagtgtctcaaccatagtattgtctctttaagtcttttaaatatcactgatgtgtaaaaaggtcattatatccattctgtttttaaaatttaaaatatattgactttttgcccttcataggacaaagtaatatatgtgttggaattttaaaattgtgttgtcattggtaaatctgtcactgacttaagcgaggtataaaagtacgcagttttcatgtccttgccttaaagagctctctagtctaacggtcttgtagttagagatctaaatgacattttatcatgttttcctgcagcaggtgcatagtcaaatccagaaatatcacagctgtgccagtaataaggatgctaacaattaattttatcaaacctaactgtgacagctgtgatttgacacgttttaattgctcaggttaaatgaaatagttttccggcgtcttcaaaaacaaattgcactgataaaacaaaaacaaaagtatgttttaaatgctttgaagactgatacactcaaccatctatattcatgagctctcaatttcatggcaggccatagttctacttatctgagaagcaaatccctgtggagactataccactattttttctgagattaatgtactcttggagcccgctactgtcgttattgatcacatctgtgtgaagccaaagccccgtggttgcccatgagaagtgtcctwgttcattttcacccaaatgaagtgtgaacgtgatgttttcggatgcaaactcagctcagggattcattttgtgtcttagttttatatgcatccttatttttaatacacctgcttcacgtccctatgttgggaagtccatatttgtctgcttttcttgcagcatcatttccttacaatactgtcyggtggacaaaatgacaattgatatgtttttctgatataattactttagctgcactaacagtacaatgcttgttaatggttaatataggcagggcgaatactactttgtaacttttaaagtcttaaacttttcaataaaattgagtgagacttataggcccaaagaattgtgtgtatgttttttctcttttatttaacagtcatccggttcttccctttctctcttggcagtacttggaactcttctcaaggttaatgtgtttactccgggaaatgaagggctaccaagtaacgagtgatttttaaaaatcatttttttgtatgccacaagagggcactcttggctttgcttgcaaatcttcccacgctctcttccctcactacttcttttcttttcttttcttttcttttcttttcttttcttttcttttattattattatactttaagttttagggtacatgtgcacaatgtgcaggttagttacatatgtatacatgtgccatgctggtgtgctgcacccattaactcgtcatttagcattatctcctaaagctatccctcctacctccccccaccccacaacagtccccagagtgtgatgttccccttcctgtgtccatgtgttctcattgttcaattcccacctatgagtgagaatatgcggtgtttggtttttttttcttgggatagtttactgagattgatgatttccaatttcatccacgtccctacaaaggacatgaactcatcattttttatggctgcatagcattccatggtgtatatgtgccacattttcttaatccagtctatcattgttggacatttgggttggttccaagtctttgctattgtgaatagtgccgcaataaacatacgtgtgcatgtgtctttatagcagcatgatttatagtcctttgggtatatacccagtaatgggatggctgggtcaaatggtatttctagttctagatccctgaggaatcgccacactgacttccacaatggttgaactagtttacagtcccaccaacagtgtaaaagtgttcctatttctccacatcctctccagcacccgttgtttcctgactttgtaatgatttccattctaactggtgtgagatggtatctcattgtggttttgattttcattcctctgatggccagtgatggtgagcattttttcatgtgttttttggctgcataaatgccttcttttgagaagtgtctgttcatgtcctcactactttttctaagattttctccagcatctaccagggaaggtagagaactttgttgctttctgagccagttggaatttgatggccagccatggtagtattatttctgttcaggagtataattaattcttgcctagtggataacatctggaaaacgttctcaaggaatacctgcccctcaaatgtaaactgaaaataaaaatttgcctaataggtaaatgagtgatcagaacttcagatgtggttgggggatgggtggcaggaggaaaaggttttaactcaggcctcacacatatataggactgaaatttagactagtgacatccccaaataatgattattttgtgtttgtgggtattaaaggtgttaattttttaaatataaacattaaaaatacactgtaatgtgatttcttgtcattaattttttaatgtattaagagattttcaaaagataagtcactctgatctgttgtgacactgaaaggcaactttgaatagtaattattctgatttttaaaaagttacccaatcagtatttcattatgttgcgctaggtgcagatttgaacttcaattccaaattaagcaagcaaaactctttgtcaaattgtcttagcattactgaaaataatacttcacattttgtrttgtgccttacggggtttcaaagccttttcataaagctttaatatttgcaataatccctttgacaggtgaggcgagcatttgtttctctacaggcaagggaatgcctttttaatggggatgattttatatgccttaaaagtttcagagaggttgatgagagtttcaacagtataagtgagtagaagcgcccacttaaatgcgacatgtaagtggatcagaatagaaagtgtttaaaaccaaatatgcaccagtatttggactaataggagcatcaggagagtgtctggaggaagctaacatccccatgttctttatcagcatctcctattgtttttggcacggctaattaatgttttctgagtcttttgtaaagtgtcacataaaagcagcttcaatgaccccttccaataccaaactcctcctgaagagatacttaccttggaaccaaccctggcccttttctgctcagtttggctgtaacttgctttttatccctagctagccttgtcttgacttttctgagactgaatttttaatcttcagtctttaaaatgaaggattagattttgatattcgagatcattccacctctatgagtcttccctgttacacaacactacacatctctaatagccaggaacagttttgattaaacagatgcccaaatggccttacctaatttgagaaagaaaaagaaattcataaaggtcatttaaaaaagggattatgtgattgatggcaggctttgctaactacatgttctatttgctgggggaaggggagcagcatccacagtcttttggtaagttggtgccacataactttgagattgtgatgagtgtgcacaaacttgactgttgtactctcagaaaagtgatttgacccctgtgataagcagaaaataaaagattcctgtcctccaactccgccagaaaaaccatactaagataaaaaccatatgcaggaagccatgatcaactggagaagagatggcgtggccaaagttctaatgctacctgtcagaaaacacccccttttgcggaaaaccatcaattggacaagaaatggtgtggccaaagttctaatcagaaaacaccccgttttagggaaaaccatctttacaggtgggtagatccaaactacatcaagcagtactccagaaaaaaaaaaaagatttgttttttagcctcaatttagagctaatgtcctttaaaatgaatcttgagtccacaaatatcttttgaacactcattacatacaagatgcaatgcttggcactgtgagaagaagtcctagaagatacaccctgtgctctaaaaagacctattcatctagcaagctattacatttttgtgcaaataaaaactgtttaaaggtgcgcatgtgccaaattcaagaaatgataccaccttagtcagcacttgatagtgttcaattttattttggtccattaagtgatgctgtttttggttacctgacatattgttcagcattccacatgatatagagtggagaactaacaggactgtaattcatcaatttccctgggatggttgcatttgtatgttagacaaaaacttctgtcctggtcagctgcaagtgcagagatggcagagaagctagttgctatccttcaaagtgccacaaagtcacgggggagagtatggacaaagcaggctgaagccagcgctctcaagttttgctgcccacggccttctgtaattggcacatggacattattctaacagcgatagacggtggatacaccaaagcagaaaatgaatgggttggttggggctggggactcaaaggagacagtcttgacagcaaatctagcagctaaatccaaattaagcaaacctgctaatgccactcacttaaaaaaaaaatctttcttgctctcgcaaccagagcacccaagcatgataactgagaccacaagaaaaggacaatgtgtgctgaaaggaaatttgagggctaacttctgttgagggtaaatttgagtgatattttacttatgagcagaaatccaattttaatgttgagaaagtgagctctaatggtccgtttggagcagtgagaaggacgctcttctctgaaacactgcatcaaggacaagaccacgtctagccggaatgagaagaaaagtttctggtttaccctaaaagtgaagtgaaaacaacactggggaagggaggagatgttgtggggggtgggggcgcatgggcggtagaggtggagagccttggaaggacaggttgtttaactggaagcaactaggggcctacattatacctattttctgctatcatctagaaatcaaagcagcagcattagaaaaattcacccttgttccctttttgtattggctgtcaagaaactcaacactgcttctgaacctttatctcatcaacagcaaatatgtcagcagaatataataatgttttcatagtaccctgggttaaataaaaaggctgctgtagggctagaggctactgctgagggctcctgggaatgagcatctaaggaatgtcagtattccatcagtggcagttagtggacacacaccagttaggagattctgaattacaaattggcctattatatgtatctatatcttatatattacatattatgaattggcatattatatatatcatatgtatgcatatataccatatatgatcttagttttaggcccatatattggtccatatttttgtagtacttgttctttcctcataatagatggcgttatatcttttatttctctttacataatcttacttgattttaatttcaaatttctcagttattctttaggtaacgtgtggagtacaaatttaaaataccatgcatattacttggtgtgtttgctgtgtgctaggacctatgattttactgctgtaaacccacagcaataataataatcctacttcttggcagggtgaggaagccagcttttttgaggattggataaaatcaattcagataaaacatttagccaatgcgtggcacctagtaggtgggctttacacggtagacttattatttttccatttaatactccaatttccctttgtggggaatcggggggataagaaaatgcaagcttcaaggagtaaagggctggacacaaccacatagatacaagacactaagcaagaattaggagtgctccctggcttcaaagctggtgtctaaaacgtctatcccctaaggggcccttgtatcgtgtcatgtgtcagaccccgggttgaacgcgaggatttttgtgctgttcccagggtctctcaagagctctcctagtaccgacctccttgtgctcggtggcccctggcccgaggaccccagatgggtggcggagaaacgcaggggatagagactagccccctagccgggctccgtgggcccggagtggattcaaggaccggtggcagagggcgactgcaagttggccccgcaaagccaacaaggggaagggtagggtagtgacgacatcacctggtccttcaatagcctcccgggaggcttcaggaactcacatctctttcccttgacgaacaacgcaggtggtttgctgaattaagtgttcccgccccaaattgagatacaacgggctttttagccagattggcgcagactgggagttaaatccagcattttcccggcaaagctgagcctggccgccgcggagccctctttccgctgtgcggtgcctccggctccgatcgcgggcccggcgccccgggacgcgccgccgagggtagctacgcggccgggctgcggcctctcccggagagcctgcgtgcgtggtctctctagcttgctgcccgccggccaggaaaactctggggacaagctggagctggcggaggttcccatccggccacccttcccgtctgatttcctgagctgacggtcaccgccggcgttcggggaccagcggttccctgtgcaaagggctcgtttctcgatcgccgctggatagaccgcaaccgggttctcagaaaacacccgagctacagaccgcatgtagctttaaacagtttttaaaatgcgattatgcttgcgtctttatgaaagcacatggatgcagttatacgtatgcattaaaaaacacaaacaattctgcattgattgcaaaggagcgctttctggtggcaatgtaaacggtctagtttgagacccgtgatgacacacgtgaactgagttgccaaactcatagaaactccacacggtagatctgtacattgtgtcccgtgttaattgtacgt

SEQ ID NO: 95205 - DNA, 74317 bp, Homo sapiens
  misc_feature (1)...(74317): n = A,T,C or G
ataccttgcatgtattgatttatgtctttgcctgtaacttctgactccctaaaatgtataaaatgaagctgtaccccaaccaccttgggtatatgttctcagggcctcctgaggctgtatgggcaatggtccttaaccttggcaaaataatcctctaaaattgagacatgtctcaaatactttttggtttacaaaacctttcccagaatcccccaggctttccctcatatttcattggccagacagttcctaagtcaatcacaaacttagaccaatcaaaactgctctcctgagactgggcccgcttccccagggagttttactgtccatggtcaacaaaaactgggacctctgagccaggaactaggaacctactttgaagacaatccccactgtctgctcctattctactctgcagcctcagcttcttcatctctacaatgaggggaaattgcatccttcactgactccacacacactttttcagctcccattttgtgtccagtactgcgttgagtcctggggattcaaagattccgttcttcttgtttgggtagctgagacctatcagaagtgcttcaggggccaggtatttaaatttatacatctaagtatataaatttatcctacttgctttctaattcaaacttttaatttaaaacacacacacagctggtcaaaatgaacacattttggctggggggagtggggggatttggtttcttgtttgcaggtccttgaggattcccctgccaaaaaaattgcaatgaaacgtgttaagtgtagtattagactgagataggcaaagagtgatatggcttacaccagagaggcacccaacccagcctgggagtgatgcagctcaggatggaatggggatatgcttagatctgcatgttgaaaccacatccccagctgcacgacctggaaacatagaaatcagcccagccacacctctcccttaccctcccattgaccaagtcctatagattctaaaataattcttgaatccacccagtgctcttattccaactgctgtgtccttcactcagtcccttatcacttcttacctgtttttttccagtagtcttcttggtctccctgactagggatctccttccccaatctcctttctgaggctgctgctgaggatcctcccacaatgaaaatctagtagttcttatgctgcctaaaactcttcagtagtttccaatggccctcagttaaaagtccaaacccgttcctatgggatagaaagccatttgagatttggatcccattcaattgaaaccacctttgcaagaaatataacagtgagaaaattatgatagtgaaagagatctgatctaaccaactgccatcttgcctttaccctccaaactgtctttaatcattcctgggcttgagccaagctaactttgggagacgtttagtttatagtttaaatgatagtagcccttccccaaaactaaaccatctttataggttaggcagataagagaagcctgaattctgctaaagtgtagacataaatgattactagtcattattccagaagtcacaagatttacaactttcacaaatactcctgcagataacattactattgtagaacctaagattggccttttgagatgtcttttcagggttttgcatttttgacaaccagtggctccaygtggacctgccaacccatcctgtggcccctcccagaggcagactcagcacatatgcagaaggaccattttccacactcctatgattgcatccccagccaatcagcagcactccattccctggactgccaaactatccttgaaaaaccacagcctctgaattttcagggtgactgatttgagtaataaaaccccagtctcctgttcagctggctctgcatgaattaactctttctcttttgcaattcccctgtcttgataaatcggctgtatctgggcagcaggtaaaatgagcctgttggttggttacataaacttttcagccattactgctcaccttctcccttctcaggctgctcttcagccttgtggaactcctggcagtttcccaaaaatgccaggttgtttcaaatgcacccacagagtcttggctccttcagttctgagtagattcttttaaaccttccctccctattcacctgaagaaaggccaatattattcaaaattcagtttaagggtcatttcctccctgaaccctgttttagcttccacctcagcaccactcccccataaacccccacccctgactctgtcattgctcactctctggggtcttctggagttacctcccgcagcatagatggcatactttgcttccttcattgtttctccaagccatgatgatcatctgcatcaaatcccctgtttttgaaaaagttatttttttaattttaaaaatatttattatcatcttcgttatcatcatcatcacctactgatgaatcagtctatgggaactggacccagaatctgtgcttacaaaatatcctgggttgcaagttacactgcatgttcattttttgcaaaataccttgagctttataagatatgcatacttttctgtatgtatgttagttttaatacaaatttaaaaaggaaaaattccctaggttattcttacataacactgatgctggagaatcactgacttttctctctctactgaattgtaagccctttgagggcagtgaagccatctattttgtctttgtattcccagcatgctttagtgcctacaacatagtacacacaataaatgattattaaataaatgaataagacccaagggagtgcactggtttgtgggttcccttctccctcactctcttccaaacatttgttgcatgcccctcctggaggacatgacagctcacgcctcaaagttacacctcctacacacacccctgaataaacctgtgagatgccacctggcttcttccctaccatacgctgggtgtaactgatccaagcacccagcctgacaagggtaggagaaaggaagcaggtggaggacgttctgtcccagtaccagtacttttgccctgcctgggtctgagccacctggctcaggccttcctcagcaggcctgggaatccagctagaaaaaatatgtccttggagatattgcaatgctaaagcttctatttgcatctctgatgtaatttgcttcctaagccactcagctcaattatgtgggaatttgaaaatgatacatttgaatatttaggagtggctggtgatttttagcaaatttacagtagaaagtgagggggactctgtgtgaaatatcatctaagtcaggggtgtccaatcttttggcttccatgagccacactggaagaggaagaattgtcttgggccacacataaaatacactaacactaatgatagctaatgagctaaaaaaaaaaaagtcacaaaaataaatctcatgtttatgaatttgtgttgggccgtattcaaagccgtcctgagccgcatgcaggctgtgggccacaggctagacaagcttgatataagtcatttatccagtcacaaataattaccaagtgcctcctagggatagagtgatgaacaagtcatctgccttaaagatgcttacagtgaagtggggtaagatgggcaatcaaataataataatgtctttttctagcacttacaatgtgctggacactttacatatgttaaccttaaataatgagatttagagaacatgattaagtatgaagtttgagtgcaaagcttgaggatagccacctggaaacactaactccaaatgagtgggatcagtgctccaaagtggagaagttaagatttcacttatactggcagagatggagaagttccagcagaattacattttccatacaagaccaatgcatatgccacagcgatttgattggttgcagactgctgcattccaaggaagattattactctgtgaggagaggcagtgatccaagggattagtatctctggccctgctcggtcttcctaattatttacaaggaaaaaaggcaagcccaggcatggtggctcattcctataattccaatactttgggaggccaaggtgggaggatcgcttgagcccaggagttggaggctacagtaagctacgactgtgccactgcactccagcctgggtgaaggagtgagaccttgtcttaaaaaaaaaaaaaaaaaaagcagaagttgtagctgcatagccacatttctctcaagtctcacaaaaaagttccaatagcttgaagtttgaattaattttacgcatgtgttatgcatttcatcagtctaacaactcagtgatgtcctattattctcaagttacaaatgagggaacagatgcatggtatagttacaaaatgataaggagtcataaacagagtacaaggagtaggaagagggtatggcagggagacctaatgtagccctaagggtcagggaacatttctctaaatatgagaagttaaagaggagatctaaagttggagtctagtagacaaaagaggtcttagagaagagacttctctaaggcaatggaaacagcagaatgttgtttaaggaattgaaggcagcacagggagcccctgatgaggcaggagaggtagggaggggccagatcacctgggtttttttctctgtctttaaatagcataaggttagggaagctaagagagttgagatttggagtttagtcccacctttgctcttaataacctcagccatctgtctgcagctcagtttcctgatacgaaaaaagtatgcaagagtggatagaccagagtgctccagtggcccccatggttctcaagctctgattctaggtaaggctctgctggaaggaattgccagatgcaagccctagatgctgctgaatgcactgaagcccaggggcccagcaacccagtagccagccagcacctgccagactctgactcctctgtagattaattgcaaatcacggagaatatcacaaaataaatcacacaataaatacggctgtaagcatggtttgttcccctgtcgaaacaaagggtgaactgctaatcataatagcgtaataaggaaaactagctttctgagcatttactgtgtgccaggattgtaccaggtacttttagtagattttctcacaacagccccattatggataggaaagtgaggcctcaagagattgcataactttgggaaggtattcaccacccaaattagtcctgcatagtgagcatggacagtcccgtttcctattgctagaagtgttaccttgagcattaacgttatctgggtttgctcagtggctgagttggaatttgaacccagtgctaactccaaagctcgtagtgctggtcaccacgtgatgccgccttcccttcttagaagaggcaactccttactctataaataacatgacattgtcttttgaagtcctttctgggtgaggaaagtgctttttatagcatggaattgctcctgtttacttgatctctttcagcaccgattaatcctgcctacagttttgtccttcactgtccttacactgtattcctaggtttccyccctgcaaaagacaactccatgagaccacatggtgtttgagtgtgtgtgcgtgccagcaaagaaatttcactcccctccctccccaagtctgccaacttttctataaataattgttctccctcccctcaggcctctaagtagtttggtcacttaaccaaacgcacaggcacacacgcgcgcgcgcgtaagcacacactcacaaagcggggagggtaacgtgaatgaccttgcaaaggtatcttgctcactggggacaggattagcaaacctgacacctctgcaaataattrtcttcctcccgtattcctcctgaaacggttcgctcctttcgctgtctctcccagacccatctggttttcacatcgccatacaaagcccaacccgcccatctcctctctgcaagcccagagaacttgattccccatgttgaaactcgtcggtggcggtggcgggcaggactgggcatgctcagtggcggggaccagtctgggaggcgaggaagccgcgtttgaagtcgcgcggcctggggatcaggggaaggcgggcggcgggagccccggctgggggtgcgcggggatccccgattccgcgcccggggctggcgtgctccaggccggcgccgtggggccggcgcgcggggggcagggcgcggaggaggtgggggagtcggcaggaggaggggaggagcgccgggttcgccatccccaggcgccggctctgcggctgctgaatcggaagccgcagggaggatccggggaaataaagacgccggagaatgacctccagcgaggccgcctgagccggggcccgcgcacagccccgccagcccccggcatgggcgaccgcagcgggcagcaggagcgctcggtcccgcactctccaggggcccccgtgggcaccagcgccgccgctgtgaacgggctgctgcacaacggcttccatccgccgccagtccagccgccgcacgtctgcagccggggtccagtgggcggcagcgacgcggcgccccagcgcctcccgctcctgccggagctscagccgcagccactgctccctcagcatgactccccggccaagaaatgccggctgcggaggaggatggactcggggagaaagaacaggccgcgtaagtcccgctgggaggggagcgcgggcgcaaggcagacgcagcgtgcggggcccgggactgggagcggctgaggcaggcgccgcagcacgccccgtgcgcccccgcgtctgcggtcgagggactgcacagagtaggttcccgggactgattcttttcctaggggacatcaagcactacaggtctttgcctgagcctgccctttgctcgcttctatcagtagaacgaggattggacacgaagcttgagcgggtccctaggtcaaggatatataataagcgaacgctctgtccgcccttctaattggtggctgggaaaacgcaggtgtgtgaacatttgctggggtccaggagtgaggataaagtgggcggcacacygagggtgctctctcctttctcacccctctcgcttctctgagcgcgtcctactggggttgcctgccctttgaatcacagagtagccagcagcgtctcgggtctattggagagcgcaagtctggaggcgtggagtttaactaccccccaaaatcacagcctattagaagctgtttcttcacggccaatgagagggttttttgggagggacacacccactgataccatgtgggccggaactatgtggaccaatgaggattggaggtggattttttttttcaacgaagggggaggttgagttgagggtttgtaattgtaatgtacaccggagaaagccgaagtgcattatttcacaatctaaagcttgtatatataatggtagtttgtaaagtgtaccttccccacaggacgctgtgggatgtaaatttgtaggtcgagtttacagctggtttttcttgactgaagctcattcaactggttacttctttgtgggtgtctttaatgaagcttataaatggcaaaaagcaaagtaagtacagtaaatgctaataaatgactgcatttgcatagaggttatgctgttcgatatagggaaattgttaagtaggttttggatttctgtgaaagtttaatgtttggcaaataacaccttcacttttccctgtttctatgtctttttgactcttagcttttctgtattggattaaggtttctaagaccttggaaagccctttgacatgactgtgggtgactctggtacttgtattttgtgggtttgaaatgttaaatttgtaggttaagattttgtgtggaactttaaagccaaacagcagatttggctacagttgtaaggtgtaaggttgtaatctagcacctgaatttttatttgcttttgtttttgatacttgttagaaaatgactttcattagtattaatattttaaaagtcaggacttaatattgattacctgtgatttataaacctgtttcacttattttgaagctatacttcagttatttctcttatctacattgacagattgtactagagtttgcaatgaaaatagctaaaatataatgaaagggagcttctagcttaatcttctrtgtttaattgaggatataacacctcttgaaataacttctgaggaattgaaaatacaccctytaggaatatcttgaagacagagaaaaactaacctgagccttaacttgtgcttgcaaacccacagaaattattttaaaatacaagaaaatgtaactatctgcctgtgtgctttgtatcagaaattaaagtggtttatgtttcttacagaataaaaatcctagttgttttaagtttcatgaccacgattgttacttataatttttaaaaaacggttcgtcaaaattggatttacattatttaccatgttttcttctctcagatttgaacaatcatktctgaaataaattttacatgttcctaggagtcacatctggccttttcactaccaaaatttcttagttaaaaatggcttaacttaatatctttgtgccttgcctattgacattcacatatctttataaaaagaatattgtccaatcagttgatatttagttactctaagaggaattaggtactctaagaggaatatttaggtactctgtgagtatttacatactctaagcttattcctatttgctgatgactgacagattttacaggaacgatttttgcaaagagtagttgtgtgctttaaacgcaaactttagtgtgtgctggtggcgaagcatcaagctagacacataattatttcctcctggtcagttacaacagtttggcctctgtcccaacaagatgtgtgttaagatagccagtgttaacacttgtaaatgcacctggaatgcatgtgtggataggtgtgtttctattttgtagtattgtaggtaaaggacaatacacattaaaatacttcatgtttgaaaatgatggatggaataaaacagatcagtatttttagattatttaacaaattttaatctgacctctcagtgccgagactattcaccatcctacaatctaaaagtcagaccagtggcaggttaattttgctaaaccaggaaaggagaatgttgtccactcttttcatctaaagtgccatcacctcactctacttattcttggaaggcttttcttagactatctacttactatcaggtttccttaggtactttacccacctctgctacttagcagcagtgtgatcttaaccaagttaccaagtcacatcttgaactgctggagctaggctaggtgatctccaagtgctgtttcctgtaccttcagaattctatgacacttcagagctgacagttcttcctactagatgatactagttatctgctgtgccactgatttaacatttaattgtgaatggacttttttgccttgtgctgatttttttttattttatttatttatttatttatttatttatttatttattttgagacggattctcgctctgtcgccgaggctggagtgcagtggcacgatcttggctcactgcaagctccgcctcctggcttcacgccattctcctgcctcagcctcccaagtagctgggactacaggcgcccaccaccacgcccagctaattttttgtatgtgagtatcatctgaagggctcaagggcatgtgctaccttatgtgtggcaacaggcaggaataatgagtagatgcatgcagtcagccttctggtcggaggttctgacttctcaaatcatccagatagcagaaaatgagtgagagttcattatgcaggtagcatactggtgggtacagactgaaaaaccccaaatctgttaccagttttagccatcattgtgaaagtataaggctttaatttcctaaatattgggatgtttagctttggaacttggactttacattacccttgaattgggctaattagaaaaaccagtataaaaaagataaataaggaaaattttctggttgtatctgcatagagtatggatgcatacagtatttttaacaattaattttaacataatcaatacttctacatggataagagacattgcaagttcaaaaacaaaagactaaaagggaaagcaggagcacactctagtattgctaccttctagagtgtggtcaaattcccaagtttgtcaattaagctatgaattgtacaatacacatttgaattgatgattaataatttaaggcccaagtgtccagtgtccaactggttaaggatcaggattctattaagcatacaaacactgcttttcctccaaaagaccagtaagtgagtttcaacattaatataatacaaagcatattttatttggcatggtgaccaaagacaggaacagtgttgttggttcttgatatgtgagacatttaacaagtgactaaaaacctttcatggttttggagacagaataagtaggggaaacaaataagtattggttttaactgacaggctgttttgtstgtgtgggatagcctgcattttaatattttgtgtgtatatatgttaagtatgagccaattatcatgaaaattaatcagggcttgacttctaatrtatttaactacatatgctttaggtttaataggtaagccagtattcatcttgggaccttgggatgacaagtatttagtgtatccactgtggcatacagaatttctaagtagaccttttctctagatagtgcagctgtcaagcttggtatctctttacttaatttatgacaccttttaaatgcctagagttgttgggtaatcgtgtgtgtgtttgkgtgtgtgtgtgtgtgtgtgtgtattctctccttgagagtacatttgagagtagtagatgattcaaaggggcaaagaaatattatttaaagagaattacatcaaaacaatgacctgaacctctaacagatttctctgttgttaggaaagaaggtggaaaaagtcatgacagtagcttcgatttacccagtaatgaaagtagctattattgagtgacatctctgtgtccattgttctgtatgtgcttttacaaaagcatgcagttcccactcctactctctattttaaagatgggcaaagagaggctcaaagaagtaaagcaacctgtccaaagacctgttatcagtgaatgacagggccaaaattgtaacccaagtctatcttccttgccaactggctttgttttctatcacaataagcctattatttatgttgggaaaaraaagtgtgttctgtaaaactttcggaaaagataggtccatgtaatctgtacacctttggcaaaatgctcatccatgtgtctgtggaggtaacagtggccaacattgaggagcacttactatgtgctaggcactaagttagacacatggattctctcatcaaatactcccagcagcctgtgagataggggctgtcattctcttccttttacaaatgaggaaactgagggctcaggactcagggtaaaactatttaagattttgactttgctgggcagggccctagtgggttccatgaagcaagtgtgggtagggttctgtggtgtaaagagctttgttgccaccaggcctggattcaggtccgcatttcctacttactagcaatgaagccttaggtgagattcttaacttcctcaaggctcactgttgaatagagataatggtggccatcttatcagttgtagtaagaacccaatgtggaaaatgtatatcaagtatagtaccatgcctggaccctagtacatgcatagtaaaagatatcttactatttaccacggtttgaatgtgtcccccagaactcatgtgttggaaatgtaatctccaatgcaacagtgttagaaggtggggcttaatgggggatgtttaggtcatgagggcttcaccctcatgtatgggttaatgccaattgtaaaaggacttgaggctgcaagttcaatctcttgccctttctcaagcatgctcttttgcctttctgccatgggatgatgcagcaagaaggccttcaccagatgcagtccctcgatcttggacttctcagcctccagaactgtaagccaaataaatttctgttcattattaattacccagtcacaggtattctattatagcaacacaaactggacaaagacagaaaactggtactgagaaatggggctgttgctataacaaatacctgaaaatgtgaaagcggttttggaactgggtaacaggtagaggctggaagaatgtggggaagcaggctatgaaaagcctatgttgctatgaaaagcctatgttgctatgaacagagcattaaatgtggttctggtgaaggctgagaagaggaggagagctgtagtaaaagtctaaatctccttagagattacttatgtgatggtgatgagaatgttggtagaaataagagcaataaaggcaattctgatgagatctcagatggaaaagaggaataaggtattggaaagtggagtaaggaccagccttgttatgaagtggcaaggaatttggctgaattgtgtctacaccctaggctttatggaaggcagaatgtaagagcaataaactacgatatttgatggaagaaatttctaagcaaaatattaactgcatacaggaaaataagagagaaatgacttaaagataaaatttataattaaaaaggaaacagaatttagggatttgaaggattctcatcctggccatgtggtagagaatgaaagaacattttcaggagagaagaccaagggtgtgggcaagcaaccagttgataaggagatcagtagggatagaaggaagccagaggctgttcattaggacaatggaagaatgactctgaaggcattttggaaattactggtgctgtccctcccatcacaggcacagggtgccatgacctcggagaaggaaatacagtcatgccccacatatagaccttttcaccaaggaaggagcacatatacaaaggtagtcctataagattataatggaactgaaaaattcttattgcccagtggtatcataaccattgaacatcataactcaatgtgttgctcatctgtttttgatgatgatggtataaacctactggctgctagtcatataaaaatatagcacacacaattatgtataatacataataccttctagtgggacaagatgtgggtgtggaagaccgtgatattgatgaccctgactttgtgtagacctaggttaatgtgtgtgtttgcatctttgtttttaacaaataagtttaaaaagtaaaaaaaaaactaaaaaattttaaaaatagaaaaaagcttgtagaatgagaatataaagaaaatatttttgtacacctatacaatatgtttgtgttttaagccaagtgttattacaagagtcaaaaaatttttaaaattagaaagtttataaagtaaaactgttatagtaagctaagtataattgattactgaagaaataaatttctttttataaatttagagtagcctaagtgaacaatgtttgtaaagtctacagtgtgtacagtgatgtcctaggccttcacatttactcaccactcactcacccagagcaactgtcagtcctggaagctcttgtatgtgccctatacaggtatgccacgttttgtcttttagactgtacttttactgtaccttttctatgtttaggtatgtttagatacacaaatactaaccattgttacaattgcctatagtactaagcacagtaacatgctgtacaggtttacagcttaggaacaatagggtttaccatatagcctaggtctgtagtaggctatagcgtctagggttgtgtaagtacactctatgctgtttgcacaatgacagaattgcctaatgacacttcttttctctgaaaatacccgtcattaagtgacgtatgactgtatatcaaaagagagaactagtgtgccctctggatcttggagttcacttctcagggctgcctgaagtctctgcttgccacatttcattacagtgcttcttgctcaccccacctgtggctcaacggtgctcaggtgggccgggtgcggtggctgacgcctgtaatcccagcactttgggaggccgaggctggtggatcagaaggtcaggagatcgagaccatcctggctaacacggtggaaccccgtctctactaaaaatacaaaatagccaggcgtggtggcgggcgcctgtagtcccaggtactcgggaggctgaggcaggagaatggcatgaacccgggaggcggagcttgcagtgagtcgagatcgcgccactgcactgtagcctgggcgacagggagagactctgtctcaaaaaaaaaaaagaggggtgctctggtgtggctcaggccacagctttggaatgtgcaagcagcaaatcttggtggcatccatgtggtgttaagtctacagacatgcagagtacacgacttgtggaggcaggctgggtgcggtggctcatgcctgtaatcccagcactttgggaggccaaggcaggcggatcacgaggtcaggagatcgagaccatcctggctaacactgtgaaacaccgtctctactaaaaatacaaaaaattagccaggcatggtggcatgcgcctgtagtcccagctactcgggaggctgaggcagcagaatcgcttgaacccacgaggtggaggttgcagtgagccaagatcgcaccactgcactccagcctgggtgacagagtaagactccatctcaaaaaataataatatgaggcaggagaatggcgtgcaccccggggggccgagcctgcagtgagctgagatcgcgccactgcaagccaacctgcrctccaactccatctcaaaaaaaataaaaattaataataataataataataataataataataactgtggatgcatggctttctccagctagattccaaagaatgtcatagacagcctgatggcccaggcagacacgtgttgcaagggtggagcaacccagagggcccttactagggcagtgtgtggcataactttagggtaggagctaccgcagagagtctcctagagcaatgcctagtaaagcctaaggagtgggctcacaccaacaccccagaactctagacctaccagcatgaaatactagccaggagagccacaggcacctgacaccaacctgtgagagctgctgcatgggtagcaccaaacaaagctgtaggggtaggcctgcctacctgaggccttgggsgcccaactgctgctccagtgttcccagatggtaggatgtggagtcaaggaagattactctggagccttaagatttagtgttgtttgccctgttgggttttggattgacttaagactatccctttcttcttgcctatttgtgtcttttggaatgggaatgtctatcctttgcctattccaccattgtattttggaagtaagtaacttgtttgatttcacaggcttacagctagagggaagtgtccctcaagatgaatcctgccttgaatctcatccatatctgattcagatgagactgtgtacrttgaacttctgagctgatgctggaaagttatgacttttggggctattgcatgacatgaatgtgtcttttatgtgagaagaacatgaatttggggagccagggtggaatgctgtggtttaaatgtgtcccccagaaagcacgtgttgaaaatccccagtgtaacagtgttgggagatgaggcctaatgggaggcatttaggtcatgagggcaccatccccatgaatgattaatgccattataaaagggtttgaggctgtgagttcactcttttgctctcttgtgcacacatgctcttttgcccttttatgcttctatcatgggatgatgcagcaggaaggtccttgccatatgcagccccccaatcttggccttactagcctctagaattgtgagcccgataaatttctrttcattacaaattacccagtctgaagtgttctgttatagcagcacaaaatggactaagacactattaataccagtcttatttatattaatagaggacattttatctctctctctctctttatatatatatatatttgctaaatgatcaaccatgtagacatttaatattaatatcattgctgttatttaattacagaggcttccaagactctgaaataccaggatttccacaaactcatcttgccctgactgggaatctttcggagattggatttcagagtattccccaacctgatcggatatcacctcctcaatggaagcttccctaataccctctgatgtttctagaagcaggacacrtggcttgtgtcataagtcttgacctgattatcatagattgcctcaccaagtttagcataccctgtctgagagtgatgctggcaaattagtgaataagaggactgtggaatttatttgattgctaatcttgtgtcaggacatggttattttttaaaaaagaagtgtcctcttttgatcttaactgtttgatatctcagcccttgagtgaggcagttatatgcaaaggagatgagaaggatgagaaaagtgagtacttttccttyataaaagccacatgaattgaacaagacttcagaattcagaagaactacatcaagttcttgggtcatttttttaacccattctccaagaattgaaaaaatgaccttgcaaatatgtgcaagactctggaatcttcctttggcagatgatgaatgagatgaatatttccaggtgcttgccttcagcaccagcacatgtacattctagtactcttggccttgatcctacactgaatctgagggtgcaaggactttagatagaggctcaggacagactggacctgtatgaacytctgaattgtagctagcctgggcagccmgttacttggatccctctggggcttctggacaaacaactcttttatagcccaaggtagatggtcaggggcgaccagagagagcaatagattcgttgacttcaagcttaacatgagttagcagtatggtgaggcttccagcaaaatgtaagcactcaataaatgttagctattattactgtggtggtgttagatgttcttccttatactaactcaaaatctgtctccctataacttctaccccatggtccttgacaattcagtatatctaattcatcttctacataacagctcacgaggtatttaaagatagctatcttatcttgactctttttttgggttctcctctttgaagaaccaagaccaatattcttgcctgccagattctacccatgtgacccagtgcaggttgtattgggttgctgacaagtatttaagcaagattggaggatgacttcttggggtagtcataaaggagatcaagtaagtattgacctgggttgccttgaactctgagatttaatgattcccattaaacctacagggactaaccagtttttaatttatttgggctaggcactgtgctagactctgcatgtgatatttggtttcatgtgactttaagctagagtgtaacctgaagccagctgtgtggcttgatttcttcactcagatgctgtaatagctccagaaatcactaaaccctgtgtgtgagtcagtacttgaacattagtggaacctgtttactattcatactctcccaactacctatgtttgatttaaaaaaaaaattaaagggmtgttaatgtttttagggtgttccatactaggaagttagtgtacatttgactaaggagataatcagatcttcttaccttttatggaaggtcttatccttttttgtggaaggtttttactttgagaaagggtcccaaagtgatttattctttggggtgatcatgtaatatttcattaacacttttaaagagtggtaggggtaccattaattatgctaggaccacagatataggctgggattatcctagcaaaccaggcatctcagcgttgtgctaaagccaacttatacaggctatgggtgttgtttatacacatgacttcccaactctgcatttcagtatccttatgctgataacttgaaactggccatcatggatatatatatatatacaccgtggaaactggcaaacactgaaaatcagggctttattttcagagaaccagttgttaaacatttaccagtacacagtgactgggacacagttcacagaagaagctcagagaaaagtcccagcrggtatcagtaatactaattgaattattgatgcatttgaggtagagaaggggagtaaaggtcaacatgtcctttgctaagtaggacaatgtctgaagatgagaagtttgatgagggaggcttattctcaggaaagaaagtattctacaaatacttcaggggtcactgtggttggtatgagggtagaatttctttggaatcacatcgttattttcctcccttcctscctcctaaattcctactgtaaatgtagttgggcttagtgctggattacccagcaggtagaccaagcaggtgttaacaattccatcaatgctagcagaagaaaataatacatgtgcttttatgtgtatggatatgtagacatgcatgcacttaagtattaatcatgggaaaattataaatttggacttacacttatttcataattcattattgtttttgttttttaatgacttcagttattttgagttatttgttcattgtggattgaggaacaccaaattttttttttcttaaatagatataaacctggccttagttgaggcttgtacctttctagggtgatttataatttatttattgctgctgaaatgtcagggtggagttgccagaatattttcattatatgtttatggttaggataagtagactgaagtttgtcctagctaaagggaaaacagtttgatatatttggttccataagcaggatctgtgtggcaaaaaagggacttcccaaattcagactcatggtttttattccaaaagtcactgtgttccacttgtcctcttattgtcctgagtgagcgttttggaaagtgttgggattttaacaactttttctgcattttaaacattatacaaaactagagaatatagcataatgaactgccaagtacttatcactcagcttctataattatcaaatcatgtccaattttataatattgaagcagacctcagaaatcatatgtttagtattaaatgtttttgtctttatttccaaaagaaaagaacccttttaaaaaaaaaaaaaacacacacacacacacacacaatctgttatttgctgtaaaagttagcagtgtattatatccagttgagactattgtgttttatgatgcacaattagataaattcagttatctaaccacaattaaaattgttacatctcatttgtaggtggataattgaaaacctgatttgtgttgcccctggagaatcctttcatttgcccatacctgttattgtttgtttatgattaattttttaccatttcttcatggtctgagatttgaaacctcattcttgaaatagtcctgtgccaaaaagctgctttggaatcacccagtatcactggactaagagtgattagtatctcctacataatttttgtctggaaatatagattaagaactaaagaacagtattaaaagaattccacccctctcctttcctctgaagtcatttggatggtgccagtgggagcaggcaagctagctctcctgaagacaattagggtataggactggcctcaggcctagaaatctggagttgctggattcaggattgaaccaagggtttaaagaaggggtgttgctaaaatttgtaatttcaggcaatctttagacctaggactctgtattttaatttagccacaagaggaaagaaaaagatcctgaatccgtatcactcaatttattaacattcctgggatcaaactagttaaacatcagtgaatttctgtctgtgtaaactgccagaactggtttacttttgtcagctttatgaaaatgtgcttcagattcattttatacatcgttgccttctttgacaagggagtctcatttaacatattctaataatttagggacatcattaatatcaacttttatactgggttgtaatacaggaaagtcttaggtaatggtgtacargcatttgggtttgttcattcatggatatgtgttgtgtaacagctatatacagcatgtaaaaaaaaatgtttgtttagagatgcagttttgctgtgttccccargctaatctccaactcttgggctcaagcaaacctcctgcctcagcttcctgagtagttgagactacagggatgcgccagcctatccagcttgggtgtaacttttagagggtccaaatgtttaattcaaaaatcttaatttttttttaactatttaaaagctataatttacaaagcacattagaggccgggcgcagtggctcaggcctgtaattccagcacttcggaaggccgaggcgggcggatcacgaggtcaggagatcgagaccatcctggctaacacagtgaaactcagtctctactaaaaatacaaaaaattagccgggygaggtgacgggtgcctgtagtctcagctactcgggaggctgaggcaggagaaaggtgtgaacccgggaggcagagcttgcagtacaccaagatcgcgccgctgcactccagcctgggtgacagagcgagactccgtctcaaaaaaaaaaacaaaaaaactgcacatgagagatcacctaatgtttgagggagttctctgagcctcagttttgtaatctgtaaaatgggaataataatagtgccaacttcattgggttatgagaactgaattaaataatgcatggaaagctgctagcacagcgcctgacacatagtatgtcctaaatgttaattgatataatgttgctgctgctgctggattaactcatttttcacagtcgttggaataaacttcttctgaattcttataaataaactatttattggcaagtttgtagctctaaagtcttaacgtttggccggtatatatctgtccacatcagattgcataagataatatataccacttcagcacacgtgtaccacactcaattaaattttagtcaaggcttagacatattttcttggcaaaccctctcaccctcaccctggcttaggtcagttacataacaagtaaatgggtaacctgtcaagtcctggtaatgctgtcttagagttttagcactaatyaaaaggtttggatgttttttgtttgatttttatatgtgttgcaagcaaagtgagttgttaggtatttttagtattcagcaagaagctgaaacattttcagtaaatcttttcaaactactgaatcagttttgattcaggaaatccctgagtttgcaagggaagctgttcaaaagaacagttatgatttgcagctgctgtctctgaatcaaacttttcttcaaattgtgtaatccaaataaagtacagaaataaatgggtgaagttcgtgaagctgcagctatcatccgtaagggacagtttccagcctttatgttgaacaagcatcactgttctcattaattaactttacattagatgtgatgtgatttgtaaaatgagacagtgcaaataagacgtcacttttatctctttcatatctgggattcagaattaagatggaayttttaaaagttccaatgctaaagaatttgaaaaaatctcactcttcatggtgtggaagaacactatgcccccaaactaaatgatcccaggcgaataaaatattttgaatgttcatatttatattttataaagttttaatcccttttctcagtcagatattacatctagctgtgcctttgataaaaattattatagtaaaaaaaaattcacttgtaactacaatgcctgtcacttctaactacaatgcctataacctcaggggatgccagtgataaccccgaaggcagctgagcactggaaggaagcaaacacttctgagcaatcaaaatcagtgttgggaagtagataaagtcagaggtgctcatgcatcttacacttgagagtacttcctgtgatctccctcagaatctatgtactcttcttttttaattttattttttaaattgacaaataataactatacatgcagttttaacagacttgctttcctggtttctctgcattcggacacagcaggttctggatagatatattgcagtaacactgacagcagtgagaaattaacagctttagcccaaaagcaagacatagaaaactataatagagacaaaagaagattcaaaccatagcagcctgggaagcgcatgtttacatgattcctgaggacatcaatgtacagtgagcacaataattgattstcatttgactgtgaatcatcaagaagacctcaaatttcattcagtctgttttgtttaagagtatggagaagtgggttgtgcattttagaaagattatctttaagaactggtataattggcatttatgttttaaaaatgtatcttgaaatgagaaaattaagatataattcacattcaccatgtatttcatccatttagagtatgcaattctatggtttttagtgtattcatagagttgtacaactatcacaattaactttataatattttatcccctcccagaaaattattagcagtcactcctctttttcccccacaatccccaaccctaggcaactaatctattttctgtctctagagttttgcttattctggacatttcaaatgagtgaaatcatatcatacgtgatcttttctgattggcggctttacttagcatagtgttttcaggattcatccatgttgtagtatgtattagtattttgtccttttttgtggccagataatattttattgggtggatttatcacattatttatccatgttcatcagttgattaacatttgggtcgtttctactttttggctattgtgaataatgcagctataaacattcatgtaaggtttttgtgtggacatgagttttcacttctcttgggtatatacacctagtactagaattgctagatcatatagtaactctttgtttaacctcttgcagaactgccagttttccaaagtgactgtactatttagcatttccactagtggtgtgaggtttcctatttctccacttcctcataatacttgttttcaattttttaaaacttgtaaccatcttagtgggttttaagtcgtatctcattgtggttttgatgtgcatttccctaatagccaatgatgttgagcatcttttcatttgcctgttatgggccagagctcttatatcctccaacactaatatcttattattttaaaacttgtataagttttagtctcatatctagtgaaattataagtttctttgatggctagggaatgtcagacttgactttgtgatagttactatgcttaggagggtgccctacatagagctaccattagtaaatattaaaggattgttttaattaagtcatgtctgattttaggacaatgtggatttcactcacagcagagttttcactccttcccagactgctcttaattactgaccagtttttgtgtactagaatttaagtgccaagggggctggctcattgccgcatcctgactgtttagcagagtgcctcacaccgtctaggaacaaaataaatacctgttcaatcagtgaatgaataagcctgtacgattttccttcagtatccattgtattggttccaggacccccatgggtaccaaaatcctcagttgcccaagtccctgtataaaatggcgtagtatttgcatgtaatctacgcatatcatcccatatactttaaatcatctctagatgatttaatacctaatacaatacctacacatcactttattcacatggattctttatagcaccagcacgtggcaaatttaagttttgctttttggaacttcgtggaatttttttttttttttcaaatattttcagtctgcagttggttcaatccgtgattggaaccacagatatgaaggagtgactgtagttggtctcagattatttaaagcaagtgtttatttcagcttgtgttgccatgtgagcagttggcatacctttcctcagtcctctgccccccagctcaacttcaaagatttgccagactttcatagttaagaaayaaatgaacaaggcccatttctggtagacctgttgttccgcctggttatgtcacccagcaatgctgttctccctgaagcctctttaattaaccatgctctggtattaaattgataacagtatccttagagtatgcaagcacgctctggtgacttgtcaagacagaaagctaaacctcttggtggtttaaatggggatttgtttaagcaggtaataagattaccatcttgagccttagtgccgggcattagaaggttgaaggagccattcctgggtggatgctgtgctcagctctggttgctgaaatgatcacattggagacagccacacagatgcgtggtggtcatgtcccttggcacacctgcatggtcaaaactgtggactcttcttttttgtccagggactacttctgatgaagaaagtggcataattaaagctgaggacctcacgcctgtaatcccgccactttgggaggctgaggcgggtggatcacgaggtcaggagatcgagaccatcctggctaacacggtgaaaccccgtctttactaaaaatacaaaatattagccaggcatggtagtgggtgcctgtagtcccagctacttgggaggctgaagcaagagaatggcattaacctgggaggcggagcttgcagtgagccgagatcacgcagctgcactccagcctgggcgacagagcaagactccgtctcaaaaaaaaaaaaaaaaaaatgctgaggaccacacagaaagttgatacttatactcatcttctattgcctctagattgggcagaactgacagcttcttggtgagaaataggagtgatgaccatagctgtctgtaagtgtattttcctcccacctcctctgcacagcgtgagaacttaactgtggaatgggaaacaaatttcatctgcctaccatttcctytccttaacccctgaagcagaaatacacagcttgactgtaggcatgaaggggagaaggtgagctcactggtccctagagtgacgctcatctttctctctgattttcttgtaagggtgacatggagaggtttcaggaccttgggaaagaaaccactctcactgagctactcagggacttaacgaaaagactgaaggaaaaaaaattttattaacctcatggatttgacatttttgggtctcctcatctctagcttcatcttattcctgcttcctcctggcccagatccaagctaagaatacacttcatggtgctaccagaatgacatggcttcctttgcccctgcaagagcttttttttttctttttttttatcttaacctacaaaataaaataaaagcaacagagctttcatgttggtgtttctatttgttgttctaatttcacatggttgtctgtgtcaaggtcagccgcgtgggttgcaaatcaaagaatgtctgtctgcgtgacctaaatacatgagtactgttgctagagctaacctctttatggaggaatgyatgcttacttttaagatggcagtcagggggagagaggagcccatctagggaatttaattatatgtggaatgtttctaaaccacagccatggggtttagtcatggctggataatacctagtacttcaaaagctgyatttaaaatttgaaaatcacctattacactcatgttataaattgccaataaataatttcattaacaagcaattagatgtgtctgggaatggsaacacctgccagttggtggctgtgcattgccctcagctgtctgcctcagagttctstgctcagtttcaagcaagagccactcctacaaactccagtttctcacttttaaaacatagtccaagctggccgtggtggctcatgcctgtaattccagcactttgggaggctgaggaggagaatctcttgagcccaggagttcaaggccagcctgggcaacatggctaaaccccatctctaccaaaaaatgtaaaaattagccagaagtggtagagtgcacacttatagtcctagctactcaggatactgaggtgggaggatcacttgagcctgggaagttgaggctgcagtgagctgtgatgacaccactacactccagcctgggcaacagtgaggccccatctcaagaaaacaaagaaatgtagtccagctacttacagtattcattttgattcaactagaatagtagttctgaacttgactagtgagaattacagggaccccttgttgaaaacattttctgggacgtgactcctatcccactgaatcagaatctctaggtgatgtcctgggagtctgtatttttaacaagtgccttaggtgatttttatgattaggcaaatttgagaaaccatgttgttaaatgtggccagtcactaaaaaaaataaatataactaaaactttgactttaaaatttagttgcactaaatagtaaaatttaagttgctttatggaaatgtgattgtaaacaagtcacagagaccaggttcacattgcaaatgcaaagtggatggtggtatggtatcatgtcagttttaacctgaagatgggtgtagagcaaaatgtagaggataccttttatgggcctaggtacttttgccttcatgggcccccttcctccataaaaaataaataaaagttatattttattattgttggtgtaaagatgaatgtattaatattatatagtaaattgtattttccttaacctaaatgttcatatattttcttctgattttaaaataaattattttcatgggtgcctaaaagtatggcaggtcctagccactgtgcctcttgcacctaacagatgggttaaccccgagcagcagaggtgatgaaattcagacttgagtctctatgtgactccggtgataatacttctacatgcctcagaagttctgaaaggaattcttgctgttctctttttccctctcaaatattagaatatgatcagcccgtgtctgggcgagaggagaaagctgataggaatctggggctgtgccagtggaagaaagattattgtcacacaaggttgtgacagtacactgtcccacagcgattccatcccacaaacatacatgtgtcctcttcagcgtattttcaattgctaagtttaacatacagtttttgccctggccgtggtgcaggtgagtgaatcagcctcttcccaccctgagggaacccttgtggtatcaagcgtctaacaggctgaataactttgctcttgggagttgggcttactcctgccattcttgatggcttgcgttcagtggattttgataattggtttgatatgggcaggctgttgcatgagaagagaaggaactgttgttgagttagggaatgaaagcatattattttctatgggcaggaccrcagacctgctatctgttcactgaagcaaagttaaaataatttcattttcttttgcatcattacagagaagtttttaagaatttaaaaatagctctgattatgaagttcaagtgtgttgattatttaaaaaaaaaaaaattgggccaggcacggtggctcatgcctgtaatccagcattttgggaggccaggatgggagaatcgcgaggtcagaagatcgagaccatcctggctaacatggtgaaacctcgtctccactaaaaatacaaaaaaaaattagccaggcatggtggtgggtgcctgtagtcccagckactcgggaggctaaggcaggagaatggcgttaacccaggaggcggagcttgcagtgagccgagattgcgccactgcactccagcctgggccacagagcaagtctgcatctcaaaaacaaaaacaaaacaaaacaaaaaaataagaaaagtgtcagaaaagccagaggaagaaaaaaacatcaccccaatccatgatccagctattaacattttggcctaaagtttctagttttgtgtgtgtgtgtccaaatrgccatttaatttttagacaaaattataaccgcctgaaatgtaccatttaatccctgcccttttcacctaacgatagataatgaacatttgtctcacatcattaaatgatgtcctacaaagtgattttaatggttaaattaaatcactttgtgttaatgaataattatttgattatttgtttaattagccctctgttgttgtacaataaattagttttcttattataaatacaacttcaatgttttaagttttttttttttttggaatggagtctcgctctgtcacccaggctagattgcagtggcacgacctcagctcactgcaagctccgcctcccaggttcacaccattctcctgcctcagcctcctgagtagctgggattacaggcrccagccaccatgcccggcaaatgttttttgtatttttagtagagacggggtttcaccatgttggccaggctggtctcaatctcctgacctcgtgatccgcccacctcggcctcctaaagtgctgggattacaggcatgagcaaccacgtctggcctattttaagtatttttttaaagctaaatttttggatgcacacataatttcttttagggtaaaatagaaccaacatatcaaagggtataggaatctggagctttttaatatgtatttccaaataaacccatagaaagattataccagtttacattcccagtggtagcatatgagcttgtacccttgccaacactgggtaattaccttataactaaaattcaaactaaggaaatctggtacacattaatttgaaagaacccatgactcaaatttcttttcatagagtaatgttcaacagattgctctgtgtgtgataattatgggtttctttacagtattagggaaacacttttattaaattttatattcactactttcttcaaggtccttaaatagtcattaagttttcaactgtgtttcatgctattaaaagtatggttttggaggtcttygcatatgattatttaggatgatagaatgtgagaactagacagaactttagtgataggttaatctacctccatttaaagactagtaaatgggccagatgcagcggctcatgcctgtaatcccagcactttgggaggccaaggcaggtggatcacttgaggtcaggagttcaagaccagtctggccaacatggcaaaatcccgtctctactaaaactacaaaaattagcaaggcgtggtgacacacccctgtaatcccagctactcaggaggctgagacaggagaattgcttgaatacaggaggttgaggttgcagtgagccgagattgtgccactgcactctagcctgagcagcagagtgaggctccatccccctaaaagtaaaaataaagacaagtaaatagctcaagtaagaaacttgcccacacaaattctgactgttgggacattctcggttgtaagcaacagacacctcacctcagaccagcctaccaaaatggggatttattggttcatgaaactgaaaatgggctcagatacctattgtgactaaccttggacaattccttgatctttctaagtcttggttttcttatttgtaaacaggatgttagactcaacctaacgttccttccacctcttaacattaaatgtttctgtgaatatattatcaaataattttgttatactatcaaccaaatttgtacattgtgaaaggaaggttagttctcagagacaggaaatttttaaagagataattcattacacaattggatttaacaaggattttttttttttttatgagacagagtttgtgctcttattgcccaggctggagtgcaatggcacgatctcggctcactgcaacctccacctcccgggttcaagcaattctcctgcctcagcctcctgtgtagctaggattacaggcatgtgccacmacaccaggctaattttgtatttttagtagagacagggtttctcagtgttggtcaggttggtctcgaacttctgacctcagatgatccacccatctcagcctcccaaagtgctgggattacaggygtgaaccamcgcacccggccttaacaaggaattttttaaaacttgtggacgtccttaggcaacttgaacataattaatattcatttggtgtaaaatatctttgaagtgtatcggggaaaccagccccaatatttcaaygtaagttcttttctgttttccctaagtgttggccggtctgagaaataaagagaaagagtacaaagagacaaattttacagctgggcctctggcagtgacatcacatattggcaggttctgtgatgccccctgagctacaaaaccagcaagtttttattaggggtttcaaaaggggaagggggtacgaacagggagtaattcacaaagatcacatgcttgaaagggcaataaaagatcacaagggcagagaggcaaagcaagatcacaaggccagggcgaaattagaattactgatgaggttccatgtcctgctgggcatgcattgtcattggtaaacatcttaacaggaaatagggttcgagagcagacaacaggtctgactagaattcgccaggctggaatttcctaatcctagcaagcctgagggcgctgcaggagaccacggtgtatttcatcccttatcttcaactgcataaggcagacactcccagagcggccattttagagacctccccctgggaatgcattcctttcccagggttattccttgctgggaaaataattcagtgatatttctcctatttgctttctgcaagaagagaaatatgactctgttctgcccagccctgcaggcagtttggccttacggttatctcccttgttccctgaaaatcgctgttatcctgttcctttttaggatgtccagatttcatattgttcaaacacacatgttttataaacaatttgtgcagttaacgcaatcaacacagggtcctgaggggatatacatcctcagtttacgaagatgacgagattaagagattaaagacgcataggaaattataagagtattgattggggaagtgataaatgtccatgaaatcttcacaatttatgttcagagattgcagtaaagacaagcataagaaattataaaagtactaatttgaggaactaataaatgtccatgaaatcttcccaatttatgttcttctgctgcagggtccctccattcagggtccctgacttcccgcaacagaagtgtttaaagctttttttctgttgctcacatgatctttaaacattttcccccttgttgatttgcttaacaartctttacaaatattggaaaaagaaatttcagtcctgctgcaccctattcatagtaattacacctaactccaacttggtagaaccttgagagaattgttactctccatggcagcaactggctgctgagtcagatccatgcccacagaagctcatcttgagcccttgggtgcctgatttacattcaggaagacattggcattagggaatctcaccaggaacactcgccaggaacacttgtgcctcaccaggaacacttcttaaggctctgcagctggttatagagaaactcagattttacatttagtttatactgtgaaatcaagaggaggttgattttctcatgccatgctcccttagctttttaaaattgtttcctcgattgatagaaaatcttttcagtttttttcacctcatgtctttgctcatttaggctatttggagttcactgtgtatacttgatagctactgcaggaagcctaaatgacccccagagagtattctagaattctgaaaaagccttcaagaaataggctttgtttaaaacatcaactgccaataaagttttaaaatgtttttgccacaatatttgaaatgcagatttatttcagttttaactactaccagatagacaatcttggtttgtattttaagaaatttttagacagaaataaatataacaggacctatatacctttttaacactcagctaccacatgtttgtctgtgatcatgacagttcctatatatagttctgctagagagggaatttttccagctttaaaaaccgygaaggattttgatttargggtatattagtcagcataggcaaggttattctgtagtaacaaataaccctcaaatctctctggcttaaaacaacaaaagtttatttcttacarcacaagttcattgaaaggtggctggaagctccattctgattcatctttactttgagacccaggtgatagaacaattgtcttaatttttgctggttaaggtaacagaaagaatctggaagggtctcacactagccaagtattctcattctaggcaagtattcttgcctgaaagtgacgtacaccatttccattcacaacttaccagccaggttaggaacattgcccagctcaagtataaaatggccaagagttgcattctgaccccatgggcctggaagaaagagaccagaaatatttggccagctgcactagtgacacaggttgctcttctggttaccggatatttgtctcactctccctcttacaggcaaaatacattcattccttccccaaaggagactgccccaaagtctcacccagcacagtatctggatgatgcctaatttaggctgttactcaggtgatgatataaagtcatttctacatcaactctggatgtggttcctcttgatctagagacttctgaactaaaagtggcaagttatctgctcttcatcaccacccccccacacaytgtatattagtatataatggtgaaacaaagattggaaaacttaatctatactcccattcagaaagggggtgaatgggagatacccagcagtcactggtgctcagtcattctaaaatgctgaagcaattctgaaatccctctgggccccctgccttgtaggtggagaagggtcctttagggtcctgattcttctccctggaagagccttcccagtccattgttctcttcagcccttggctccaccccttgagagatatcttttatttcctagtagactctctgattgcatctaaagtgaacactgagaatatgcctgcgttggagcctgaacagccttctcagctgcttcctgactttagagagttgagggctcyagaggttttttaggtcttgaacagttttcccagctgttttaggtgtgagattgcagtttctttggcagtacaattatttttcaaaagaaaatcggtttctcatctattttattccaatttatttccatataccaagaattaagccctcaattccttctaggcatacttgtatttgcttattcctttgtatttgtgcttccatgcctttatttattaatggctttgttgagactgctacaagtttagcatgttttcccttaagctattctaattgaaagatttaaccaagaagccacagtgtcaactgtatctttattggagacatcttaaccctttcagagtgttaacagtgggtgtggtagccattctatttgttgggaaggagaagcagctgctttttccagccatacaagtgcaacttaatggactctattcccttttctttaatctataaaccagagagagctcatctctctcttttttcattacaccttttaaaatgcagtcaatagtaatgaatacatgctactaacattagactttcaaagtctttcactagatctgctcattctttaggtgtattatctgccttccaagttatcatacatgatcattttaccaaatgctgtgccagtctccagaatccatttcttcactccctgctgcctggcttctaagccactgscacattttgttgttgtgcagcagcacttcactttatcakttggaataggccaggttcttttgcagtaacaagcaacatcttttgcagtaacaaacaacatccaaatctcaatggttgaaaagaacaaaggtttcttttgtgcttatgctctatgttcattgtgggttacctggaatgcttcccatcaccatagcagagggaaagctctggagggtctcatgcctgtaattaaatgccctgtcctggaagtaacaatgtatctatcacctttttcaaccctaaagttttccttcaacattgtttttcagttcctatccagtaaratactctttttttgagatggagtctcactgtgtcccccaggctggagtgcagtggagtgatctcggctcactgcaacctccgcctcctgagttcaagcgattctccttcctcagcctcccaagtagctggaactacaggtgcccaccagcacgcctggccaattttcgtatttttagtagagatagggtttcactatgatggccaggctggtctcgaactcctgacatcaaaatccgcctgcctgggcctcccaaagtgctgggattacaggcgtgaaccaccgcgcctgtcttttttttttaagagatggattttcgctttgctgcccaggccagagtgcagcractattcacaggcatagtcgtagtacactacaaccttgacctcctgrgttcaagagattctcctgcctcagctgcttcagaatctgggactacaggcaaacagctctaaaatgccttytgaggcatataaatataattgattctcataactgtgtagcattctatcatataaatctgtcatattttatttacatatggatgaacatctagtttgttaccattttttattattacaaatcactgcagtgaacatttttgtgtatgtctcctcatgcaatgtatagaaatttatctaggaattccttttattctttaaaacttgttgctcaaagatggatgtacagccattttatctgtagcacttggttttatgaacakcagtttcaccagagtgaaaaccattttgaatgagtgggtcagtttatttgtttgcaaaagtcttcctgtgaagtttgagcctggtttcctgctgtacgttgttgatgaatactctagaaatattttaaaatgacatctggtttaaggaggagtaaggggtgaatacagayttcctgtacctaaaaccaacatcactcctcttggcaaacacagaataagctcttattagtagttcaactgaattgatcaaagcatctgggtatsctggagtaaagaaaacatgagtcatggatcatagctgcactaggatgttcttccttccccttctcttctgtctccatccacagcttgtgcatgggaagcttaggtttaggcagatcttgatatcaggaagatgaataaaattgtacatttaatataagacagtgtactgaaaaagcaataaatgtgactagaagagcattagatttttcatggaggtaagatataaacataggtaaagaaaagccaatttcttttgccacttaaactaatactgtagttcctttgagaagctgaggtgggtggatcacttgagtccaggagttcgagaccagcttgggcaacgtggtgaaaccccagagataagataattcttatctctcctaccttaacccaaactaatgatataacatttagctgaaatttcaaaactctatactttttccaattgttctgttgagttgccaagaaaaactttgaaatggcttcagaaagagcaggagatgaagcaggaggaaggaaccagggttctgaataacaaaaaatcttcaggcgtcacctacagtgtttttaaaagtgagacctcttttcagttacctgtatttaccaacatccaaccacataaaaggttatgtgcaggctcttccttccagaaatctgatagcagctgtacctgggtgaattctgcatttctggtacagaactagattgttttctggggtttacgtagcttgtttgggtcttgttgtgcggaagtatctcctattttccattattatgtaattcttatttttttattatctgcttttactgaaagctctaagtgtagaattttctccatcccttttcctggatctctagccaccaactatacaacctgctcattctgccactcctgtaaatattaacaactgggggccttctatgcttttctacaggctcatataatcatgaacatattagaaattgtgcttcctacctttcttctcttctcccttccttccttcttccttccttcctcccttcctctccctaaaccaaataggcttaaaaagttgtttacacytctaggcatttcttgcttttcttattaacagaagattggggaaatatttctagcctgctggaatacatttcactcttttttttttgagatagggggtctcactctgtcacccaggctggagtgcagtggtgcaatctcggctcgctgcaacctctgcctccctggatcatgtgatcctcccacctcagcctctcaagtagctgggactacaggcgtgcaccaccacacctggctaatttttgtattttggtagagatggggtttcgtcatgttgcycaggctggtctcaaactcctggactyaagcgatctgcctgcctcagcctcccaaagtgctaggattacwggtgtgagccaccacacctggcctcactctctttttaatagctgcctaatattctacagtttggaagtcatccattttaytggacagttttcctgttaaagggcactcatcttgtttccaatttgccttggttttgtttttgttttttgatttgagcatggtaaaagatgctgcggtgaacattcttatgcctatcctggaatacttgtgctttttttatggcccaggaaagggctttgctgagttaaaaatgcatgtgtactttcaattgtaatagatgttgtcaaaatatttcccagcartgttccaaaatacccttcycccatcctatccagtgtaggcatcttcgcckctctgatgagaatggatggcaactgcagcactggttgcatagcccaggcacttgttaacatgccatagtatatttccagggagtttaaaactccacygaaaaagactctggtcagactttatgattggggttacttgcaatttttcttttgtatttcttaaggaattcatggaaagttgatagtagggaagaaattcgagataattttaatgcaacccattccttttacagataaggaaattaaaatccaaagaggtagaaggagctacagtgagctacttactgtctgctgcttcagggaagcagatgttccgaatccyagtctggggctttacctattacaacatgctgctcctacactgtggcccatgctgacagtgagttttagagaataaaccaacagacttcatctgtgatctgaatcaacaaatgrggatgaccagtttccagttttttcatctcctgctaggacaagcgagtttcccaacctacactggttgcagaatttgctttgtaaacgtctgcaaagaaaacaagacatttgttaacttggtcttgtcagtgaaatttgttgctcttaatcttttgagggcctggaattttatttctataatgctagagttcctgctcaacaagtgagaagcagctatcttgggtcataaccaaaataacaatagtgaggcagaggaaagaagattttgtttacagaaatggtttcctgctaggcactcctccctcagccctcctgaattgaaagctaagtactagtaggggtgcctagaaaaaagaccttctgcagggcccactgatgtttctggcagtgtggacaatttgacaagggttcatattgatgttctctagggctgaaataaaagaaacttggaaggaagccatttttgcaccctgagtctttaaattcagttttaatattacagttttgggttttgccaatggattctgtgagggaaataaaaaggaagactctaacctttgggttcccatttgggtttgctctgtgttcattgcagagcatttgacagcatggcattaactttccaggctgtctctaaataaagtcagactgtttaggtagctcacctctgctcttktcagctcttaacaataaagagcttatataactaaaaaaatcatcatgatggagattcattttgtcatagataagcatcacaagcacattaagtatactttcacctagaggcatgcctttgtgtttcagacctggccatggttcctctggtttagtagtttccaagcctgcagattgcaaccactagggaacttttaaaagatattcatgtctggatgccatgcctgaattaaacagaatatgtgcgagaggaggccagaaattgaatattaaaagcttctcagctgattctaaaaggcagccggattgagaacttctgagcaggctatttggaatagagaggatgtctctgtttaatgcagaaataaattagatataatgcgagttgttctttttagaatttcatgtctgctcatcatctctcatagtctacttcctctctctttcccctttctatacactgtatagattaaaacagtggaatcacatcttctaaagtcagttcataaagcaaaaatggaatcattgaawtgcgcyctaggttagagaccgacataccatctcttggtacacccagcatggtcagtttttcctctaggattgaagcagatccgtttctttggtaaagattctgacaaaaatagttagcaattgggatccaggatgtatgcaaaaatatatatatctatctttaaatattagtataacactcagcttggtgagatacttgagccctaggaagcacacaggaattgagactgccttagggaactgcagaatcctatttctcatctcactcaattctgagtggagtgcagtggtgtgtgagcagagccttgggcactcttttgattgtaaaattttctctgtctgtgccrccttttaggcacrtatagttgaattcaaataaattgaatgttaaatgcacatgtagatatgataccactgcttttgcttatttaatattcaaaaactgaacacttctttgcacrcatagcattcagcagcactctttctttctgtcctttagcattcccatggtttggcatggacatcggtggaacgctggttaaattggtgtatttcgagccgaaggatattacagccgaagaggagcaagaggaagtggagaacctgaagagcatccggaagtatttgacttctaatactgcttatgggaaaactgggatccgagacgtccacctggaactgaaaaacctgaccatgtgtggacgcaaagggaacctgcacttcatccgctttcccagctgtgctatgcacaggttcattcagatgggcagcgagaagaacttctctagccttcacaccaccctctgtgccacaggaggcggggctttcaaattcgaagaggacttcagaatggtaggtykggtttgtctttgttaaaacatcaaaacctctcacatgtccataatcatggccactcataccgaagaaccatactactagccttgggactctggacaagcttatgtcaccgctctgtgcctcagttttctcacctatacaagaataaaaacagcttctacctcatagggttgttacatgtaggattaaatgagataatatgtacctggcacttagtaagtgctcaatatagttatcatcatcatttcaattacaattattgctgggtaatacgctaaagacaagatgctaaaatcccttctgaagtatttcagttagaattgaccacagacttttactatataatcgtgatgccaactttatgcatatataaacagagacccatgggaaggcttctatgaatcctaccaaaaatgattacttctrtctacccatttgctctcaagtgccttttttcagcatatgaatgccattcagaagttttgctcacaaacaaaaatgaaatctgtaatattacttatcagtgaattccttcattaatgaataccatttagggagtataattttatatagtaaggataatgctgtatcctgactggcagtacwtacaaactgtacgttgctcatttagatttaacaaatgaagctaaatggaagatacggataagtaacatgcagtccaatgtttctctcttttttttttagcattcccttaacatctgtgcattccaatttcttcattttctacagtcaatataataatctctgtactgtgtagtcttcattttataaagtgagaagaaagtgaaacaatagatgtagatatatcttggaaaggaagggaagctagataaacaaaagtgattgaacatggaagaaggaagggttgggagattttaggattagttttactagaaagttgaacatatagtgaggtaagtcataaaatacgtattctcaaagcctgtagtacaaattactgccattttgtgcagaactaacataatccagtcttgctataaagtctgtcattaatgaatacattaatcaatcagtgcacattcatggtatttaataaagctataaatgcaaattttacttgtgccatcaaaagtaaccccatttacctcattgattatagtaagtttctgtaagggcagrcaacagagtcctagaatagtatcctaagtgagactaattatcttcagtttttgtttttttttttcttctatgtcccctcctattacccagcagtagagtttgacttgccacttacttaaatgacccacagaatccttttctcaccaaagaggctcatgatcaaagagttttaaaactgagaygtttgagatccatgggcttgagaactaagtttcagtccataatggaaaaaccattgaacctgaactccagtcctgtttctacatttcatcagctgggtgactaggcaagacctgtcccttctctgggcctcattttgtcatctgcaaagaggtgggagtaagacttcagaactgaaagtgacctctggaggtgagaaagtatagcmttcttgtgctacrtagataagaaactaaagctgccagagagatcaaaagcttctagcagtgtcacctaggtaagggctgggacttggactcaattctgattcagaaggaaatgctgatccactctcattgctctgagctcctcaggtccctcaaggaygccctatctgtccatttccactggagagcctgaagtgaaccaaggtgacccagaggattgatgcaacctctgtcaatgcctccatctctcccctggggtaacgtataccctgggagaaagttactcaatatgtgttggccatgagcaggtgtatttctcaaggttctaagttgagaaaagtcacatctcattacaaccaagataaagaagcctttcctcctttggacaggcttttgaagcctaatgaatagactggagtagggagcaagtatgtaacatttgctaaatagtctggccaggttgggcatccatctgtgaaagaagagtctatgaactgccttctgtatccaggctgagtctcagccaaagtgaagacagaattgaaacagatagatcttttcctatagcccatttgatgttatgttagtgatgtgcctgagtctttccaaagttatgaggatgaataggtgttatcctccttcctaagcattcattcactcactcaggcactttcagtgcaccaagtactgttatgaacaaaataaatcccctgctcaccatgagcttgtattctagtgggggaagacaatcaataatcaatttaaaaagtgaatatagagtcaggcgaaagtggctcacacctgtaatcccagcactttggaaggttgaggcgggtggattgcttgaggccaggggtttgaaccagcctggccaacatggtgtaaccctgtctctactaaaaatacaaaaataagccaggtgaggtggcgcacgcctgtaatcccagctactcaggaggctgaggcacgagaayctcttgaacccaggagatcaaggttacagtgagccgagatcgtgccattgcactccagcctgggtgacagagtaagactctgtctcaaaaaagaaagtgaatatggaatatatcagatggtgataattactatgaatggagggaaaaaaccagggcaaagaagatagggagtgctggcagggtctttgtgtgactaggcaatgttggagcagagacctgaagaagayagcaaatcatgcaaagaaagagtgtgttaggcagatggagcagtgagtgctaaggcccttrgtgtcctaataatccaagctctcctcatttctagaatagaaaatcgaagatgctaacttaattgtaaaggatcaatatatactactgtacgtattaaaacaatttgacaaatcatacagaagtacatctacatacctataaagtcctgttattgttattgtataaaatcactgtttttggtataacacaactttgcagataggagtttgaaaaatccatctgtgtgatttatttgagcgattagggctaggtaaaagatgtacaacagaccccgaatagtaagcacttgttatatttgaatagtatttttaaaaaatatatagtatatgtacttgaatccttagataatgtaactattcttcattccatttaaaatgtacaagaaagaactataaaccatgacacaatcattaaattagacctgtgtagaatactctcagttgaacagrtctgcactttgttcctcctttttctttccttctttttttcttcccrccatccctcccctccttctttcctttcttgttttcttttttaacattttaggattggccagacgcggtggctcacgcctgtaatcccagcactttggggggccgaggtgggtggatcacgaggtcaggagatcgagaccatcctggctaacacggtgaaaccccgcctctactaaaaatacaaaaaatcagccgggcgtggtcgcgggcgcctgtagtcccagctgcttgggaggctgaggcaggagaatggcgtgaacccaggaggcrgagcttgcagtaagctgagatggyracactgcactccagccggggcracgaggccagactccacctcaaaaaaaaaaaaaaaaaaktttaggatcattgtcataaccaaatttttgactggcaaaaactagccttcaaaatcaatgagttatcaaaatggaacacagaagaaaaacttagcctaacttcaaatagactaagatgttgataagccaatgaggaaytcccaccatttaaaaagtggctttcaagatggagaactctgcatggctgtgcactctgcawggctctgtaggtktcagtgaattttgtgtttattcccagtgtctatattctgtgggttttgttttaartaaccaagcagaatattttatgtacagattctagtatttttattcccaaccacacttcctaacttcaacaaccgtattctcaagaatgcaaggtatttttaacatcagaaaatttatttttaaaaagtcattaattctgcccatatagcttttcaytgcaatacaggcataccttgttgtattgcattttttacagattgaaggtttgtgttaaccctgcattgagcaagtctattggcaccacttttccaatggcttgtacgcacatttctctgtgtcacatgtaggtaattcttgctgtatttcaaactttttaattattattgtatctgttatggtgatctgtgatcagtgatgtcactattgtaattgttttggggcacccaccacattatgcccatataagatggcaaacttaattgataaatgttgtgtgttctgactgctccattgacaggctgtccccccatctctctccctacctcaggcctccctattccctgagacacagcaatattgaaattaggccaattaatagtactactgttggtctaattggcctctaaatattcaagtcaaaggaagagtcccatgtcccacactttaaatcaaaagctagaaatcattacgcttagtgagaaaggcatggtgaaaaccgagacagaccaaagcctaggcctcttgtgccatatggttagccaagctgtgaatgcaaaggaaaagttcttgaaggaaattaaaagtgctactccagtgaacacacaaataataagagagaaaaacagatttatggctgatacagacttttagtcrtctggattaaagatcaaaccagccacaacattcccttaagccaaagtctaatccagagcaaggccctaactcttcaattctctagagtctgagagaggkgaggaagctgcagaagaaaagttgaaaggtaggcggggtcctgtggctcatgcctgtaatcccatcactttgggaggctaaggtgggtggatcgcttgaacccagtagttcaagacccrcctgggcaacatggtaaaaccctgtctctacacaaaatacaaaaattagccagatgtggtggtgcacccctatagtcccagtgactcaggaggctgagatgggaggatygyttgagcccaggargcagaggttgcagtgagctatgattgtgccactgcactccagcctgggtgacagagtgataccctgtctcaaaaaaacatgaaaagaaaagtgggaaggtagcagaggttgttggtttgtgaggtttaaggaaagaagccatgtccataacattaaagtgcaagataaagtactaagtgcaatgtagaagctgcagcaagctaatcaggaaatatagttaaagtcactaatgaaggtgatgcattaaacaacagatttccagtatagatgaaatagccttatattgttttggaagaagaggccacctaagactttcatagtacagaacagaagtcaatgcctggcttcaaagcttcaagggacagggtaactctcttgttaagggctaatgcagccggtgacttgaagttgaagccgacgctcatggaccattctgaaaatcgtgtggcccttaagaattatgctacatctactctacctgtgctttacraatgtaacaataaggcatggatgatagtacatctgtttataacatggtttactaaatatttaagcccactatttagacctactgctcagaaaaaaaaatcttttcaaagttttactgctcattgacaacacaactagtcacccaagagttctaatggagatgtaaaaggaaattaatgttttcatgcctattaatacaatatccattctgcagcccataaatcaaggaatrattacaagtttctagttttattatttaaggaatactttttttttttaaagaaatacttttcataggccatagctgccatagattacaattcctttgatggatctgggtaaaatcaattagaaacctctggaaaagattcactattctagatgccattaagaacatttcagattcaagttgggggaataaaatagctttaggaggagtttggaagaagtgaatttcagcctcatggacagagttcaagatgtcagtgaagaaagtaaccgcagatatggtagaactagccagagaactagaatcagaagtagatcctgaagatatgagtgaattgctacaatctcatgataaaacttgaaagaatgaagagttacctcttatggatgggcaaagaaaatggtttcttgagatggaatctccttctggtgaagatgctgtgaacgttgttgaaatgacaacaaaggatttagaatattacataaacttagttgataaagcagtggcagagtttgagaggatggactccaattttgaaagaagttctatggtgggtaaaatgctatgaaacagcattccatgctgtggagaaatcttttgtgaaaagaagagtcaaccaatgcggcaaacttcatttttgtttattttaagaacttttccacagccaccccaaccctcagcaaaccctgctttgattagtcagcagctctcaacattgaggggagaccctccaccagcaaaaagattactaatctgaaggctcagatgattcgcattttttagcaataaatatattttaaaattcaggtatgtcctttttttttttttttagacataatgctaggctgggcttggtggctcacacctgtaatcccagcactttgggaggccgaggtgggcaaatcacaaggtcaggagatcgagaccatcctggctaacatggtgaaaccccgtctctactaaaaaatacaaaaaaatagccaggtgtggtggcaggcacctgtagtcccagctactcgggaggctgaagcaggagaatggcatgaacctgggagacggagcttgcagcgagccgagatactgccactgcactccagtctgggagacagagaaagactctgtctcaaaaaagacataatgctattgcacacttgatagactacagtatagtgtaaacaactttttttttttttttttttttgagacggagtttcagtctgtgcccaggctggagtgcagtgatgcgatctcggctcactgcaacacctgcctcctgggttcaggcgattctcctaccccagcctcccaagtagctggaattacagacacatsgtgaccatgcctggctaatttttgtatttttagtagaaacgagggtcttaccatgttggccaggctggtctcaagctcctgacctcaagtgatccgcctgcctaggcctcccaaagtgctgggattacaggcataagccaccgccccgtcagtgtaaacaacttttatatgcactaagaaaccaaaatactcatgtgacttgctttattgcaatattcactttactgaggtggtctggaaatcaacctgcaacatcttggaagtatgcatgtagacacttgtgagttttgtccagtccaaagctaacattgattagaagtcagaagtaactcttttagttactttaaaagtaaaaaaattacctaccctttgaacaaataggatataacaacagtcttattcggttgacattaaatttagggcaacagaaagaggtttctgattgctttcatcactttttttcaatgtgtgaggacttaagaattggcttttcttatgccagaaatctccaagggaccagtcttaaaaagcatataatgatggaaaagcatcaggagcgggtaggacacctatgaatctgtggaatgtctaaacctaagagcatcatttaggaacacctgttaccttggtccctattattaatctgaggactgatttgtgatattgcaggagcataagatttggtagacactatsattctcaatttcattcttgcttgagactttgaccactcayagatggcccctttcgtcatttgatggagggtggaaaaagctatctggggttggggcccagcagcctgcattttaaccaaccctccaggtgattctgatgcacttaaagtttgagaaccccactgtacccctacttacttaagtaactttggtattagaaataacattgctagtttttcagagttgtagttggaaaattttctctactttacctcttcccctacttgttagtcttaggaacaggagtaggtaacttaacccactgacccacagtgatgcattttatctgcaaaataggtaatagtgatagcttccttgcttaaagtcccacagccaggatctatacagtctttgattagcttccattatttacagagtttgagtcttaggacaagctttgttttgttgtttttaagtttgaggagtggcttaaatttaacctaataatttaggaattggcagaactgatactctccaaaagtgctaaggagagttacaagcagagggatgctacagccagcacctactgggttaaaagagtccatgtatgcatctcttcccaattatgtgtttattgacatcacattggtagcttgaaattggtcatggtcgggggtgattatacgatggaaattagtaaatgctataaactagggcttttagtttcagagagctggttgttaaacatttaccagcatatcttagttacaaagtatgttcaaatgacctgaagcttcatttgcatatttgctggatctagcagttcagatttctgatcatttaaggcccattataggatcagcattaggatatatatagataaaattggtaatatgggaatcagattcagcccacagacatgttttgttggtctgcaatgtatttttttaatgttaaattacctgtcagcccttaaaaattggaagatttaacataaaaatttggatttctggctcttgaaaaatagggtcatctggtaacactgggccctcaacatcacatggcaacagtggacagcaggtgaattttaaatatatgcaggttgacttgtttgctacagtccttatcattctgtgactctacatctagtcaaggcctttgctcctttgttttcttacagtctcctttaagcatttgagtctgtggcccttgatgtaaaggaaactaagcccsgagaaagagtgtttctcactagctgaaatctcaacatgctgttttaagctttccacaaagttcattcagttgtactaatggactgcaaagtctgataattaattcccaacttgtcctgaatttcagatgtcctgtttgaaaatccaagtagcagtatgactcactgcctgcatttgggaccctgtcatttttcccagatggtgaagacttttgagggaggtctctgtagggctcagtgaaagtgacacatatttttgtttccctgtctggggatgcatgacctcaagcttcagagatatccacccctcagtgaaatgtgtagaagagatgtttgctgctagcactttgttagaaaataatttttagggaaaaggtgaaataatgatgtttcttttctagtacgtacgtagattatttgccttggcaggtttttcttttttcctagtatagtttcaggaggtccagcaggacagactttgtgtttgttatgttggctctggaattggctgtcaatattgttgatgaacctctgattaatttttaagcagttaacctatacttccaagactggctgatgaaattgctacttttcagtttggggtgatccaaaagataataactccctgttccacataataaatgtttattaagcaattattatgtgcaggcctttgagcatagtgctaaggggcagcaagagacctagaaaacaagccagaatgtgacctgtgctgtaagtgcaatggaaggctgtggaatcagggagaacagaggaaatagtgtttacactgctatgccctgctatagtctttcaggtctccagatagttttatacctgtaattttgcttcttaaaacatgtataattacatacatctcatacagaagtttcacttggtaaaaaaagaaatgtttagaaccatttatgaggtagatttacttagcaccatgggtcatttagaatgtttatttcaagaataatcaagaatacatccactatctggttggtaacctattctaactaattccgttctgcaggtatacaatcagaggattttgttaaataagaaattcaaatgagtaatgtgaagtcaaaaatgttgtcaaataggaaattcaaatgagtaacatgaagtcaaaaattttgttttagctctttttttgtttgtttgtttagacagaatctcaatctgttgtccaggctggagtgcagtgacacgaccatggctcgctgcagccttgacttcccaagcctgagtgatcctcccacctcagcctcccaagcagctaggaccagcagcatgtaccccacaccaggctttttttttttttttttttttttttaagagatgggtctccgtatattgcccaggttggtctcaaaatccgtggctcaagtgatcctctcacctcggcgccccaaaatgctggaattacaggtgtgaactaccacaccccagcccgttttacctcttaacttttataatgaagataatatctttttgacaaaatatctgagtctagtacttgtgtaggctgtttccagactccagaagcagtacccattatgacaatgaagacacgagaagtacagcaagtcattgggagatatttgctagttgtgtcacttagggaaagttatttaagttctgtgaatcttaaccatagaataaggttgatagtaccaacttttagggttttagggagaattaaataatctggtacaagggtttagcatgtagtaaacagtaaatacttgctattatatttttaaagagattttttaaaaatttatattgggtctcttaaattatcttcatttgttcagtttcatgttggtgattgttagatttttttctttctttggtccatggaaaatgatgtttccagatctctgggccagtagtaatatatttgaggatcataaattaaacttttgagaaggcaaaatggctaccagaccctaagcctagccctcagccaggtcattcccctttacctttttgcccctgtacatttttgtctcacaggaacataatagggcacttggggaccaccccagacattaataaaagagccaacattttttgaatgctttgtatttgccaaggcttatgtaagcactttacctatatttttaggtaatcttcacagcaacagtgtgcaatgaatgttattattatcttccccattttacacatgagggcactgaggtttgagaaatcattcagttaagtaaattttagagctagaattcaaagccagatctaactacagagcccaagcctggaaaaaggggagtagggctttgtgggctcaaaggtgattcaccccagttcccagtccctcgggacttcatgctctaccaaggaagtatagcatttttgttgctttctgaatattctcagtctgctcaccctgtgyaagcacctctttcttggcagcattccctattagattcctgtcactgctataacaaataaacttaatggttcaaacaacagaaatttattcgtttgtagttcttaatgccagaggttcaaattcaaagcattagcaggaccgtacttccttcagtggctcttggggagatgccattctttgcctcttccagcttctggtggctgtcagcattcattggcctgttgagcagcactccagtctctgcctttgtcttcacatggccttctcctttgcatcttttaaatctctcctgtgtgtctatatgcttgccattggactcagggcccaccccaataacccaggatggtcacttcttctcaagatacttaattagatctgcaaagaccctttttccaaataaagtcacattcacaagtgctcagaattaggacatagtgccatctttcagggaccaccattcaacccacaacacacgctgatgggtgcatttcaaacaatcaggcaagctcttgtcctttagcatgcactgtgggcaggtatgacatctagccaaggctacttttccagtgcagtggctgattatctgcaagattttacaacttgttttaagggtgtctccatgcttttcatgtgaatgaccccatcttaaataaaacctctggggcttccccttagatggtcgcctatctcacaaggttttattttgttgtgtgttttgttttagattgctgacctgcagctgcataaactggatgaactggactgtctgattcagggcctgctttatgtcgactctgttggcttcaacggcaagccagaatgttactattttgaaaatcccacaaatcctgaattgtgtcaaaaaaagccrtactgccttgataacccataccctatgttgctggttaacatgggctcaggtgtcagcattctagccgtgtactccaaggacaactataaaagagttacagggaccaggtaaacatgtttctgcttgtgcttgaacccagacctctttcttgatgaccagtttatagtaaaagkttatttatattgaatacatttttaaaagaaatatcttggcctccttggccaaccaaaaagaatttatcaaatggtgtgttaaagtggtatgtgggtgatttatataaatgttaataaaacagttcttgccttgatagaaactttggtcaggttgagggaagaaggatcgcacacaccagaaatttgccaagaaggaggcatacattaagtgccaaatgattggcagggtcagtagaattcagatggaaggatacttgggatggtcacagatgacttcagaaggaaccttcttttggaccctcattgatgcctagctcggagtgacttgcttgaaataatataccattccaaacagcaaaccaaactatgtctacaaagaatgtttttttmccctcagccaaatgctccacctgaaaactggaatagtcagcatacctcctagggaattttggagtggagtagacagggaaacagccccatggccatggtggggcagagggccttgtttttcagtgcacacaccccaaggcccatgtaagagccaaggggctcagcttcctgttaacggrtattcaacatgggaaaaacatctagggtcagatctctctaagacatcacagtgtaaacaaaactaaataggttttccttaattctaggaggaggatttgatatgaagcatttctccagcatgtggaaccatagaacccatttttagaggaacaacttaggagattagtgccatgtagaatgtgctttgggacttgatgttgaaaccagtgtttttgatagatgcagatatcgtgtcacttctctgggtctcagtatcctcatttctgccatgaagggtgctgtttcttagatcgcttctacagactttttccagtactgaaattctgcaggactactcacccattaggaggagaacattgcttttgcagtacatttccatgayttgtgataaatgagtggttccccactgaagaggggaagatttaacagtgtcccccaggacatgtttgacatctttttttctttggttgttacaactggcatctagtgggtagaggtcaggggtgctgccaaaatcctatagtacataaggtaacaaaaaattattgagcctcaaatatcactaatgctgctgttgagaaaccctggcatgcatgtacacacacaaacacacacacacattctaattgaaacctacttgtgtccagagtataggctttgttttgtaagttaattgctaccaagtatacattttctcattgagaatatagaagtttgcttgctcacacaagaaacaaaactgactccgtgacctcatgaggactgtcaggaatatcagagacatgaatatttcagctgagttggttttacattagagagtgatttgataaacataatttttaaacaactacagaccgcctcccagaaggagtaattgaattggtaaagctagtcccaaggtaacagcaagctatacattgttcaccattagagatatctagttttattaacacttaacaatttaatgaattacatcacaggtacactttcttaaacttggaggctccgcagatctgggtcatcttggatagctgcaaagaagcaaactgtggtgtttggcttctattatgtgtgtaataatgtctataaatattggtaaatgcccattaatgtccagtattctccagtcatcaacaaattctgtctggatgttcaagcttccctataaactctctcttcaatcagtagttttggaaaggtgctaccgaagcctgcaggttaatagagaaccctttcaggggctaccacgagaagggaggggaatgaaacatcaagtctgtggggctgtgatcctgatccagagttgttttgccaaaggtttcttttaattcaagttaggaaacctctgacataaacgattacagttagcagtgaagttagtatctatggttagtatgagtgtgtaaaacacattttgggaaccactgttttagcaaatggcttagctttaagttttgctactcctattgtgaactgatagctgtcactccaggttttttcttattgtattatacctgattttcccattaaacattaaagatgtttatttttaagaagctacacaggatgtcagtttccttttaaacatgatttcaaatggtttatttcagtgttatatataattttgttgcatcccagattgggtagcaacatttttttcctagtgacacaactcgaattatagaagtcaatggaagaaatagtacttcatagctgacagtagaatgtgtaatctgttaaaagaggaatgcagataattttgaaactttggtgaaagtagcagtacatctcatctcattattttggaatctgttttaagggcatgagcacttaattgaaggtttcttctgctgtttcctaacatcccccactatgatgttgtttgttttatttttaaatgatgataatattctacagctttttcttgcattgtttttctctctgatatactgagagtttttactgtatgcctactgaaacaaacagatgcatctgattgtgagcaagaaaatcacttgattaaataatggttagcaggttaaggatattaataaagtgctgggagacatttggctcttctgcagccatgcattctttcctcctatctgcagtgcactcactgtgcaaatgcatgctcgctttacctcatttgctccaattctttatgtggagttgtctgtcattttccagtcatacaaggcacttgccctttttcatttataccaacacatcagccaatgggttaccttctttctaagttagccagtgtcttcagttgcctacctttggagtgggttgttgaatgcctcgattgatacaaatccttaatgtccaaagaaagattattcatggggatgacagatatttagaagctagaaatggaagcaaagacatctttctaaaaacacacagggagaaaacaaaacaaatccaaatagcacacaaaccaaaacatgttcccaccgtagttttgtaggtaggctgaaaccagcartgtagaatgacatactgcattaaatgtgaataaagataaactttcttagaggaaatccaaagtttgtactgtgactaagttgtgaaggtaataatgtacatggacctcttcctttactcatggaactgcatctacagtttgggtakctgctactggtggtacctagctacataattttccatgaaaacccataatttcaatcatatatatatgtgtgtgtgtacatatatatattagtaaatgaagttatatatatatatatatatatatatatatatatatatatattttttttttttttttttaagatggagtccggctctgtcacccaggctggagtgcagtggtgcaatctcggctcactacagcctccaccagggtacaagtaatccccgcacctcagcatccagagtagctaggattacaggcgcgtgccaccaaggctggctaatttttgtatttttaatagagacagggtttcaccgtgttgaccaggctggtctcaaactcctgacctcaggtgatccacccaccttggcctgcaaaagtgctgggattacaggcataagccaccacgcctggcctcaatcaagtatacttttatacaaatgacaatttaagaatattacacatagtttcactatttcattttattttattattttttgagatggagtctcgctgtgtctgtcgcccaggctggagtgcaatggcacaatcccggctcactgcaacctccacctcctgggttcaagcaattctccttcctcagttttctgagtagcttggattacaggtgtcagccaccacacctggctaatttttgtatttttaatggagacagagtttcaccttgttggccaggctggtctcaaactcctgacctcaagtaatttgcctgtctcagcctcccaaagtgctggtattacaggcatgagccaccaygcccggtcagtttcgttttagatgcatcttcaagaactatgtacctatctacagttttgtaccttcttgttaacagttattgacattattaaacataaccttaatcccaaattgattttattcttagaagtaaaagccagtgctcaaacacaaattgaatttccaaagctagtagctctttggggcttcagaacagatggatgtgagcagctcttcttcatttactcttctacatggtaaagaaataggaaaacctatgtccattagctttaggaatcaatactccttttcctgctgggagttcactggcgatactttactctgaatctgcttttctttccattaggtaactttgatattaatacacaattgagttcattcttggctactgtaattactttctaattttgtctaggctgttttagaggaactttccctctaaacaagtcaaagctttttaaatgtagttcaaccattggaaccactttatgacctttgttactgttttttactatggagtggtaagtaatatactaaaaaccttctggagagtctactaggaaaaaattcagtatcagatcagtggttcctttctagaaatattcaaggaggctaaatgagattatctctgctagagaagcaaggtcaggtaaaacacagcttttaagacaggccactcctggcacaatcctgggtcagttttgtcatcagagggtttggcttyatagctttgaactatgctttatgtacacacaaattctttttctaggtatttatattcagctgcatatggttttttaataggagttatttcttggttatttgctgctttcagaccacccaaatagaagagatcatgatttggccccatttcataggtgggaaggctgaacaaagcactcaggttagtggctagttgaaggtctcacaacaraaatcagtgagagtctttctttggttttgttctcaaatttaggggcaaattttccttgatgtttatttttagtctctgccctcttttcatatccagtctaccctaaagctctgttgcaccctagcactttaattcaagtgcccctttgttcgtctgcttttattcacccatattaatagtcttgacgtagttggggacttggatgggcatatcttaaagtaaaatttaaaaataaaccttattattccttcagtcttggaggtggaacattcctaggcctatgttgcttgctgactggttgtgagacctttgaagaagctctggaaatggcagctaaaggcgacagcaccaatgttgataaactggtgaaggacatttacggaggagactatgaacgatttggccttcaaggatctgctgtagcatcaaggtagagattaagtagctaggagcagtagtgattaaacacaaggcagcctctccaccctggccattcactaagttgttttaaaatgtcagtccaccagcctggtgcagayacctgttgtatcagagctcagacttgatctcctgcccttgatgaagcactgagatgtttagctcttgatgcttgttcttaaaataaggcaactttgaaagaaggttctagaaaactgcaatagtttcacctgttccattcttgtccagatatctagaggcattaatttyccccccccattaatggacatgctactttgtccctattaagaaaagggcggtcagccatgcatactataattctgtctgcttataaaccatagtagcaaaattggatcacttgagtttgaacagttactcgtagagccttccacaatactttggtggaaggatgggccctgcctgaggacgattttgaacactctcgctgatatttccaacatagctttggcaacatgatgagtaaagaaaagcgagattccatcagcaaggaagacctcgcccgggccacattggtcaccatcaccaacaacattggctccattgctcggatgtgygcgttgaatgaggtaaggccttactcaacccggtgaaagctgtgtgtcattcatatacatcatcttggcagtgcaacacctgttgactcttacacaactacatatccttaggaaagcttccctttactctagtcacactttacagaacaggaggggtgtgtgttgggggagggggaggaatatatgctttatttttaagaaggcactggatgataatgaatgataaaccattcacctgtggaaacaggatacaattacaacccatgtcatagtctctctaaccatcattattgccatgygtccactgaaatgtgaggaaaaggtctgagcatccttgcacataactgcaggtaaaatgctcgacttgcaatattcgatattctctctgctttcagcttctttacagtgttgccttgtggcatggagttcaagcagcattgtacagggctatcaaagcacagagagcttgctacagccaaggccagccagagtcccaggcacaaaaaggggtggagctggtgacatacaaagttgtattaacatgttttgaagcattgcaagattcgtttggaaaaaattgaaccttttctgaaatacaaggtgtataaagtagaactcttcacactgaggtatattagaaagacaggaaagaggagttgaggcatggaacaggtcataggagagtattaaagaaccacagtagatctgtaatggagtttttataaatacagcttttaatagaggtgacatacatacagaagaaggctcaaattataagcttacagtttaatttacacacacaagcaaccctgtatagccatcacccagatcaagaaatagaacattataggtactcagaaagccccttgagccccctctcagttgaatagttgaatgttagtgtatgaggcagtctttatgatacatgggtgttagccctgcctttgagttctgggttgacaaaaaacatactctccttgcataacactgaacagagtatgttactggcctgcagatcagcgayatacctttttggaagccctcagttcagacggagtttaaatgggaggctgatactcagagaaaagagcattccagagatgttttttcaaagtccacttgagtcatgggactcaatgtaacagagtttatttcttgacattaacctttaaagggaatttttccaagtaatgaaacaagccccaagaccaatatgtgtgtagttggctgtactcatgggctctcaaaggtcagctggtaacaacccttgccccacagagcaatagatgccctttcccctactttccgcagagctggcttcttgtgctttttgctggagtgagccagcaggtcagcaggtcttttcacaggcatcagaatccctttgggagagagcaactgactttacttttcacttttgatttcaatttcaatattgttgattggtggagtagagcgagtgccaatttgaaaatgtagccatgttatacactggtttgagcaactattttatatgtttctgtggggctgaatgagtgaagggaatcaccagtcgccttggrgccaaggctctaccagagggtgtccagtcagtgcagactcccagtggccgcaccagtgactggcagtgttgcatttcccatgagagcagccaccaagtccctcagtccttgctttgctctctggagtcactgatttgagaacctttgattgcagccatttcattgagggacaccacgtttaccaaatctaaaacatttttgctgtgattcttgagatgctgtgaaatgcttccccatcagttataaattttctgattcaaatttttggatagataatacaaacacataatacagacttctaagacattagaaggatacacaaggaagtgagtcaccatttccacttctgtctctcagtgttaacctcagtagaggctgccattttttttagggtttttttgtttgtttttattgtacgtattacaatatatctttgtttatattgtatgtaatgtaggatacatttatctttccaaaggtagcaaactctatatagcattctttttacaaaataatagctttattgaaatataattatatgctatacaattcaccctccatatactattctatatcttgctttatcagctttttattaagaaaattcataaacataygtaaaggagagagaacagtataaagaacctccattaatccatcagtgcagattctgcaatcattaaggcttcacaacacatgctttctctatattttcttcttcctcctccctctggtcctctctccttcttccctcttttttgctaaaatactagaaaacaaatcccagatattatatcaatctaccctatatattttaataagcatctctaaaaatactgccttttgctttttgacgtaataacgcatcttgaaattgatcatatcagtatattttaaattgcttcatttttaatggccatatagcattttaacatatagatatgctgttattgatttgttcaatttcctaatgatatttaggtttttccagtcttttactattatttaaaaattcagtgtatttgtatacrgtatacacacatatatgtacacacatgtatattattttgcctacatgtgagtatatcaataggataaattcctagaagggaacttgctgagtcatcggatatgttgattgtaatattaacagatataaagttccctccataaaggtggttctaatttayattcccaccaagcagggttataacggtacaagtttctccacagagttatcaaactttttgatttttttcaatgtaataggttaaaaattataccttattttgggattaactattaatrttatttactcattactctattgggttgttggacyttttttcttgttgatttatggaactctttattaattaacaaatccattttatgtgaaatgtactgataatattttccatttattgcttcccgtttggatttgtttgtggtgatgtttttccccgaataaatttaactttttaaagtaaatgtagcaattattttgagatgatttcctttattatgcattttctacttcaacttttttttccaattcttccatatttttccctatctctttttcttttctttctttctttttttttttttcttttttaacatctttgacccacctggaatttatttgaaacatggaatgctcttccagttttaatgccacttctactccttctgactttctattagggtaatgcaggactgggctttgagcaaatcctcccttggactcccctgttttgggagaaagggcaaaactcctcaatttaattaaatttctttttagtctgagtttcttagagtgttccttgctacctcttagtttgggtgatttgtggctagttttttgtttttttttttaatgaaaatttattaaaactacctccactcctccacccacggaaaattttcagtggctaatgggttaatgaacattcattgttaaaacttgaggcagttaaaaggtgatgttcccagaccctgattactcttgatagactaagcagaaaataataccagcttcaaagactctcttgcctttgatatgagtgaccrtagcaactggctctaagtgagtgagtgagtggtgagcagtctctgcatggtagacaggttgagctccagtttgagcttaagaaatatctcggggagtgggaagtataacgagtgcactggagctagaagcttacgggatttgaagcatgtctgcatgaaccggataggagaggaatgttcataagtgtatgttcagaatgcaaagccacatccatgatgacaaaaatagaattattttttgttaccatattttaactcatgtgttggccaaacaggatattmcaccacatatcctgagggcagagactgagtattctttcttctttgtatttctagtgtccagcacagaacaaattgagcattattyattacacaaataaaccataccatagccgttttatttgtgagttggttataagagtattttatacctagaagttgggggattgaggtattacacatgaaaatttagctgaacttgaactccagttaaaattgtatatatacgtatgttttgagagcttaatgtcagacgtaaggcagtstgacataacacctgcaaataagtccaatatcagtttctgccttgcccaacaaaaatctcagcctcttgttcttgtggaatgcactataaggttggtttaacttcattttggcgatgttgaaataattccaccaaaaaaacaaggaatattcactcttcaaggttctgtacagagacatacagaacattgggtctttgccaaatgctatttttatgccatgattcaattgttttctttaatattttttccagaacatagacagagttgtgtttgttggaaattttctcagaatcaatatggtctccatgaagctgctggcatatgccatggatttttggtccaaaggacaactgaaagctctgtttttggaacatgaggtaggttgagctkgcatagacttactgtcatatgtggagtatattttggtttggctmacatatcagcaggtctcttagctttttaaattggtcaagtagaaaagttgccatttacactttgcatttacacaaaggataagaaaaaagcatatataaaatggaagcgttcttatccaacaaccaggactggtagttggttaatttaattttttaaaaagtcactggaaatgtaaattaggacagtcattatagaaaactgcatggaagtttcaaaaaaactaaaaataaaattaccatatgatccagcagttccacctctgaatacttacccaaaagatttaaaatcagtatgtcgaagagatgcctgcactcccatgtttattgcagcactactcacaataactaggttatggaattatcctaagtgtctatcagcagatgaatggattttttttttaatgtggtacatatacacaatggaatactattcagcacttaaaaagaaattctgtaatatgcaacaacatggatggaattggaaaaaatgctaagataagccaggcacagaaagacaaatactacatgtcctcacttatttgtggaatctaaaacaatcaaactcatagaagcagagagtagaatggtggttacagaggctggcgggtagaggaaatgggaacatacatttcaaacttgtaaatttcaaatgttctcaccaaagaaatctaagtatttgaagttatatacatgttaattagcttgctttaattatttcacattgtattcataaatcataacctcactttgtaccccataaatatatacgattataagttgtcaatttataataacatttttaaaaagttttaaagtcagataaaatgagtaatcattaatgaaagctttcttcaaccattttattataccttaaaatgtgtaaatgtgcacttacttaccaatcttttgatgtgagaccaacgcctatttttgagcatggtttctccgattggagtcctgtagttatctttctttcataatctacaatattatgcacctcctttgatttccagtttgtttccttaaagtggattaagaagataaagatacttaygaagtaaattggttgcagaatgtttacaggtttttctctctctctttcacgttgtggcatccacctaagtagacagcaattatttctgactacctttttcaatatttctcaagaatttaactgaattttcatagaactgaccattaatttgtgctctttttattgatttaggtggtatatagttaaactagattattacattacaatcaacctgtcataaacaaatttaaggataaacacagctgactcttggcaagtaagcaattcagctggtaagaacagaagtgcttgggctactaagagtagcttattggccttgagaggtcagtgtacctgaccattagtgaacctctttacaaaggaaatggagagtgtcagtaaattcagagtcccttattggagtttcttttttttttttgagacagagtctccctctgtcacccaggctggagtgcagtggygcaatcttggctcactgctacctccacctcccaggttcaagcaattctcgagcctcagcctcccaagtagctgggattacagacgtgcgccaccacacctggctaattttcatatttttagtagagggtttcaccatgttggccaggatggtctcgaactcctgacctcaggtaatccacccgcctcagcctcctaaagtgctgggattacaggcgtgagccaccccggcccccttacttggagtttctaccataatataaaccaaaaagtgggggcccttctctcttccacctcctctgtcacctcctttaaaatcaatgctgcagtgctgcaatgagctatcactggaggtatctaatctcttgtatacactgcagcagaaaaacattgagagagctggtattgtcaatttcaattgtaatgaataactactgtgccatttttttctcatttttaagctgagctatttatttaagaagttaccaatgcatttagagttatttagaactctctatgcctgcattttgttttattaaagtatatgaaacaggtacttaaatacaaaatagttaaggcccaatgatagaaattcatactaaagaaagctcttgtttttaaagcagactttaggcattgagtgagggggaatgaggtcccagaacctccactccctaccccccacagccagaatacctgattatttatggagtttccatgtaaggttttgtttgaaaaagaaaaaaacatctcagcctttaaaaaaaataatgaaaaaggaaaaagaaaactcctgttctagtccagatagagttgccatttttagcaataaaaaatacagggtgcccagttattttatctgccatttatctgtgtcttatctggtaaccataagtccagatcttcttggcctaatgcagacaacaaagcctggaaactgtcagggataaaaagtcttctataacatcaggtgggaagttaggtggtaagataggaaataaaagccaacattttggggaaactcacttctgtaggtaaaaatgtagtcgcctatatcaccctgtacaatcctaagcctctgtggactctggctttggtttgttaccctatatcataactcagtctctatggccagtgaaaatngagtattcttgtaaccctcataatgtgttcctcagaaaattctctacattcttaaattccctctggcttacgcgggccttactagagaatattatggagagacaacttttgagaagcacgggtatggtggctttctggtcacctgccctggccttaggagtcctcactaaatttctcattcattcaactaatgttactgaacatctcttaagagaagtcatctagccaggtagttaagaacacygcgttttactgactgtgagatcttagacaatgactctgtctctccatttctgttttagcatttgtaaaatggggcaattatatttgtctcatagagttattgtgatgggtaaatgagtaaatccatgtaaagtgcttagaacaacttctagcattagtggggcctcaataaatgtaagcagacagcagcagcagcagcagcaaagatccatccacatcctgccacactcacacctactgctgcagttataactattgagttcagcaagtgccagaagaatggagcctcctgccttttggaaacagattgctgtggactgattatttgtgccgtgaccaacttcaaatgtctatgttgaaatcctaatctacaaagtgatggtattgggaggtggcctttgggaggtgattaagtcatgagggctgagccttcatgaatgggattagcatccttataaaaaggtctaagggagctcccttgccccttccaccacgtaatccagccatgtgagattacaatgtgaagacagctatctgtgaggaatgggtcctcaccagacaccttgattttagacttcccagcctctagaactgtgagaaacaaatttctattgtttataagccacccagtctagggtactttgttatatatagcagcctgaacaaactaacacatagttctctaaaaatttatattttttagttcctttcattttcatagacgtatggtcttttattttacagatgggcaaagtaaggcttggactaatttaagtgcctttgcaagagctactgagggaagtttagggttttctctcatgaaatatagctttaaagtcagacagatttggtattgagccctggtacaagacctgtgaccctgcaagggtaatttactttattaccttccatttctcatatgtgaaataatagtcagtgttttgccatgacaaagataaagatgaaatagttataatactaacaaccctggcacacacttagcacacatgtaccagacatagttctaagcatttacatatgtgaatgtatttaatatatataagtaggtgtccaataaattatagttgttattattctgccatgttttgtgacacacaatttaggttttaaatttctcttttatcgatattagtggcattcctagaattattaaaaacaatacatatttggctaaggttcagagatcatcgttttgtattgttttcgtagggttattttggagccgttggggcactgttggaactgttcaaaatgactgatgayaagtagagacgagcagtggaggaaacagcctcccaaaaggacagagaactaaaaaattgctgctggagaaggtgaaagtcgctttgggacggaagccaagccattatggcagatgaacctgctggatttgtaaataatttaaaatccttccagatgatcttttactcttaggttttgagctaatgattcaaaacgggggaatataaaaggttttttttctgtatactgtatttttttaaaaaaatggtgcagcgtggccaaacctaccaattgtatgcattaactttgaaaagttgtttgatgtttaagaaggacctgatatgtaagcgctggtcatttttcttctggggtttactgatcagtgtggtgattttaacttcatttagtaattactctaggagattttaccttgacttatatttttcatgacgtttcatgatttgctgttggtttcaaatgaaactacaaatctggcatgttttactgtgaacacttttgttatttgttttgtacccttttttgtcttgtttttctgttttagttgtcttctgaaaaaagagtygttccctctgtttctgtcctcagatgatgtccctccccctacctgtaacctttctttgacataattgttcatatcaatgaaggtgctgaccagctcaatacaaagttaagcacaagatctaaagctcttgaaaatgcccgtgaagagaagactgaatgtgttaatgaatttaatgagtctggcaaaagttgcaaattatatgcaagtttgtcctatcgcttataaatgtagtgtttcattggatttattttatgctaggttatattaagttgaaatagtctgtgattaaatgtcctcatccatgcacagaatatgaatggcagcaaatctttgtgcaagaaatttgaaacttattgggaaaagcctcccagtagattaattgttcatatcaggagatttagggtaagtcatgggttgaggtgtcagatagtaatatctatttgttttgtacatgtatatatctaggaactttgtaacaacacatctttaataatgttaaaggttttttcatttttaatattttaaactaaaaactgtacttcaatctcagtttctaaaattaaaaataatttatactgatctatatattttttctttttgaaagatttcattaagactgatgggtaactttcaaatgagggtcatgtacaaatattgggatgcatgagatcccatgatcttgtgtattgagcttattgttgaaagggatttttgaaggacagaacaattactccatgatgaatcttcctttctctgccttctgagcaccgtctttaatttccatatcttcaagtcttgaagaagttgatgttaattgaagaattcacttgtctggttgaaataaagcctgtttctgttgtgatgtttttagtgtatatgttattttcatttcttaattctcatgtttatagtatctgctttgtaccatgaaatgactgtctgttgtgtttttgctactctacatttcaaaattggaggctttcccatgagtgtggtatggtccaaaacactgtcttcaggtgaagctgtagccctatgcatagatttttaaaatagagctttattgtttctatacaagtgactccttaatgccaactacctctgctatatttggtaattccaaaggagtttcaaaatttggtcatcacagatacattttaccaacttctatctggctttaaaaaaattcagacagctaaagtgttcttgaaaaggataagttaaaaatctacatattatttataattagtgccttttgatggcctcttctattcctattctcatctatcaggtaacagcagaccttgattccgcagatcatggttctacaaaggaaatcagggcaagttagtgtgactgtattttttttaattatctgaaatcacttgatctctcattacaaacatttaaaatattggtgtagctgagaaaatacattattccattatacaaatatcagttaaatgttgactacatatagccagcctgttttttacaaaagagatcttgtagcctgaggattttcacattcacttgaattacagaaacttttcttagaatcaacatcacaaagaaactgggaagactaaagaattttgaccttgtgcaatatgaagtaagagcatggctttttatcgtgaggcagcttcagtctgggtccagcttagtcagttaccagttcaaagatatgctaagcctctttctaaaccatagtttcctcacctataaaatgggacaaataattgttttacatacatatttaaagagctcagcacaggggttgacacaaagtaaatgcttcattaatgatagctacaatgaaaaaataaattatttaaactaatttattaaatcagtaattcttaactttctggattgtgggaaacccatgttagtatggagatgtttcaccaatctccgtatgctaatacatatccacagctccttgtccacacttccaaaatcccatacttaagaaatctatcttgacagctcacttggcagcaaaagctgacttgagcattatttctcacatgtagtagggctcttcacatgttttgttgcaaagctcgtcatgagttagataacaggatactgactctgacaggggtgttaagtaataaacgattttgaattggctgggtgtggtggctcacgcctgtaatcccagcactttgggaggccgaggcaggcggatcatgaggtcaggagatcgagaccatcctggctaatacggtgaaaccccgtctctactgaaaatacaaaaagctaggcatggtggtgggcacctgtagtcccagctacttgggaggctgaggcgggagaatggcgtgaacctgggaggcagagcttgcggtgagccgagatcacaccaatgcactccagcctgggagacagagtgagactgtctcaaaaaaataaaataaataaataaataaatgattctgaattttgaaacacatctgatcccgagttttagacaaagggattgtggaaatatagttgtgttcttcaccttatgcagtatacatggattcagagtctctttgttgggaacaattgttataggtaatgtatacttgatgtcgttcagtcatagaaggaatattaagaagttactctgtgccaggaaggaactggagactaagatgcataggatacagcccctgcagagaaagacagcaaaatctcaagccaacatcagtcatcaagtgccacaagtgccattcaatcatttattcattcacattcacagcagtaaacagaacaaagatccaccatcacagagcttatattctagaagggaagacaggtacattactaaatatataatgttagatcagtactacaaagaaaaagtaagctggtgtaaaggctaaataaggggtagttctattcagaaaaatgagaaggggaggaatatctcagggtggtctaagacagcctttcctaggaagtgacctttgagcagagagttgaatggaggtgagaacacattgtgtaaatgtctgagaaaatatttttcactcctggcaaatgaaaatagggatttgaggaactgcaaagaggccagtgtctggagttaaaaatagaaagtggtgggagatgcagtgttgggagtaaacttgagccaggtcctataagaaatctgtgagggtagtggcctctacccagaagagaggttggtcatttgtcttccagaaggtgctagagaaggttttgtgaagtcttaaccaaagaataggaatcactaagtggagaggaagggagggctttccaagcagagggagctgggtgagcagaagcgctgagggaagaaaccacttggcttattcagggactggaagctctttgctatagctggagcctggttcatgagacagaaaccaggtagtgagaaagaggaagctggcccaactgtggaaggacttgtcttccatgctaacattgcggacttttccgtagtcactgtggagccatcaaagagtttcaaggaaagtgaaactagaaataatcaggtttcaaagtggtaaagcaaaatgctctgttgaagtaaatgagtaaacaagttacgtacttttgaatacctaacattattccatttttttccctattgtgccagacctcatgcagtagctacagagtgaaccatgctttcgctgtaagtaggatggctataaaaattcttgagaactttctcagaggacacaggctactaatagctacagccccactatgagtctattcattgagcaagaaggtttcaatactgggagcatcgtaaactatcactcacaagaattgttagaaagcagttttcctcccagtgatcagaagatgacgccacatttgtgaaaaagatttcattagtgtacatcgtttattaggtctaccagctgcccattcttttgctcatctgtttaatttttaataaatatcaatgatctgagaggcattgggtagcactgaggatgcaatccgatgtgaacaagacttcaggagctctgctttcattaggcttacatttggttaatggagataaacttgaagcatataaaccaataaataaacaagaaaatatcagggagtgacaattgctattaaggaaagaaacagggtgataggatagagagggaggagagagacttcttcagtcagatgatcataaaatgcaagtatgattaagtcatggcctcaacttttaaggaatgatgggctcaccttgctttcattcttgccacctcctcaatgaaaatgaaagatgtttttgggaaactgatagctaattttctttttcttagaatatttgatttagataatatgtatttaaaataaagttatcacgtaaaataatatattgatttagtaatgcaccttttttcccctgctcatttaatgaaaaaatattatttgaactgtttacttgaatctttattgttaatgattttgtcatgaccagagtcatttaatagtttccacagcacaagtttgaaatttaatactttttaaatttgtgatgtgttgaccactgggtttttaaaaaacccagccacaaacacctattcccatgatgagctcaattatttcacattccaaaaggtgtctcttcagtgtaaccatgtatgtcaagccttgcaaagtcaacttcaaaaggctagtttacaagtattcgtcacttgcaatacaaaaataaaaaggaattttgtataaaagtctttgcctgtttttttaaattatcaagtaaataaacattccaaactagaattaattgaggtgatttcagttaatgttttcactaaacagttttcaatcagtccataagaagagttcatctttttaaatttaagtattttttaaaaaaattcaacattttacatgcatatagttttaaaagtcaaatacttgcacaagactatggaaaacagcagcacccaagttttcttttttcttattttattttatcattgtgaacacggtggtttcccaagggtaaggtgatggagataaaaatttttgagtatttgcatatctaaaaatttttagaaaaatttttattctattgtcatgcctagttgatagtttggcagactacagaactttatgttagatgccatttttcttcagaattttgaaggcatggttctattattttggcaataatagagaaataggaaccttcatacattagtgttgggatttcaaaataatacactcactttgagaaacagtctgtcagttgttcaaaaagttaaatatagaattaccatatgatctagcaattccattctcagatatgtatatacgcaaaggaaatggagatatacatgcacatatgacttgttcgagcatattcttagtaatgttactcataataactaaaaaattaaaatttccctaacgtctatcaacagatgaatgtataaataaaatgtgtacttctatacaatgaaataatatttggccataaaaaggaattacaacacaaatgaaccttgaaagtattatgctaagtgaaagaaactagtcacaaaagactacgtattgtatgattccatttatatggggtctccaaaatagccaagtctacagagacagcaagtagattagtggtctcctagggctgagaatttggtagaaatgaggagtactgctaatatgtatgaggtttcttttgtggtgatgaaaatatactaaaattgattgtaatgatggttgcataattcaactaaaagtcattgaattgtacactttgaatggattaattgaatggtatgtgaattataggcatatgttgttttattgtgctttgctgatactgtgttttctacaaattgaaggttgtgacaactctgccttgagcaaatctattgatactgttttcccagattgtgcccatttcatgtctgtttgtcgcattttgataattcttacaatatttcagactttttctttattattataattgttatggtgatttgtgatcggtgatctgtgatcagtgattgttttctggtgccacaaatgtaagacactgaacttaatcggtatgtgttgcgttttgactgttccactgacctgcagttctcctatctctctccctctcctcaggcctccctattccctgagacacaaaaatgatgaaattagcccacttacaaaccctacaatggcctctaagtgtccaagtgaaaggaaaaaatcacacatctctcatttattagaaactagaaatgattaagcttagtgaggaaggcatgttgaaagctgaaataggctaaaatctaggcctcttgtgccagttagctaagttgtgaatacaaggaaaagttcctgaaggaaattaaaagtacactctagtgaacacacaaatcataagaaagcaaaacagccttgtggctgatattaagttttatgtctggataaaagatcaaaccaggcacaacattcccttaagccaaagcctaatccaaagccaagctctaattctcttcagttctttgaagtctgagagaggtgagaaagtggcagtagaaaagttggaagttagcagaggttggttcatgaagtttaagagcagaagttgtctccataacataaaagtacaaggtgaagcagtaagttatccagaaaatgtagcaaagatcattgatgaaggtggtaacactaaacaacagattctcaatgtacacaaaacagctttctattagaagaaaagacgacctcggactttcctaactagacatgagaagtcaatgtgtagtttcaaaatttcaaaagacaggccgactctctttttagaggcttatgcagctggtgacttgaaggtgaagccaatgcttattaaccattctgaaaatgctaggg

SEQ ID NO: 95206 - DNA, 55085 bp, Homo sapiens
aacaggccacccatcagtactggtccgtggcccagggtttggagacctctgccctaggtagtaataagagtggacagctgttatatgtaaatacttgttccccgatgctggaaagaaatagcactaaaacataaatttaattctttcagcaaggcaattttactttctgcagaaagggtgctcatcgcagatggaacaatagtgagaggacacctgaacaaaggagggaagcaattgttagcccttatgcagtttgtccctgctactgtgtcctatgtccattggcagaagccagaccgcacaatctaaactaaaacccgattggctgtttaaaatttttctaaataggtaaaagtaatggaaggataaaggaaaagaggaagttgcttacgaaaggacttagaaaagtaataatattcccaaataaggaaggggtataggctgtgagctgggacatgcctgtgagcacgtccagcacagatatcttggttaaagtataaggacatagaacgtactatgtgcctgtgagcacgtctaacagttacatagaatagggcttgacaaagagttattagcataaagcaaggaggtttgaaggaagttcgtctttaaaagaaaccattatttctaacacttacgatttattctttaacaagaagggaaactttcaagaggaacttttactttctacaacagctgacctctgctgagcgcttactacatgccaagcactgctctgaaagtttaacataccattcactcatgtaatcctcatattaatgcacatttactcacgtggaagccgagttccagggcatttgtcacttaccaaatgtcacatagccaaaatttgaatttgagcccaggtagtccagctctgggaccctgctgtgggccttcctgctgggccacctcaagggcattgaaagccagccccaccccactgggacacaagttcagagaagggcagagctggctgcctgtccagtgcttctttcactccaccacctacagctggccgctgagggagcattcacatgtgactctgtccccagggactccgatcttgccttaaagtcctccagggcctctgrggatgggggcacagccttcaccctcaccccctctaatccaacctctagtcaatagccaggatcagattctcagagaggggctgccctgcccagtgccacacagcttagtgctggagcctcagggtcaatgctgcaggggtggcccagtgtccaggactgtgttcaagacatcagtcagaggtcacaacatcccaggccctagactgagcctaggggtcaccatgttgataccttagaaatgtttgggaggttcaaggaagctggaaactgggttccagtcctggctctgtgcctctctgagtctcattgcaaaatagaggtcaccagaaggattactggatgaaaaatgaggtagcattgcagacgtgcatggcacgtacactctaggttgcttcctagacagaaagctcagttcgaggctggtggcatccatgctggcagcagccaactgtctgcgacagagtgaggaggggcatgccacgtgaaggaccagcatcagaatgacatgggaagaaactctcacaatagcagaagaaagagctccttcagcctaacatgtagaactcaagtcttcttgtcgcgcttctgtcccctcgcccctcctcccccactgagaactagcttttactgagcagttattacatgccagctacctcgggtgtgtcagctcatttaatcttgacaacagctccacgagacaccctcaatatcactgtccctgttttccagatgaggggacagattcctagggtgttatgtaagtggtccccggggctttagaggcaggtttgcaccaaggcccattctcccagagccggatccttctccttccctgggatacagcacctccaccctgccaggccacccatgtaaaggcagccaattcagagccacctcttatgcctgcatctccccaacaattcctgctgggaaaccactcctcgtatggtgtcatctacaccagtgggtttcaagcttgagaagaatcaagttctacagggctgcttaaaacacaggttgctgggtcctgtctctcagagtttttgactcagtcttggttgagaattttcagttctagaagctcctgggtaatgctaatcctcctgttctaggggccatagtcattgtccatactggtgctatccaatagaaacataatgtgagccaaataggtaatttaaaatctgcttgtagccatgttaaaaaagtaaaacaggtaaaattaattttaataatatattttatttaacccaacatattcaaaatattatcattttaacaggtacctatatataaatatcaattttttttttttttgagacagggtctggctctgtcacccaggctggagtgcagtggtcccatcactgttcactgcagcctcaaactcccaggctcaagtgatccctccacctcagcctcctgagtagctgagaccacaggcatatgccaccatgcctggccagtttttttgtttgtttgtttgttttcattttttgtagagaagtggtctccctatgttgcccaggctggtcttgagctactgttctcaaaagatctattgcctccacctcccaaagtgctgggattacagttgtgagccactgtgcctggtgaccttttttttccattcttttttggtattaatctatgatatctggtgtgtatcttacacatagcacatctcaattggactagccacatgtcaagtaccagaaagccacatgtggccaatggctgccacattggatagcttactccagaccctccagtgaaggagcaggtggttggccacgtgcttccaggcagcgctgcccacccaggaaaagggctttcagccctgggacctggagccttggtatgcagcctgtgttcccttacctgatcacaggatagctgggagcatcaaatgaggtggtgatgggacagctgtgggcttggtgcctagggagaggggagactgttggctcacagatgggaacggcaactgctctggaagtgctgctcctggggtaagccatggtcatgttgagccagagatcactggtgctgcccgatgtgtcagagaagacgtatgcccactcctctccttagccgtatttggagaggttcacgctgaccactgctccctgatgctgctctacacctgctttctgtggggctccaggctgtgcctggagctgttcaggacctggctcttccctcaaggaactgtgacagtaggtagtcaggcagacatgagcagggcaggagagggccctcccccaacgaggaatgtcaagtggccatcagatgatggtcaggcagttgataaactgcttctctcaaataataattggtcgcagccagtgccagggagaggcagtctcccaacagatggaaacacctgaagctggtgatcagcttcccgataagatctcaggagctgggcgagtgggctcaagcatgcacactaagaggcaaaatggcagcgattaactggtagatgaccttcctctaggaacaccggtaagggaaaaacacctcaaatgagcgcgcacataacttcagtaaacacagctgtgcattcggcccctcccaggtgctgacaggccaccgcgcacgcagacagcccgccccaagggaagaatcaggggcgaagagagatgcaaccccccgggagcatgccaacctacaaaaccccgagtcaaaggtcaagccacacacttgcctctctcaagtcacctgcttggccctcttctaagtatactttacttcctttcatgcctactccaaaacttttttttttttttttttttttttttttctgagacggagtctcgctctgtcacccaggctggagtgcagtggcgcaatctcggctcactgcaagctccgcctcccgggttcacgccattctcctgcctcagcctccccagtagctgggactacaggcgcccgccaccacgcccagctaattttttgtatttttagtagagatggggtttctccgtgttagccaggatggtctcgatctcctgacctcgtgatccgcccgcctcggcctcccaaagtgctgggattacaggcgtgagccactgcgcccggcctctaaaacttttaaatacattttcactcctgctctaaaacttgcctctcactctgccttacgcccctcagtcgaattctttcttctgaggaggcaagaactgaggctgctgcagacccatatggatttgctgttgctaacagtaccattgttccaggggtctggagagacaaggcaagagaaagtcctcttcagacagtgcgatgcactgtgtaatctcagggagccgttccacaaactggatactaaatgtgatgccgtcacatttcttttctagctaaccaccccaacccaccttccagtgcgcaggaatccacaccctccttcttgcagcctcatcctccctccaaattgccctcaagccccggagctttcacagcccacaggggacctggtggctccgttccacacctcaccccagcagggccagcctgagttaccctgtgggcctgcggctgcctgtcaccgccgccacacgggggcgccatagcaagccaacatccccgagtccaactgggcggccgggccaggcgccggggggatggatgctctgctgcccacctgtccaggctgcggtggccccgagggcagaagtcccgcctcctccgtgctgggcacggctcttaagacttggccgtctccgtcgcccctcagcccacacccctaacagccatgtcccatgtccctaactatacctgggaaggcggtaccaaggtccccttcgttttccaacccccaacctctccaggactggctcaagcgtggggcaggggcattgcctcttctcagaaacccagcagcatctacactccctgggcctctacctccagcccgggggacctttacctgggctaggagtgggcacacctggccttcccctgccacgactttcacgctgggtggtccctcgggataggaattgggaactaaaacgcccagaattggcctcatcttcatacgggatgggcaaggagacgcgggttacgacagagggggaagccctggtcattatttcgaaaataccttctcctccgctacccccgcctccccggcacatttcccgctttccctggagggcggacccagattttcatccctccaactccaactccttcgggcctgagccagcgcctcagatggggcttcgcctggtctaggagggtccgcaggcccccgagtctctgggagaacagcctccggccacgccgtgcgctctcggtcgcagacacaggcgtccctgggtcccgcaggatcctgccaccagcccgcgggccccgctggcggaccacgggcgctaggcgtggactgtccgggcggaggaggcgccccggggcaactggagaacaactttgggggtctggggttccaaggagaagtttgggaacagtcggcgttatgcggacttttgcaggctgggatggggtttccgggcaggtttgggggaaaaaggaaggggcctaagaccgcgcgcggaaagatgccgttatttggaggcgccgaagcgggcggagccagccagcaggacttcgcgccgccgccgggccagagcgctgaggatcggcgttgccagggacaacgcgttctgggcggagctgctgctggggcggacctgagtctgaagaggtgggggcggagcctggggggctgagccagaagcggagttgtgattggtgaagaccacatgctcggggtggggcctgggctggggcggtgtggaggttggggcggagctctggggggcggggcggggcgggggagggcccggagcgccggagccggaggcggagacgtggttggcggggactgtgcgccctgggaggggtcggagtcggcgggggcggagccgagcgggcggggagggtgctgggtcgcgcctggcctggggccgaggcggcgcgcggcgctgacagctgagtcggctcgcggcctcccggccccctcggcgcccggcccgaccctggcctggcctgccctgccccggagccatgagccccgggctgctgctgctcggcagcgccgtcctgctcgccttcggcctctgctgcaccttcgtgcaccgcgctcgcagccgctacgagcacatccccgggccgccgcggcccaggtgagcggggctgggggcggggcctggctggggtgctgggactgggggcctggggacagcgtctaagccggcgtccaggccgggggtccggcctcgcctagtgcgcgcggccgctgggagtcggcggccccgagaggggcgctaactattcttagtaacaaattactcacagccgcagcagctgctgggcgcccaccgcgcacagctgggccccacaaacgtgatggcagccacagccctttcaggtaggcgctattgttaacccatcgttcagacgaggagactgaggcgctcagaggcgaagtcacctgcccaaggtcacacggttggtaagcctagatttaagcccaggtcagcctgcctccaaagtgggcgctgttaactttgggacttggacagggtcagcctggattggagcacgctgtacttcagtcatgtttccttttgcttgtatttctgttctgggacaccccatttgtcttctccttagtacttacaattgcattcttggtccccacccccacgcaacttacacccccctcaacttgccaacccccccccacccccagcttagctttgtgaagcttaaattaaatgtgtcatttccctgctccaagggcttcccatcacttgacaactaaatgcagttctaaattaagtcggctgcatggcccgcgaggcccctgccgagcactcagaacccactctgcagcttgctctttcctcttgctttctcactactgcccccagcctttcttctcccagcctccccctccccccgccccccccgcagcttccctccccccgggtccttttctcaagcctgggcctggcgggcttcttcctctgcttgtctcaaacaggccttgcccagcaccttgtgtaaagaccacccagccccagacttctcaggggccatcacctctgaggttaccttctttccacctgttgactgtctgttcacctgttgactgtctccccctctagaatgtgagccccgggaggacagggacactctgtgttcgcttgtgtatccccagtgcctggcgtgttgcagatctcaataaatatttgttgaatgaatgaataaacaattgtattagacacactttttaaaatctcaggacatgaatattctggaaggcacccatctccagcacaagccagatgtactggcgttagaagcctgaatctctgcttgatgggttcaggaaagatctctgtggctggtgacatagggaggcacctgttctccctgctggctctctgcccttctggtgctctctctctctctccttgcttagctcctctgccttctactttacctggatgcttcttcccccagccttccaggtttggcttcaatgctaactcctcagggaggttcctcctgctyccccaaaaatattatgttcattttataaaccctgaaatcactgtaattttcctttacagcataatgttaattgggcaattatttgtgcaagtttttcctaagtgtctcttttccatgggccccctgtctgtctcagtcactgctgcatctccgacatgtagcagcacattgtacatgcatagtagacactctatgaatagcaattcaaggttgaatggtggaaatctcccgtaagttccgtggtggacactatcaccctctcaagttttcagagaagccatcagcacttagaattgaatgagtttggtgcttgttctgataagtttcatcgttacttggtcttctcataaactcaaatgacctgttctggtctctgtgtcttgagaaagcagaatttaaatcatcttaaaaaaaattgaaatgtaacttgcattccacaaaatgtattctttagtgtatgattcagtggtttttggtacattcacagcactgtgcagccatcgccaccgatttcagaactgttttgtcaccccagaaagaaaccccgtacccattagccatcactcctcattttctcccacccctcacagccctggcaaccatgaatctgctttctgtctctgtggatttgcctgttctggacatttcatataaatggaatcatacaatatgtggccttttgtgtctggcttctttcacttagtataatgtttcaaaagttcattcatgtagtagcatgtatccttattgctttccttcttatggctaaattcttcccaaatcttataccacagagtctacatgtgacctgagtgtgtggggtgcggagggagcagtgggaggaagatgaatataatcatgattgggctatttattctaaggaggtgaactgaacaatgcatatataaaaagattttggattaaaaattggttagtggtcaaatataaaactgcactaaatgaaagttctggaaactcttctagcagaaacccgatgccttgacattaaaagcctggatctttaaactatgattggcgatactgtggttgacgagagatctgtgtgttgagtctccagtagtagcatttgcccccgggtaccccagggctttgccagctggcaggcaaggaaccctctcgctgcaagaggcaactcttcatcttcctcattctacaggaggccctccctcagtgcccctcctctgtgcttttcttaccacatcctactgcaccgatccgtgtaacagctgaaaactcagacccccacactcagatcccacacaaacacctgtagcttctttatttctctgtcactgttctaacttccctcatcagcccctactctcctggtaatgtgggagtggatgtaaacttgacaatgaaaggtctttctctcccaatttttatttatttggggataaattgactcctcctggacagttctggttccactccgatttgcccagttgctggggtggggctgttcagcaaggagcagggtggccagccatgggggagccccacagctggctctggcgggtggtgcatctgatgagctttgggtgcccagctgagcactcgccaccctgcccctctggcatgagccacaatcatggtccctcaccctcacgcytacccctagtgggtagcccgctcctccactactggagcattcccttcatccctctgggtgacttcactgtgggctctccagatggcctctcctcgttcactggccaaggttttctctgcccacaggagagcttgggtccccactcagccaatcatgatgttgcaggaaactggatgtgctggagaggtgtggggtggtgggcggtgggggattgcctctcctctctcccagggctgctctgctgtgtccagtctatcaccagggacatgccaagtgggcttctgcctgccggggcgctgagcaacaagtccccatgtctggccatggtgttagccttacctgcttgtttttaacacctgggtcttcctgttctgttgtcgcctccccagcgccccctgcaggtgccagaaggaatgggtttttttttcccctttcttggtgggccatgaggaccccacccctctctgtgccctctgtcttcctgagatggcactcaccttccttcccatgtggcagggaaccccaggggttagggtggaagctctgggctcagactctgtcctcacttaagtgactcaaaactgagaacattcccccagaatgtgagctttgggaagcgacaatgaggacactagattactctggaaatacatccaggcatgtgtgatgatcacagcccatcttcctgcaagttcaaggccactcacctggcgtgggcctccactgcgggcaggcggccaccccgtacttccttccccagggcgtttattcgcctactctcccttcctgcttcagtccccatcacctccccctccatccgcactctcagcttttattcttgcctcctacttccctgagcaaagggagcagccggtgagagtttccttcctgggctccactgagcagctgcccacctcctgccccaggcccacgcacaccttccagctgttccgggagggtagcccaggccaacctgccccctctgctcagcaaccctgtcctaggagcacccccacctccaaatcagcacttttcctcctcttctgcatcatccccatttttatataatatgtaagaattcaaagcttggaacaaaacctttcccttcaccctctcgttccctgtagctgccgccccctatggtaacccacctggctgactgcctgcctttgggcctcccttttctcccctctggttctctctgccccatacctctccaccaaacttgctgggggctcggttcccggtgatctccatgttgtcgcacccagccgtcagccctggatcctcgtctgacctggcccccagcagcctgggcagagccgatgccccctccgccttgtcccgcatcctcctctggcttctcacccaactctcctggctctcttccctcctccccagtgctcccgctcagtccacttggctggctgtccctatgctcccaacttctcagtgatggcttagttcttggtcctcttctctgtctgtatccattcccttgtggcctcatccaatcactgggctggaaataccacttctctgctgtgggctctcaaatttatgtctctagcctacagcccttccctgggctccagatctgagtgtctaacttcctgctcaatagtccaccacaaaccttaccggtcccaagccaagctcctaatttcatctgcttgtctgagattggtccccccaaagctgatcctgagataagaaatgaagtgtaagtagtttaggaggtgggggatgatcccagtttgagcagtgggaggaggagagtggataaagaaggtaaacaaaccaataaaacaagttacctcttggggaaacaggtgcaattccctgggaaccctggggacttgtgtagagcacatgcccagagctaccccagaagtggaggggctgaggtcattggtggagggctgctcaaagtgggttcatctcctgtgggcagagccagagacggccctggcaaattgcagggggtgggcacggtggctctgccaccccaaccagctcctcctcatcttggtagatggtcgctccatccattcttccagcagcccaggccaaaaacacagagtcatcctcacacccccatagccaaacggcacgttccagtattccgcctcacagagcattcagaatctgacctcttcttatcattgcctccgctgccctgctctgttctgagccctcgtcacctctcccagtccttccctgtcactagtgtccytgcttcctcccctaccctggttactctctgcactgctgcaaaacaatccattcaaacccaagtcagatcccatctctgctctgctcaaaaccctctagtggaccccagctcaccaaagtcaaagcaaaaatctggaccacagcccacaaggctctacatgacctgcccccagtcttggtgacccaccttgtactctgtttccctcaagtactctgcccgagccacactggcttcctcactgtccaagcacactctgacctcaggaccttggcacctgctgttcccattgcttggaaggctcttcccccgcttcttgcaggtctcatctcacaagccaccctcttagagggacactgcgtgccctgcctgcattaacccatttatgcctgaggttgcaattttttgaatttgaaaaatcagaccttggtgttgaccttgagcagtaggacataaataacttccacaagcttagcgttccaataatggaacactaggcataaatgggttttaaacggacacccacacactcatccccagcccttcctcttccccgtactctgttctctttttctcctatcaccctctgacattgtctttacttgtttatttactctccgcctttccctgggagaaygtgattttgttgtcacccattggggatgctgcattgagcttggtaggaataaagtcatacaggagacaggaagtcatgggccccttggaatgagcttcaggatgacactgcactggcttctttacaatttggtgaacacagcagatttatatgaccaaaccatcccttgctgagatgggctttggggagccctggtaccagctgtgcaattgtgggcaaatgacttcaccctttcatctcggctgtcctatataatacggttaataacagactgatcagccatgtggggaggttggaggggtgaagcctagcgtggtggtgcccagcmtggtcagtattggggaatatctgagggtgatcccacacaatattattgagtcctttctatctgccagcccccaacttctgtgccagggagacaggaaaaaaaactgtttcttctccaagggggtstttggagctggtcagacctgggtttgcatcctgtcttcattcttactgcctggtgtccctgagccagtgctgtaacctccccatgcctcggtcctcctgtctgtgaagtgggcctagtaataagatcttgtggggaagggagcgttctttcctgttgactgctggtaagcctaatgtttcctgtttcttctagtttccttctaggacacctcccctgcttttggaaaaaggatgaggttggtggccgtgtgctccaagatgtgtttttggattggtgggttctcatttgtcacttgttgcccttactccaggttcccttggggcagctcccccaacccaatccagcacacagactcccagcctcaccttcccctagcccaggttactcccagccccagcagttcctcccctgagtggaggcargtgaggctggcttggaagccatgctctgccattcatccactgcaggaccttagaccagccgtcagaagctctctgagcctcagtttcctcatctgtaaactgggtgggggggtgtgaccaggtaacagtcattgtttggtgtgwcacttttttacatttttcaaagtactttcaaagatgcgaatcatttgattcccaggacaaccttttgggacaatcaaagaaggagtgtttccaaccctattccatggctgtggaaactgaggcctgctgggggacatgactcggcaagtgagcaacagggcagagccttgcccccrgggctcctgggccccaggacagcactcttttggtagcatgcattgagcaccttctgggacgggaaacatcggtttctcagctgggcggggttggtgatggtcatacctcaggtggttgacagtttccttcgggtcactttggtttccagggctaagaagtatggacctgttgtgcgggtcaacgtcttccacaaaacctcagtcatcgtcacgagtcctgagtcggttaaggtaggaggaagagtggtttccatgagggagttccctgcctttycttgggttgggggagtgaagcctggtcccagagactttggatgaatgttccagagccaggcgcatttcggctggtttcccaaagatccagaaaggaatggcatctttccctctaagcacccactccttggggactcttgcaagcattgccttttgatgtggggagtagatggggaccttgctgtccccatttgggttggaagttttgcccaactagtgcacacacgtttagtttgcctctctttgcctcagttccttcatctgtgagatgggaattataactctatctccagggctatgataagaattaaaaattgatcagtttatttaacaaataatatgtcaaaacatccttaaagagtgcttactatgtacttttctatgcacttcacaattagtgacgcatttaatcctcataggagtagggactcttattagtcccttggccaacatggtgaaacctcatctctactaaaaatacaaaaattagctgggcatggtggcaggcacctgtaataccagctactcgggaggctgaggcaggagaatcacttgaacctgggaggtggaggttgcagtgagcagagatcgtgccatggcactccagcctgggtgacaagagtgaaactccatctcaaaaaaagggccaggcacagtggctcatgcctgtaatcccatcactttgggaggctgaggctggtggatcacctgaggtcaggagttcgcgaccagcctggccaacatggtgaaaccctatctctactaaaaatacaaaaattagctgggtgtggtggtgggcgcctgtaatcccagctacctggggggctgaggcaggagaatcgcttgaacccgggaggcagaagttgcagtgagctgagatcgtgccacagcactccagcctgggtgacagagtgagactccatctccaaaaaagaaaaaaaaaaagaagtgaaatgagggaaccaaggcaggtggcattgtctgtcctgtctgccatgaaggttccaagaatgggtatctgctgtggagttggcagaactgggctcaactccgggctctgccaccaactggctgtgggaccttggacaagttgcttcattctgggcctccatttcctcatctgtgaaatagagttggtgcctctgttacagggtggttgtaagaatagaactaaaataatataaatgagccatctagcccctgcctggcacacagcaattgctcaataaacaatgatgcattttttttcttaccatgggtgcgcagcagatgtgtggggcaattctctgcaatggagggtggctgtggtgactctgagagggataaaatacaacttacagtcaagacaaggagacaggttgaatgaataaccaggaatctctagcagaatgttaaaaataatttttcattaaaagtttaatttcaaacatagacacaatttaagacttgtaaaagcatgctaccaaaaaccatgcacaaagactttcgtgatgcttaatgagaaaagaagtttaaagatatatattgatatagtgaattatactgattgattgatattcaaatgttaaaccaatcttgcattcctggtcatgatatattatcttttaattattgttagattcaatttgctaatattttgttaagagtttttgtttccatatttatttgattcttgtaatgtctttgactggttttgacatcaggttaatactgacctcataggataagttgggaagtggtaacttcctcctctatcttctgtaaaagtttgtatgggagtgatgttatttcttcttttaatatttgatataattcaccagtgaagtcatgtgggcctggagttttatttgagggaaatttttattttttttaagttacaaatttaattttgtttacattgtatgttttaaattttaaattatgataaaatgcacataacataaaatttaccatttttaggtgtagagttcagcagcattaaagacattcacattgttgtacatccatcaccaccatccatctccagaactttttcatcttccctaactgaaactgtgtatcagttaaacaataactccccattcccctccccccagaccctggaaaccactrttctaccttctgtctccgtgaaytggactactttatgtgcgtcatacatgtgtaatcatatggcatttgtcctttcgcatctgacttatttcacttagcataatgtttccaaagtgaattaatcttgtagcatgtttcagcatttccttctctagttgacatatggcattcagattttctgttttcttgagtttgataattcacatatttcaagagatctgttcacttcacataatttgcttaaattattggcataaagttgttcatgagattttctttctttttttttttttaatgtctgtaggatctgtgatatgttccctctctcattcctgagagtagtaatttgggttttctttttttttttttttcttgatcagttcaccaaaaggtttatcaattttattcatctttccaaataagtagcttttagttttattggttttcttcattgtttgtcttctatttcattgatttctcctctttttttttttttctttttgagatgaagtcttgctctgtcacctaggctggagtgcagtggcgtgatctcagcttactgcaacctctgcctcccaggttcaagtgattctcctgcctcagtctcccgactagctgggattacaggcgcccaccactgcacgtggctaaatttttatttttttggtagagacagggtttcaccatgttggccaggctgatctcgaactcctggcctcaagtgatttgcctgcctcagcctcccaaaatgctgggattgcaggcgtgagccaccacccccagccaatttctcctctttcttatttcctttctgtattcactttgggtttaatttgttcttgttctgatttttaggatggagtttaaacaattgattttagacattttttctgttctaatgtaagcatttagagctatacatttccttctaagcactgctttaggacaaatttaccacaaattttgatatgttttattttcatttggttcaaaatattttctaacttcccttgtgatttattctttgaaccatggattatttggatgtatgttattcaatttttaaatattaggggatattctagatatctttctgttattgatttctaatttaattctgtaaagtcagagagaatactcatcatcatgatttcagtccttttaaattaattgaaatttgttttatggcccagcatatggttcatcaaagtgaatgttaatgaacccttaaaaagagtgtatgttgtgttattgttgaataaagtgttttagaaatgtcgattaggtcaatttggtcaatagtgttattcaaatcttttaaatcctttctaattttctgtctacttgttctagtggttgcagggcaaggaatgttgaacccttcataatcatagatttatctatttctactttcagttccattagtttggcttcctgcattttgaagttctgttatcaggtgtgtacacatttaggatggatttgtctttatgatgaattgactcttttatccttagaaatgttcatctttattcttaataacattctttactccaagtatattttgtctactttaagccattccagcttwattawtattattattattattattattattattattattattattttgagaagcagtttcgctcttgttgcccaagctagagtgcaatggcgctatctcggctcactgcaacctccacctccagggttcaagtgattctcctgcctcagcctcccaagtagctgggactacaggtgcctgccaccatacccagctaatttttgtatttttagtagagatggagtttcaccatgttggccagtctagtcttgagctcctgacctcaagtgatctgcccacctcagcctttcaaagtgctgggattacaggcgtgagccaccatgcccagcctccattccagctttcttatgyttagtgttgcatgttatatcttttttctgttatattacttttaacctatctgcatttttatatttaaaatgggtttcttatagatagcacacagttgattcttgctgttttatacagtctgacaatctctgcctttaattagagtgcttaggttgtttacatttactgtaattattgatatggctgtgtttaaatctaccatgttactgtttgttttctatttgtcccatctgttttttgttcccttttcctcctttcctgccttcttttggattaagtatgttttagtattctgtttcatctctactattgtcttattgattgattgattgatcgattgagacaggatctcactctgttccccaggtttcatagctcaccacagcctcaaactcctgggctcaagcaatcctcccacctcagcctcctgagtagctgagactaccaccatgcccagctaaccactattatcttattggttccttttctctctttcttagttgttttcttagggtttataatttcatctttaacttatataaatatatcttcaaataatattataccacttcatctcagtctactgttaagatttttctctttatcactgatgtcagcaattgattatgatctgccttggtatactttatttsctgtacttttctttgttaattctatttgggatcctttgaatttcttagatatgtgggttccatgatcatattagtaatacatgttttatagttcttgtctgctagttctatcattccattatctgggcctgggtataggtcataatatcctgctttgtggcatgtctaatgattttttattggatactggacattgtgaattttacatttttgggcactaggttttgttatattcctttagagattctttgacttcattctgagatgataaagttacttgcagatcagtttgatcctttccaggcttgctttaaggcttttataagtgggagtctagagtagacttttacttgagagctagtttagccctactgctaaggagtgaccattctggggcctctgcggaaggtcttgtgtctgaggtttgtctattctgggtagtggaaacttgaataattattggccccgtgtaagctctgagaattcttcagtctgtagtcacccagtaattcttctttccccagaagttgttttggccagtcttctgaagttccaccctacatttgcatagattggtatacatccgaagacctaagggaccccatgcagatgctgcgtaggagctctttccatgcatagcttctccctggtactttgtcctgctctttctatgcacagcttctccctggtactttgttctgctctttctatgcatagcttctccctggtactttgttctgctctttctatgcatagcttctccctggtactttgtcctactaattctggcctcctttggtctgcctagcctctgatctctgtctattcaacttggcacgtctgctggactgcatttaggtcttttctctttgtgctgctgtcctggaattgcctctgggtagaaagctcggtaatcctaggtcataggtctcacatttttcccctccttctcttgaggttcacaatcctgcactgcctgttgtccagtgtctgaaagtagacatttcatacatttcccaggttttctggttgtttatggcacaagggcaagtccttagcagtttctccttcccgggtggaagtgtgccatcggtgtgtgtgtgaccagaggaagcagcaaggcactgggggttccctgtgcattcctcacatcccatagtttatgtcaccaggccatcacaggatccccagcctctgggacagcaggccatgggggtgcctggttgtgggggtcacctggtcagaccctgactgaggctactctgccttaatggtagggatcttcagttcaatctaagaatggctcacttagacctcaggtgactctagggtatttgagaggggcctgtagggtgggcatttactgtcacagtcttcctcttggtgggacagaacttgggttacaaatgacagtgtttgggttacatttgaggtccctggaatgtggttcctgacacaaagtcaggcatttctggggcttcttttcagctgaaaaatcgatattaaacccccaggagctaatctcagagaaggtagcagcacctgggttaaccgatagttgagtcatcctcttactgcttcccagcacccacaggataaagcagtagcccagagggcaggcctctgggctctgggtcctgcagcacgttccccctcatgtacctctgcctgaatgtaccaggggacctgtggtcccttggtctggatcatagccgtctctcccctctctccgcagcaaattgcctggattcaaatcctgtgtctaccatttactatgtgtgtaaccttgggtcagttttcaacctcagtttctccatctgtatgtaagatgagcataaaaacaacacccgcagccaggygtggtggctcacacctgtaatctcagcaacttgggttgactgggcattgagtgaacygcagggtgcagctgtgcacctggcatttattgagcacctgctatgtgccgggcaccattcttagcacttcttatgtagaattgacactcttcacaacaaacttgccaggcaggaactcttatatccatctaagatgaggaaactgaggggcagaggaggtgagtaactcatccaaggtcccagagttagcatgtggtgcagcagggatgctgagcccagatccaaattgaagctggctgactacacagcccacgctgttaaccactgggcaatcctgcctcaagagctgttggctgatgttactgttgttaccatccagctcttggtgaggtaagttgagctttcctccggggagtttcacaatcctgcactgcctgttgtccagtgtctgaaagcagacatttcatacatttcccaggttttccggttgtttatggcacaagggcaagtccttagcagtttctccttcccgggtggaagtgtgccttcacacttccttgactgcccggcttgagtgcatgctagcaatattaaatgtgtgccaagtgcccttcctgtgacccagaagcccttcctctcccggaagggcttctccccttctcactctggtttcagagcagcatttgccttttcctgttttgctgctttggaaggtgacatggtatggggttccgagtgtgacattggagtgagcaagccctccccacgctctctgactgtacgtccacaggaaaatcacttcgcccctctgtgctgcattttccccatccccacacagctgatgttacttgaagatagggacgattgtgtgggatyatgcatgggaagtgggcacactgcggctgagactcagccaatggtgattatttggggcatgtctcagaagagcatcttgcagctactcatgggtgcatgagcctatgttggttttttggggatatttagaagttcctgatgtcaaccaagtacaacaaggactccaagatgtaccgtgcgctccagactgtgtttggtgagaggtaaggaggtatggtggaaggcctgggtgggaggccaggagagccctgctgtgagtgagggccagtgcggtccagaatgtggggtgtagaattgaggcctgaggccctggctgccaggcatgtgatgagtgccccgtaaacagtggccccactcttgtcacgagcagtttcctccttctcccccaacctccagatggcagggaatatagaggccactgaggttgggtaacacgatcatccttttcctttttaagttatttttaaaattccggtaaaactgacataacattcaccattttccccaccttagagggtacagtctagtggaattcagtgccttcacaatgtggcrcaaccgtcgccaccgcctagctccaataccgtttcctcatcccaaaatatgaccccaagcccatcaagcagycgctccccaccccccaccctctttcccgcatcacgtrtgtgtctcctacagactcttcggccaaggcttggtgtccgaatgcaactatgagcgctggcacaagcagcggagagtcatagacctggccttcagccggaggtgagtgtggccggaggctccgtggctcctgcctggccagaggcagtaggsgctgccgaagtgtaggtgggccttggggagggaagtgtccacccaagggggcctccctcagctgaagggagagaggaaaaaggggaaagacagggtgttaatagtcaaaagggrgagagagagagacaggctgaccaagtggggatgaatgaggcccccaygcagtttgggaacatcaagggctgagtgcccacgatggccagaagcatgggggttcctgtcstccaagagctccccacatcagacctcatcactccttgtcagggcttcttcttttattcatttgagtttttatgttttggtgatatagttgtgctttgtataacgatgtttcggtcaacgatggaatgcatatgtgacagtggtcccgtaagattataatggagctgaaaattgctattgcctagtgatgctgtaaccatggtaatggcgtagtgcaatgtgttactcacatgtttgtggtggtgctggtgtaaacaaacctgctgcactgccagtcatgccaaagtctagcagatgcaattatggacagtacgtaatattgataaatgataattgactatgttactgatttatgtgtttactatacttttaaacattcttttagaatgggttccttctacttacagattttttmaaagtttactatacaacagcctcaggcaggtccttcaggaggcatccagaagaaggcattattatcataggagatgacagctccatgcctgttattgcccctgaagactttccagtgaggaaagatgcggaggtggaaggcagtgatattgatgatcctgaccctgtgtaggcctaggctaatgtgtgtgtttgtgtcttagtttttcacaacaaagttttaaaagtaaaaaagaattaataaaaaagcttatagaataaggatacaaataagataatatttttgtacaattgaacagtgtttgtgttttaagctaaatgttattacaagagtcaaaaatatttaaaaaatgagaagtttataaagtaaaaagttctagtaagctaaggctaatttattattgaagaaagaaaaaaaatttttaactcagtgtagcctgtgtctggtttttataagtctacattagcgtgcagtaatgtcctaggccttcacactcaccactcactcactgactcacccagagcaacttccagtcctgcaagctccattcacagtaagtgccctatccaggtggaccatttaaaaaaatcttttagactgtatttttactgtaccttttctatgtttagatatacaaataccattgtgttgcagtaacctgttgcacaggtgtatagcctaggagcaatagtctagaccatatggcctaggtgtgtagtaggctatactgtctaggtttgtgtaagtatactctatgctgtwcacacaatgaagacattccctaacaacacatttcttagaatgtatccttgtcgttaagtaacacatgactgtactttactttttaaataactattatggaggtataattcacatamcatacagctcacccatttaaagtgtacgattcaatggcgttggtatattcatagaattctataaccatcaacacagcacattttagaacattttcatcaccctcaaaagcagtcattcagccaggcgtggtggttcatgcctrtaatcccagcactttggggggccraggcaggcggatcacctgagatcaggagttcatgaccagcctagccaacatggagaaaccatatctttactaaagatacaaaaattagctgggtgtggtggcgcatacctgtaatcccagctactcgggaggctaaggtaggataatcacttgaacctgggaggcggaggttgaagtgagctgagatcactccactgcactccagcctgggtgacagagcgagactccatctcaaaaaaaaaaaaaaaaaaaaaaggcagtcattcctcatttcttcccaattcccctacctgctggcaaccactaattaccttctttgtctatggatttttgcattctagacattttatataaatagaatcatgcaatatgtagtcctttatgcctggcttctttcattagcatcttgtttctaaggctcatccatggtgtcatctatattaatgcctcattcctttttattgtcaaataatattccattgtatggatataccacatattgtttacccattcatcagttaatggacttttgggctgtttccacttttgggctattatgaaaaatgctgctatgagcatttttgtacaagtgtttgtatggacatatgttttcatttctcctgggtatttacctagtggaatttttgagtcacatggtaactctattttaacattggaaagaaggtaatctttgatataattttgaatttatagaaaaattgccagaatagtgtaagggactcttatatatcttttacccagattcacttattatttattatttaaatcaccatttgctttatcatttcttctctttatgagtgtatatgtaaatatatttatcactgtgtgtatatacatatatttatattttttatatagtacatattttaaaaaaccatttaagagttagagacattgtgctccccacctttaaatacttccatgaacaatgactacaaactatagtttatcaaaatgagaaaattaataatattaatctaatactgttatctaattcacagttcatattcaaaatttgtcatttgtacagttgtagctgttttctttgtctaaaatctaatccatgttcatgtttttcatttaattcccctgtcactttagccccctttattctagaacagttctcagcctttctttggctttctttaccttaacatttttgaagatgacaggacagttttgtagatggttcttcagtttgaatttgtcagctgtctctctgcactgttagactcaggctatccctctttggtggtaatgctacagagtgatgctgtgtccyctgtggggcattgtatcaggaggcacatgctactgatttgtcccattgctggccatgttaagtttgcacagtggttgaggtggtgcctaccaggtttctccactgtgaagcaattcttgactatgtaatctgtggagractgtataaacatccttgccagaactcttgctacagcctcctcattggcctaccctcctcctgtctccctcctccaatgtatccactcaccatcctgaagagatcttgctaaagctcagatctgaccatgccactcccctgttctgaagccttcaatggcttcctatcatctgagagatgaagatcagaccccattcaccctcagtctgcccctaaacccctccaacctttgcatcccctctccccagcctttctggaaaccactgtgctttttctggcatctctgctgttcccactgcctcaatgtgaacctctgggkaattcctgttcctcctttgatacccagctaagatgtcacctactgaggctgagttcatgcctccatcaaggcacctgtcacacccaatgtagtgcttccattcatgtccacctccctcactagaccacggatccctgaaggcagaagacgcaccctgtccctgagtcctgcgcccagcaccaggcaccccacaagccctccaggaatgcccatagagtgaatgaatgcgtaagtgaatcaatgaattggaatagtctcagtcttactggaaagttgtcagaagtgaaaatgggaaggagtagactggaaagagacatttatttaagaaatacttattgtgccaagagccagggttgcaaaggccagccaagcaaacttcaggaagctttgaggttatgggaaacatcaattctaaccagatgatggcccacatgatcatgacataaccatgtcattgtcttgaggaagcatctccagcacatagaacctcatgtttgaacagtgctttatagtttataaagtgctttcacagacatttttatttttttaactttttatacacacagcataaagtttgccatcttaaccatttttaggtgtgcagttcagtggtattaaattcattcgcattattacgcaaccatcaccagatatttttattttttaatctcacaataagrtgttgtcttagagatgactgttctatagtaaatgccaaatttacaaggctttatgaaagaaactttagaagatgcctgtgtttatgaaagtattattgagccttggtgaatcctaattcactaatgaagaaaaaataggaaccactgatgagtttcatctccaaccattacccacacagaatataattttgtacttttaataaaactgtgagagtaaattgctagtttctacttttccagattttggttttatgggaagacctcagtctgagtccaccaagggagtcaggattttattgttcacctaacgctgtagcccagttttgtttctacaatagctgcaagagattcagtgtttgtatgataacyggccacatactatctggataatcaacttaaatgagatttttttaaaaagacaactacaaatcatcttgcaaataaatatatacttgccaaccatgtaagcattatgagaaaaagtcaagggtgctgtgggagcatatattgcacctacctggggctcaagagttactgcctgaggaagcggcctttgagtgtccatctggagaagggagacattcaggtagtgatggttgtgggggatagagggtgagtgctccaggagaggggatgtgtgtgcaccagccccatggtgggcaggagcattgtatttggaggagccaaaaggcccctggaacaggaaggcaatgttataggtggaggtcagcgagaagcagactccagctcttaagctcaggtgaagattttcatccccctcctaagrgcaacagcatgcttcaaagtgttttatgttgcmaagggaccagatgagwgtggagagccccaggctcacctgctgccaggcatgtgcgtcggctagttgggcaatgaaaagctggttactattttagtttttcttctcccattctctctctcttttttagagacaggktctcactctttcacccagactggagtgcaatggtgtgaccatagcttactctaaccttgacctcctgggctcaagtgatcctccggcctcagcctttcaagtagctggggctacaggagtgtgccaccatgcccagctagtttttatttttattttttgcagagacggagtcttgctgtgttgtccaggctggtctggaactcatggccgcaagcaatcctcctgctctcgccttccaaagtattggggttataggcatgagcccctggccctggccccatttctctttttaaaaattttctatttggaaataatttcaaattttcagatacgtttcaagaataagaataggacaaagaatacccatgtactctttactcagattaatattaaaagattaacatttctaggtccgggtrcagtggctcacacctgtaatcccagcactttgggaggccaaggtgggtggatcatgaggtcaggagtttgagaccagcctggccaacatggtgaaaccctgtctctactaaagatacaaaaattagccagccatgctggcacatgcctgtaatcccagctactcgggagcctgagacagaaaaattgcttgaacccaggaggcagaggttgcagtgagccgagattgcaccactgcattccaacctgcatgacagagcaagactcygtctatggaaaaataaataaataaaaataacatttcttttaattataaaagcagcattttctcttagcaaaatttcagaaacatgtaatgtacaaaatggcagtcccctccttccagctcccttggggttgccatttttgtgagtttggagtgcattcttccatatctctttctaagctctgtgcctgggagggagccctgtgggttgggagctctggggtgcraatggtatctgaggactcatttccacatagagttggacaccatgattgctcaaggacaggcagtgaagtgggaaaacaaaatgctgcagctggtgcccagggcagggcaggtaaggagagcaggcaacgggagtagagggcaggaggggaaccgggattgccctctcatggactgtaggaggcccaaagtttctacactgtcacrtccctttgaggtcagggctgaagggccacagtgaccaacagagkacctgtggaactgttaggacaagagcaagggaacagcatccatcctgagtggaggagaatggtgaaaccccagggtgtagttcagttactacaactccaacctgcaatctgggtctcaaggggaggccagaaagactgggagggaccacccaccttcactctgcacagtrtcctctctgtggagagggagggcacatggcagtccaccatattgggctggccagtggccgttgatgcctgtgctgtttctccagctccttggttagcttaatggaaacattcaacgagaaggctgagcagctggtggagattctagaagccaaggcagatgggcagaccccagtgtccatgcaggacatgctgacctacaccgccatggacatcctggccaaggtgatgggtgacagtcgggcatgggggccaggagggccacatggggtagaggggtctcttctctccctcttcccttctctcttcccctccctcctgctcctctaacataccagcaattcctctgtgcttcatatattctgtatacattctgtctccttcaatattcaaagcaacctagtgtgagattggggctagtaactcattcttgagcaagggacaggtgcagggcctggcctgtagctggtcaatggcagaagcaagatttgatctcaggtctgcctgactctcagcccaaaggctgccttccctctgcactccctatagggtatgacttggctcttcaccccagtagactcagcagtgggcccagtaaccccaaaccccactttatgtgggggcggggcaggtcagggaactgcagtgtggggacagtgactggattcckctttatcacattgctattcctttatcatttttgctatccattcacttcactgtgaagctagtatagaatgaacacttaaggaaggttgcatttcaggggaaatgcatcttgtcaaggaagaaagccwagtttattgagtagctactatgagctacttcatcctcatagcattccatggggatcaaattatcatgggtcattgtaagcagctgatgatatgatgcatataaacccttagcccagagtccaggtgtctagcagaatgatgccaggctttgccctggatctgctgcccttctgtgccccagggatgaccttgcccttctctctcccccaggcagcttttgggatggagaccagtatgctgctgggtgcccagaagcctctgtcccaggcagtgaaacttatgttggagggaatcactgcgtcccgcaacactctggcaaaggtactgcctcagcaccccctctggtgaccagccaccagagctgttgtcttcatttgctgaagaacctccttcagtgattttttttttttttcccagaatgggttttgagttctggtatgtctgaagtgacttctgaatcaggatttgcatgcattgcctaaartaaaggcttaamatcaaattgccttaaagtaaattaggagttaatctttctctcatgtgaaatgatccccaaagcaggcaatgtaggatgactatgatggctccatggtgtcagattttctggatccttctgtcttcctgttccactgtctcagcacatcacctcattgtcataagatggctgctgcgaaaggtgcaccctgcctgccactgcccgtgcccacatggggcctgggaaccaatctrccccacccgctgcagctaccaccacctgcacgcactgtccagggaccagacatgccccacccactgccagcacccgtgcgcatcatctaggggcctgaggaatggtctaccatgagtgctgccaccagcgcctgccactgagagggcctgaggagaggcctgccccacttgccgacactggcccccacatgcatcatccacgggcctgaggaatggtctaccatgactgctgccaccagcgcctgccactgagagggcctgaggagaggcctgccccacttgccgacactggcccccacatgcatcagccaggggcctgaggaatggtctaccatgagtgctgccaccagcgcctgccactgagagggcctgaggagaggcctgccccgcttgccgacactggcccccacatgcatcatccaggggcctgaggaatggtctaccatgactgctgccactagcgcctgccattgagagggcctgaggagaggcctgccccacttgccgacactggcccccacatgcatcatccacgggcctgaggacaagcctgcccagcccaccacccactgttgcctgcacccaagcatgccatctggaggcctggggattggcttgccctgcctaatgtaggtagtgcctgtgtgcaatattggaggacacctgaggataggcccatccctccygctactgctggcgcccacatatgccatccaagggcctgagcacaggcccatcctacccactgttgccaccagtgatgctcaaggactggcctgcctggcatctccatcctcagcaaagcctcaggatggcctccactaacaatgacagtctaagccactgagaaastcagagataccactgacactgattacagctgaagaaattaaacagaaactatgttactgtgccaatccataatcaagccaaagcaccctacccacccaacactataaatgcccctatagaaaagtctttccctatgaaagccaatccataaaattggaagaagtaactattacactagatgcacaaaggggcaaaagaaacatggaaaaagcaaggaaatactataccttcaaagaaacaataactctccagcaacagattccaaagaaaataaaatttattatatgtctgaaaaagaattcaaaataatgatattaaactctgagatacaagagaacacagataaaaatgcaaagaaatcaggaaaacaattcatsacctgaatgagaaattcaacagagagacagatagatgtaaaagagaaacaaacagaaatcttaaaactgaggaattcagtgaatagaataaaaatataattgaaaacttcaacaatagactagattaagcagaagaaagaatttctgaacttgaagacaggtcttttttgaagcaacccaatcagaccaaaaaaagaaaagattgaagaaagcctttgtgacatgagacagcagtaagtgaccaaatattccagttccgggaatttcaggagaagagatgggcaaaggcatatgaaacctatttaatcaaataatagctgaaaacttctcaagtcttgcaaaagatatagacatccaggtacaggaaatatagagatccaggtatagtcatgctttgtataatgatgggagctcaaaaatctccgagtagattcaacccaaaaaggtctgccttctccaaggcacattatagtcaaagtgttgaaagtcaaagacacagagagaattttaaaaacagcaagagagaagcatgaattcacatataaaggaatcagactaaagtagattgctcagtgaaaatcttacaagccaggagtgattgggataatatattcaaagtgctggaaattaaaaactgtcagtcaagattatagtacccagtaatgctatacttccaaactgaaagagaaataaagtctgtcccaaacaagcaaaaaccgaggtaagtcatcactactagactggccctacaagaaatgtttaagggaattctgcatctggaagtgaaaggacaatctctatcatcatgaaaacacatgaaagtataaagcccactgatagggcagatcagcaaatgagaaagagaaaggagttaaacattactattatagaatgtttaccaaactgcaatgataaacagtaagagaggaagacaggcacaaaatatatacagaaaacaattaatcaaacaaccagaaaacaattaaccaaatgactagagtaagtccttacctatcaataataaccttgaatgtaactagattaaattcccccacttaaaagatatagattgactgaatggataaaaaaattacccaactatatgctgcttacaagaaactcacttcgcctgtaaagacacatacagactgaaagtaaaggaatggaaaaagatattccacacaaacacaagccaaagctgtcaggagtagctataattatatcaaataaaacagactttaagtcaaaaactgtaaaaagagacaaggtcattatataatgataaagggatcaattctgcaagaagataaaatacttctaaatatatttgcacccaataccagagcacccagagatagaaagcaaagatctaaaggaaaagatagactctaatacagtaatagctggggacttcaacaccccactctcagcactggacagatcatctagacagaaaatcatcacagaaacattggmtttaactacactttagaccgtatagacctaatagacatttacagaacttttcatctaatagctgcagaacatacattcttctcatcagcacatgaaagattctccaggatagatcatatcttaggccacaaaacaaattttaagaaattgaaatcatatcaagtatcttctcagaccacaatggaataaaactagaaatcaataacaagtgaaactttggaaattgtacaaatacatggaaattaaacaatatactcctgaatgaccactgggtcaatgaagaaattaagaaggaaataaaaaaattcttgaaacaaatgaaaaggggaacacaacataccaaaacctgtgggatacagcaaaagcagtgctaagagcgatgtttataacagtaaacacttacatcaaaaaagtaggaagatttcaaataaacagccaaatgatatatctcaaggaattagaaaagcaagaacaaatcaaagccaaaattagtagaaggaaataaatatcagtgcagaattaaaggaactaaagactaaaaaagtacaaagaccaatgaagtgaaaggttgatttttggaaaagataaaatcaataaaccaagccaagaaaaaaaagaagacccatataaataaaagcagaaactaaaaaggagacattacaactgataccacagaaatacaaaggaacattacagatttttatgaaccactatacactaacgattggaaaacttaaaagaaatggaattcctggacacatacaccctgccaagatgattgaacaargaagaaatagaaaacctgaacagaccaatggtgagtaatgagattgaaatactaataaaaagtcttccaacaaagaaaagcccgtgaccagatgtctttactgctgaattctcccaaacccatgaagaagaacaccaattcttctcaaactattccaaaaaattgaagaagagggaactcttcctaacttattctatgaggccagcactaccctaccctgataccacaaacagacaaggacacaataaaaaaagaaaaactacatgccaacgtccctgatgaacatagatgcaaaaatattcaacaaaatactagcaaacaaacctaatccaacaacacattaaaaaggtaattcaccatgattaagtgggatttatcccagggatgcaagggtgcttcaacatacacaagtcaataaatgttatacatcatattaacaggatgaaggacaaaagccatatgatcatctcaatagatgcagaaaaagcacttgataaaatttaacaccacttcatgattaaaaactctcaacgaattatgaatagaaggaacgtagctcaacataatgaaggtcgtatatgatatacccacagctaacatcatacttagtggggaaaagctaaaagtctttcctttaagaactggaacaggataaggatgcccactttcatcactcttattcaacgtagtactattaatagaagtgctagccagagcagtcaggcaagagaaagaaataaaagacgtccaaattggaaaagaagaagtcaaactgtccctctttgcagaagccatgatcttatatttagaaattcctaaagactctaccaaaaaactcttagaactgatgaatgacttcagtaaagttgtggggtaaaaaaaaatcagcatacaaaaatcagtagcaattctatacaccaataatgaactcatggaagaagaaaccaataaagcaatcccatttacaattctacattatgttatgtagaaaataaaatacctaggaataaatttaaccaaggaggtgaaagacctatacaaggaaaactacaaaacactgatgaaagaaattgaagaagacacaaacaaatgaaaaaacatcccatgctcatggatcgaaagaattaatattgttaaaatgaccatgctacctaaagcaatctaaagattcaatgcaatctctgtcaaaataccaatgacattcttcacaggaaatagaaaaagcaatcttaaaatttgcgtgaaaccacgaaagagccaaatagccaaagcaactctgagcaaaaagaacaaagctggaggcaccatactacccgatttcaaaatctactataaagctacaataaccaaaacagcatggtattggtttaaaaaataacaacagacatagaccaatgtaacagaatagacagcccagaaatatattcatgtatttacaggaaacagactcaacaaaggcaccaagaacatacactggggaaagggcagtgctgggaaaactggatatctaaatgcagaagaattaaaccatacccctgtctctcaccatatacaaaaatcaccttaaaatgaatagacttggccgggcgcagtagctcacgcctgtaataccagcactttgggaggccaagatgggcggatcacgaggtcaggagatggagaccatcctggctaatatggtgaaaccctgtctctactaaaaatacaaaaaattagctgggtgtggtggcacacacctatagtcccagctacttgggaggctgaggcaggagaatcacttgaacccgggaggcagaggttgcagtgagctgagatcatgccactgcactccagcctgggcgacagagcgagactacaagactacatctcaaaaaaaaaaaaaaattaatagacttaaacataagacctgcaaccataaaaacactagaagaaaacataggggaaatgctccaggacattggtgtaggcaaacattttatagctaagacttcaaaaatacaggcaacaacaacgaaaatagacaaacgtggccaggcatggtggctcatgcccgtaatcccagcactttgggaggccaaggcaggcagatcacttgagggcaggagtttcagaccagcctggccaacgtggtgaaaccctgtctctactaaaaattcaaaaattagcctaaaatacaaaaattagccaggcatggtgtttggcatttgtagtcccagctactcaggaggcagaggttgcagtgagccgagatcatgccactgcactccagcatggctgacagagtgagactccatctcaaaaaaaaaaaaaaaaaaaaaaaaaaagacgtgtgactatattaaatgtgactatattaaactaaaaaggttccgcacagcaaaagaaactatcaacagaataragagacaacttgttaaatgggagaaagaatttacaaaccactcatctgacaaggaacacaacagcaaaaaaaagaaaagcaaataattccattaaaaagttggcaaaggatctgaatagacatttctcaaaagacaaatggccaagaggtatatgaaaaaatgttcaacgtcactaatcatcagataaatgcaaatctgtgagatatcatcttatcccagttagaatggctattatcaaaatgacaaaaaataacagatgcgggtgaggatagagagaaatggaactcttatgcattgttggcagggatgtaaatttgtatagccattatggaaaacagtgtggaggtttctcaaactaaaaagagaactaccatatgattccgcagtcccactactgggtatttatccaaagaaaaatcagtatatcaaaggaacacctgcacaatagccaaaatatagaatcaacctaagcatccatcaacagataaatggataaagaaaatttggtgtagctgggtgtggcggttcatgcctgtaatcccagcamtttggaaggccaaggcaggtagatcccctgaggtcaggagttcaaaaccagcctttcacatggtgaaaccccatctctactaaaaatacaaaaaattagccaggcatggtgatgggcacctgtaatcccagctactcaggaggctgaagcaggagaatcacctgaacctggaaaatggaggttgcagtgagctgagatcgtgccattgcactccagcctgggcaacaagagtgaaaccccatctcaaaaaaaaaaaaaaaagaaaagaaaatttgatgtatatacacatggaatgctatttgcccataagaaagaatgaaatccttacatttggagcagtctggatggaactggagatcattatgttaagtgaaacaaggcaagaccagaaagacaaatattgcctgttctcccacatacgtgggagctaaaaaagttgatctcatggaggtaaagagtataatgatagttactagaggctgggaaggatgagtggggggatgaagagaagttggttaatgggtacaaacatacagttatgtagaaggagtaagttttagtgtcagtagcacagtgtgtgactatagctaacagcaaggtattgtatatttcaaaaacagggagatttgaaatgtttccaacacaaatgataaatgtttgaggtgatgaatatcctaaatatgctgatttgaccattgcacattgtattcrtgtatcaaaatatcacatgtaccccatatgtgtgtataattattatgtatcaattaaaatatatagatttttaaaaagatggctgctgyagctccacatatcacctccttattccaggcatgaagaaggaagaaaggggaaaggtgatagctgagttcatctcagggccccctcccgttccctgggacttcggcccctgagcttgcagccgccaatgccgccccgtctttttggcagttgatcgcactctacttcccactgcttgggatttcttccttcgatgcaagcctagctgcctccactcatcaggggtccctttttaccttgcagggccacgtggatgttttaagccatcccgcccaccactgctaaggatttggtgcaggaaagggaggctgaggcctgggctcagtctgccatcttgatccagtctccctggctgcttcatcttttctagaatttctcacattctactgacctcccagcttgccagtgccgctaacgtcatttcggggtggygggggagaggggagagggaacatgcgtgttcacttggccatctggagctgaaactcttgtttagttcctgccagggaagaggaagcagctccgggaggtccgggagagcattcgcttcctgcgccaggtgggcagggactgggtccagcgccgccgggaagccctgaagaggggcgaggaggttcctgccgacatcctcacacagattctgaaaggtgcaagggccccctctgcggactggggagggcggrgtgggccaggacgttccccaggtgatacatcgccactgactctgtttggcttaagaggagaaacacagttagttattttatgagccatggggaaagggagcaaagatttgctgggaactgagactctccttgtttttcagctgaagagggagcccaggacgacgagggtctgctggacaacttcgtcaccttcttcattgctggtttgtagctttggcggtggccaagggcccggagctctgcagaaatgctgtggaccatggatccctcaaacccaactctttgggattttttgggctatctgagcagagctcaccgcagggctagggggctgggctgaagggagcagaagcmccatctcctagctgtcttgggggcctctgacctggtaatgcagctggcaattgtggggatgtgtgaagctggcctgtcagctccagagagcttggctgtgtgaatgcaggcatyccctcactcagaatttgtggggaggcctgcattagactggcacaagaagagatgctaagcagcttcattcatttgctcatcagatatttcctgaacatggttcttcacctagaagactcctcttcagccgtcagtgagccctcgcatgcctcctccccagggaagcacaggctgcctcaggcactcagctagaagctgaccacaggcctggggctcctccccaccacccatctcattgtgttaagctgtttatttatttgtggtaattgagtgacgtctgttccccaccagacttgatgagcgaagggtcaggttgttttgctcacctctgttctcctggggcccagtgtggtagggaatcccatgaacattgaatgaaatacacgaacaaatgattgacactgggcactgggaagatggaggtgaacaagatgagggacagtttctagcctattggtggaggtggaaagacagagagacaaatactgatggacgaagaggtctgcaggtgaaaggcatggaggaaggccctttaggtgggagaagcacttgcagatgccccaggagattagaagcggccagtgttaaagcaaggctgcagggcgccattccctgcaatggatagaaaggacttgcggaaccaatggctggtcctcattcctgcagctgggaacccaggtcctggatgaggcttctggacagacctagcctcagtctcctcatctgtaaaatgggggcyttgaggagctctccaggcttctatccagccttccagagagggtttattaatcccgtctcgtccctccagtctatccctgagccctgcgtccagatgctatgggggactggccgagggcacggtgggttgtgtctgtctttccctttgcctgtgaggaaactgaggccgaggagggaagtggcctcctatagtcacagcccgcgatgcagagctggggccagggctgctgtgttctcccaccctgctcccaggctgagggctccgctggctgtgtgaatggcccacctccacaccctaggagctgggccctgcttcccagctctgacttgctgtaagttataggcccttctcctgcattcaagcaggcccctcaagccccctggctcctttagagtaaactcacgtctgttccctcccaggccagcttggaggggttgactctatcaccttggccagaccctgccagaactcaaaatcagcctcccgaaatgtccaccaccccctcatagaacctcagggtcatggggggcttttgtgtgcaccctgcabcctgggaaggcraggccttgggctcacggactttgaattgtgtcccccccactctccctgctgtgtgaccacagagacccattcctctccacctccactttctcttctccaaaatggaggtgagcacctccccgggccaagtgagacctagacgatggttcaaggaaggggcttttagagccagatgcctgggggcacatgccatttacatgccagcactggctggcatagaggcaggcacaaactgtctccttcatcctgtggccccatgtggagcaaccaccgtcctcccttcccacaggtcacgagacctctgccaaccacttggcgttcacagtgatggagctgtctcgccagccagagatcgtggcaaggtatgggggctgctcttggggctggcaaagaggtctgtctgatttcttgttcctgagggccacctgcccccacctcccatggttgagtcccctcaacatgccctgmttcccctgggccttggcacrtgctgttccctctcttggaagcgctctccctgcttttcccctggagaacacacctcctcctcccactcctcttctagaaagggcttctcagatccctaaaggagccaccccacgtttcccctccgagcctgctcccgactcatgagtgtgtttccctgggattgtttcatgtctatttcagccatgagaccagragctccaggagggcagggaccgtggttttttccctccccacagcgtacccagtgcctggccagggcctggcagtgaggatggagcagaatccctgctaaattgccaagagcgtgcttgtcttctgatggcaagacaaaggagggtgtccctggggaggtggtatttgagtcgggccattggtttccttaaatacaaacaggctccctctgggacagttgcatggagtggctgaagcaagkgtcaaagctctctgaatgcaccaacaggctgggtgggagctctggggaggtggggtcaggccttcaattacaattattagtcatcagcagcatataagggcggaagtgaaagattgtgtgaaaatatacaatctttctagggtttaaaaataagtataattgtaataagcatttcgtataaaaattttgggaaaagcagaaaagctataataataataataaacccacccatggcaccccacccacccagcggcacttcgctgttaactgctgagtatctgttcagcaccttctcacctacgcatgagcagctttgccgtgttttttgtcacctggttgcacagctggcttttattccccatgagccttatcacagcattgcctacctcattgtaacctcctcccaaatccactctttaaaaaattgtggtaaaatatacataacataaaattttacattttcattgtttttaagcccacagtttagtggcattaagggcattcacattgtgaatgtcatccccctccactatttttatttttacttttttgagacagagtcttgctctgttgcccaggctggagtgcagtctcagctcactgcaacctccgcctccccagttcaaacagttctcctgcctcagcctccagagtagctgggattacaggtgtgcaccaccacacctggctaatttttttttttktktgtatttttagtagagacggggttttgccatgttggccaggctggtctcaaactcctggcctgaagtgatccacccatcttggcatcacaaagtgctgggattacaggtgtgagccactgctcctggcctccgtctccagacctttttcatcttcccaaactgaaaatctgtccgttctygcctccccatccctggtaaccaccattccacttctgtctctgtgtgtttgtctattctaggtgacttatgtaagtggactcatacagtatttgtcttttttgtgactggcttgtttcactcgaataatgtcctccaagttcatccatgttgcagtatgtgtcagaactcccttccttttttttcttttctttttttttttttttttaagacagagtctcactctgtcgcccaggctgcagtgcagtggcacaatctcagctcactgcaagctccacctcccgggttcacrccattcttctgcctcagcctcccaagtagctgggactataggtgcacgccaccatgcctggctaattttttttgtatttttagtagagacggggcttcacgggttagccaggatggtcttgatctcctgacctcatgatccacccgcctcggcctcccaaagtgctgggattacaggcatgagccaccgygcccggcagaactcccttcctttttaagacttactaatgttccattgtaagcrtcggtcccattttgcatattcatatatctgtccatgggtacctgggttgctyctaccgtttgtctattttgaataatgctgctatgaggatgggtacacaaatatctttttaagtccctgctttcagttgttttgggtttatactcagaagtgggattgctggatcatatggtgattctatttttaattttttgaagaatcaccataccgttttccataacggctgaaccattttacattcccaccagcagtgcgcaagggttctttctgatttgtccacatcctctacaatacttttgtgtttattgggatgagaaccatcctaatgagtatgaagtggtccagatccactctttttttttttttttttttgagacggagtctcgctctgttgctaggctggagtgcagtggctctacctctgctcactgcaaactccacctcccagattcatgtgattctcatgcctcagcctcccaagtagctgggattacaggcacccaccaccactcccggcgaatttttgtacttttagtagagacagggtttcaccatgttggccatgctggtttcctacagccaatcccaaacatcagacacaaagggtggatgttttagggcccctgcaacatagttcccagtggtttgggcactgttttggatgtggccatcgctggatctctttaacagtctttgggctgggcacagtggctcatgcctgtaatcccagcactttgggaagctgaggcgggcagatcacctgggggtcaggagttcaagaccagcctggccaacatggtgaaaccctgtctctactaaaaatacaaaaattagctgagcgtgctggtgggtgcctgtaatcccagctacttgggaggmtgaggcrggagaattgcttgaatcctggggggagggcggaggttgcagtgagccgagatcacaccactgcactccagcctgggcgacagagcaagactttgtctcaaaaaataaagctacaagtaacagtgtttgtgagtggggagccccatgcgtctctcttcacgcttccttccagtgcccccttcttaaagctaagtaagtcggggacaggctccctttggagacgaacttgtctttgtcttaccccacaggctgcaggccgaggtggatgaggtcattggttctaagaggtacctggatttcgaggacctggggagactgcagtacctgtcccaggtgtgggaagtaggagggaagcttctgggcggatgtgggtgatcatgtcatcatgcctgcttcctccctggacctttcaggacagtggttctcaaactttgctgcatagggtcctcccccggaagatttaaagtatcctgaggcccaggctgccccagactaatgacatcagagtcaaagagctccccaggtcaccccagtattcaacttaggttggaaactggccctttagtaaatggtgccrtatttgtgcttcccggctaggctggggttcyagatccttaagcttcccctggtggagtcaggctcagcagcgcctctccatgctgccgccgcacagcaggagggcttgcagcttctgctgtggctctctggaatggtgggacccctgattcctggtcccagctctgccattgtggccttgcacactcccttctccttctggacctcagtttctccatctgtcacgtgacggtgaggctgmtgtcccaggggcctgggacccaggccagggtgagggtatgcactcagcctgtgggtgggaaagacaggggtcccaggcatgccgccggccggcatgatctgtggcctctcccgactctccttgttatctccccttgtggcttctctaggtcctcaaagagtcgctgaggctgtacccaccagcatggggcacctttcgcctgctggaagaggagaccttgattgatggggtcagagtccccggcaacaccccgctcttggtgggtggaggccctgggggtcctggggtgggctgggctgcttgccccaatggtggtgaatttgggactcaccaggggagcctgtggccctgttcccatcattgcaacgggcctcactggctgccctggtctttctcatggagtctcaccatagccctgtgagggctttttcccctcctcacactgtccagcagaagattacagggggtcattctggaagggaggtgccccatttacagctgaggacactgaggttcagagaggttaggtcactttcctggggtcacacagctggtgaaaagcagatatggaaattgcccagtttcacagttgacccaaacttgtcctggttccttctctcctcacgttttacagccctttctctctcggctttctccccagacctcctttattttgtgtctctttgtttgcttacttgttcatttatccattcatccaggcatttactcatgtatgatagcccctaaacccacccccaaaccaggaaactaggatatagtcactccctgctcccctgacaaggaatcactaatctgaattgtgtgtttgccattcccgtgtgttgtgtgtgtgtgtgtgtgtgtgtgtgtgtgtgtgtgcctgtgtgcattcacgcagtaatatattgtaggacttgttttttgactcagtataaagttggtaagatttgtgtaggtttctccacaaggccrtaggacaaccaccatcgctgatcagttctcaggtgacaggcatttgagaggtgtccagtttgtccctatctcgagcaccacagcaacgatgccatttctgtccgcatgtccaggaacagtgtgcaagccagctcctcggacatttacccagaagtgagagggctgggttgtaggaccyctgactgttcagctttacaaacgaacgccacattgttttccaaagtggctgcaccaacttggatgcccagtagtggtgagagagagcacctgctgttcttcatcatctccagcacttagcatggtccgattttgtrtctgctgccatccaaatatgtgtttttaaaaaagtatttcactgtggtcttgatttatgctttcctgattactaactagtaagcgtgagcatctgaccctgctttctctgtctctgagatgtgggctcagtttcccttttggggtagtgtgttttttcgtattgctatgtagagcgttattttattttattattttttacggcatacatttatttactattattttcattattttgtttttaaatagagtcttgctctgtcccccgggctggagtgcagtggcgccatctcggctcactgcaacctctgcctcccgggttcaagcgattctcgtgcctcggcctcccgagtagctgggactacaggtgcacacccccacgcctggctaatttttgtatttttagtagagatggggtttcaccaggttggccaggctattctcaaactcctgacctcaagtgatccacctgcctcggcctcccaaattgctgggattacaggcgtgagccagcgcgcccagccctagagctttcttttaaaaactcacgtgttaatcttttgtctggtatgtttgtcatctttgtggcttgtcttcattaatgtgtttttgatgatctgcatgtcttaatatttttaacaattacttcttttgctttgtcttgtttaagaaatccttctctatcctgagttcaggacattcacttactttgtcctcagttttacatttttcttttcaaagttgagcttgtaactacctggaattgattttgtgtgtagtttcaaggtagggacctttctgtattgacttgccagggctgttgtaacaaagtgccacagactttggcttaaacaacagaaatttattttctcccagtcctggaggctggaagtctgagatcaaggtgttggaggttggtttcttctgagggctcactccttggtgtgcagacagccaccttctccctgtgtctccacatggtcttccttctgygtgtctgtgtcctaatctcctcttataaggacaccaatcaggttggattagggcccatcctaagtacctcattttaagttaattacctcgttaaagaccttgtctccaaacacagccgcattctgaggtactggggattaggactccaacatatgaggatttgtggggggcaaaattcagcccatgacaggatcctttttatttttacctgtgaggaaggaggagccccagtccctgctcccagcccctctcctcccagggttctgccctgcctcctccwscatccatccaagcctcatctgtggccactctgccatctgttttgccaagctttcttttttaatgctcctgtaccaataccactgtgccttaacagccatctccttagatccccttacagccagcaggggaagccctgtggctcactctcagcctgggggtgccaccctgtgggctttgagtgggcagactgggctccaaccccacctctgctcctggctggctgggtcatctccatcaggccttcggcttcctctttgttaggtggggggagtggtgagcatcagtaggatgacgtacatcatgtgtctggcaacaatccccggcacatcttaggtgccctaaacccagcccccacaccggatgctcccacacacttgctggagctcagctccagggctccctgcaccctctgctgcactgacccccagcacagagagccaggggtggaacaggcttaggaggagattttgtcccagtgtttggaggccaaggacacagagtgagcrtcagccccactcaggaggcaccacacgtgcacgtggaaggctggtggggtctgcagttcctccactcccacccctgctgaagtaggccttgagttgaagagaaactgaatataacagttctcgggatctagaggaagttggcctcacagagtcagatctgagtttgaatcccggtttggccatttatttgcctggtgacttcaggtgagtcactgagcctctctctgggtctcagtttcctcatctgtaaaatggggacaatgacggctcccctacagggctgagcccagcacaggatgacgcagtacgcccagctggcacagtcaactgtccccgctcttcctcttaagggattttctagggggccagtgcaatggacaccaacctagatgaggggtgaagacatggggggaggagagtgggacccactctgctctgagtagccctgttgggtggcctcagtggctcaagaggtgccaggggaacaacctgggaaccagagatgagcggaccctttgcccgcagttcagcacctatgtcatggggcggatggacacatactttgaggacccgctgactttcaaccccgatcgcttcggccctggagcacccaagtaagtccctcctggagctgcccatgagtggggctggcgggagaaggacagacacagcggcctctggtctgagccagaggcacscactcagcccacatagccttccagatccctgtgaggtggttgtggaggaaatcacagctcagagaggttaagtaacttgcccaagtggcagagcaggggtctggccccagctcagtctggttctaaagctcatgctcataagcagcaccaaatactgggaagctgggtgacttcacctccccaagccttgaggttcctgtctgagaaatgggaccatccgtggctgcatctgcaagttgctgtgggggtcaacgcgttaaggtaccgaagccatggtgggaagagctggactccacagcctgcctgagtgttcagatccaggctctgcccagagctggatgtaaatttatgacctggagtgagttgttttgcccctctgagcctcagtttctccatctgtgaaatggggacaacagcagttccttccaggagggtaaaaggaggagaaaaagaatgcagatccagccctcggcagagtcagcggttcatgctttgcatgcaaagtgcccagcccctggctcaaagtctgtgttcatccagacctgggttaactactgtcttccttatkttgttcctgtggggacgcctggggctgctggcctcgtgattcctctctttccctgcaggccacggttcacctacttccccttctccctgggccaccgctcctgcatcgggcagcagtttgctcaggtaggaggggcagggctgtggttctgcccaggagtagctgcaggggtgggggctcatcctgagccgggaagcatctccgaacccctgctctggggctgctgggctgctgggctgtgggctcgggacccagcggagccagacccagaggactggctgtgttttgcacggaggagagcgcaaaacaggaggctccccaggctctcacaggctctccaggaggagagccggctgtgacatttgctgctcattcactcactcattctgtctttgctccttcattccttcctcattttgcccgctgggcccagatggaggtgaaggtggtcatggcaaagctgctgcagaggctggagttccggctggtgcccgggcagcgcttcgggctgcaggagcaggccacactcaagccactggaccccgtgctgtgcaccctgcggccccgcggytggcagcccgcacccccaccacccccctgctgagggggcctccaggcaggacgagactcctcgggcaagggccgtgcccgcccacctctgctgcccacggccacccacccttctcccctgccccgtcccctgggccacccttcacgctggcttccagcgggccctctgccgaccgcctgcttcacacccctcagcgctccctgtcgcctgcggactccatggcccttcctggactggcccttgcccaactcccagccaccaccactgtccctaccactgagcccttgcacaggccacttgctcagacgagacaccctaactcttgctcactccctaaagccctcttcaggggtcacctcctccaagaagccctccttgccaccccccgccggcaggggcccctcctctgtgctccctcggtcacctgtgctacctctaacaccacactgaccacactgtatcgtgagtgtccrttgacgtgaccaattgccctgccaggctgtcagcgcctcaagggtagggtctgcrtgtgatttgtctctgagccccctgtgcccacccagggcccggcacagagtcgatgctcaataaatgtgtgttgactgcatgaatgacctggaaccaggccatgcgctctcgcctcagcttgctcgtctgtgaaaagggggagatgcggaggctggcacagctttggaagccaccagcccgcagatgccccgcagatgccctgacaacgctgccttgggagagactgccccaggttaccagcctgttccctgtgctgtattcacggccatgcccctgggtgttgtgtgaggttgggcctgggtgggtgactggctctgagagctggatttgagaggtcagagaggcccctgggcctctcttgggagcagcttggtggagctgagccccgtgcctgtgggcacctgctgccctcctgacctggcaggggggcagggcaggtgagactgcatccctcgtggtggtgatgggagaagccgtcccttcctctccagggccgtgtcctctgagctcatccaaggaagaggtcctgccctgagtttctccttcggccattgggagcttgtctttgtgcagagagaaaaagcgccctcatggcccggtgcggtggctcacgcctgtaattccatcactttgggaggccaaggtgggaggatcacccgaggtcaggagttcaagaccagcctggccaacatggcgaaaccctgtccctacttaaaaatacaaaaattagccgggcatgatggttgggtgcctgtaattccagttacttggagtctgaagcaggagaatcgcttgaaccggggaggcagaggttgcagtgagcccagatcgcaccactgcactccagcctgggcgacagtgagactccgtctaaaaaaaaaaaaagaaaaagctgccctctcccctgcctgggccatgtgccccctgggaagaccccctccccaaacagggaaggcacagatgtgtgccggcccgtgatgtgcattgttggcctccttcggtccttgccgcagtcttgaatgatagctccaagggatggtcccatcaagcagataaggaaactgagactcaggggcgggagtgacatgctcagtacaggtggggcctggggtggctctgagaatggaggagacaagtgtctgggttcccagcctgcccctctccccagcccaggtgggccctgagaatgcacaccccggcctctgggcagagggtcgggccccgggatgcctcgagaactgcagcgttcttgcagagcgagggtcctcctgctcccctagcacctcgcytgaccacgtgggyacctggccagcccatcatcaagctgcaccctccaccctctccatttccagctcgctgtctgaggggcccccaaactcaccactcactttgagaatggtatgcccgggctcagcctccagccacctggtcaaactcatccctggccagaagcagccccttcccacagccaccccaaatgctgctgtctcccagcgtcctgttcccaagcccccagctgggcactgttccccgacctgctctgctgtgccccccactccgccctctgcagcccttctctgagtctctgaggttcaccagtacccacacacctgcccacgcttcccacagtccatgccctctgcctcctgctgtggctgggcctagtccccacagtacagcacctccttcacagtccatctaaaagggccacaggccaccaagcctcagtactgcagcaatgcaacccagcattgtctggaggggcctggagggatcggctccctccagagacttcaagttcccggcttgaccatcccctgatttggcaaatatctgtctgttgctgagcctgagccttcacaccatgatttcttcaaatcctgccaggaaacaggagccaactatgccccatttcacagatggggaagtccaggccagagccacagctgggccatagtggagtcagcacttgaacccatggccctttgcatccagtggccttccacaggctcagcatgccctatccctgcaggcctgggcttgtcttctgcacgccccaggaatcccagatggctgggaagtgcagagccagaaccccccagccccactgtcactgccggtggggccatcctgcccttcctttctgagccacttcctcttccatagactgggctttctgtgaggggcaggtggctctcagtccatgctgcatgggggagccacctgggccaggtgaatcagcctctggggtggggcccagaaactcttctttttcttttttcttttttgagatgtagttttactcttgttgcccaggctggagtgcagtggcacaatctctgctcactgcaacctccgcctcctgggttcctcagcctctggagtagctgggattacaggcatgtgccatgacgcccagctaatttttgtatttaatatatttttttagtagagacggggttttaccatgttggccaggctggtctcgaactcctgacctcagatgatccaccctcctaggcctcccaaagtgttgggattacaggcgtgagccaccgcgcctggcccaactgttttctttttaagtctcccagtagatcccaatgtgcatgggccggtgccgccagtccaggtgaagctgacccccgggacccaggcaagatggataggattaaacccaaggctgtgcagcaaggctacctggggtcaaatcctgcccccacctgcctgggcctcagtttccccatctgtaagggaggacaaataataggacccacttcctagggttggaggggaattagtgtccacacgagggtcgggctctggcactgtgagtctggtcattgtcacctgcagggaagggagggcttttctgcaggcaaggcggcgcagtccccggaagacccgcacggtggcgcgctggcgcagagctcgggctcgccctcccgcccaggccgagcgggcggcgccggccccaggcgcggagggtcccgaggcgcggagtgggtgggccgaggggacgccagccccgctcccggaagcggggtcagcggggaggccgggggtcggcagtggcaagctctggccacggcgtaggggtgggatagccacccccatttcacagatggggctcccgaggcgcggtgaggtctggcagctgctgggggcgcaggcacggccccccgggcgggtgtagcggtcgcttggcgggtgggtccgcaggcctcgccgggagccgggcctgggtctggggcgctggcaggccggccgggaggcgcgccgggcgggaacgcgcagctctggcgggaagtgcgtggggtcggggggctcgggcggggtgcaggctgctgctgccaccggggaggcccrggggatgccctcactaagcggctccagagactgcgggccccgccctgccctgccactccctctcttgtgacctcggccagtggcagccttttctgagcctgtccccttctctgtaaacctggacgtgtttgatctacgctcgcgtcccggcaggaggcttccagcctgcacattcctgggggcccgccttccccaggcactagcttacccagggctgagctgctgaactctgaaaacctttggaaacctccctgccctctgccctagcgacctgcggctggagaccctgagctggcccagccctctagggtgcctaggagcctaggctgggttgggggtggcttcaggaaccttgggctgccgggtgtggggtgagagccttggcccagctatggccaggtgggaggttttcttcctctgtgctctgggtgctggggctggaggcggtggctctgctgggcttcagtgacagccaatgtgggtagacagaggaccatgccctgtgtcccagcaattagctgcccacctgggaaggttctggatgggacttggcagaagcctgagccggcccctcctggcagtcctggctgagcgggcaccgagcgccttatgctggtccagtcagttggagtgactaaattcacatctgcccagacctcaccctgggctccggacctcaccccgggctccagcctcaccccgggctccagcctcaggcatctctggatgtccaaaaataacccccacccccacccgcaccctccccggcagtcactgggggtatttctggcagatggaaggggactcacagtgggagggagggtcatttctctgaatccagggccaggggtggggagggacagagtcaaggccctgccttggcttggagctttaaaaacactcatttcttctggaacgcagcctctccccagtaaatccttctcaccagagaaaaccatagtcacctacctggtgctcacttcttgggcagcccctgcggggaccagaccccgggtggccaggcagaggggtcccccccaccctgcgggaggcagcctgctaatactgggtgccaagggtaaggctgcaggtccctgtgcaggacacctgctagctgcatcccgtttggagcctgccctggatggggctccatgggcccagggcgaggccaggcagagaccggcatgagcagcagcccgcacaggagcaccctgggcccagggcaagagcccatcggccagtggcagacactgggtgaggatccccgatgattcgagtcacactgtgctggccatgagcgtcaactgttgggcgcgctgtacggccaaccctgagccagctttcctgtacctccaggcccctgtgctacagacgaggctccgagaggtggcggcctgccccatctcagggccagagggcagagggtgcggtgggctgtccctggggcccttgcccctgctgttgagcccaggagcctgaacctgggaggcctccccatcacctccctgccccctcccaaatgacagtggctccttggccgccaccccagaggtgaggggatagcccaaggaagccaggagctgcccacaccctcagcccaggaacacccggtgcagctgcatgcgcctcgcgggcttctttcctggctgggagcctggacgctgggagggttgcccaaggccacccaggcagcggtcagtcaggggtgcctgggctggacagggggccctgggtgtttggaaccagctcgcagagctttgctggagcaggtgcacgtgtgtgcgtgcatgtgagccccacgtgcagatgtgtgtctctgcgtgtctctccgtacctcttcgtgttcctgttcccttgtctccgggtatctgtctggccccccgtgtgtgaggctgtgcggatgagtctccacatccgtgtgtgtctcatgctctgtgtggagctggtgtgtcaggcctgacctggactacaaggaggtgtctctttgaacccaaggcagtggacaaacatcagacgcgtcgccgtgggctgggcccctgccgtgtggcatgcgttctgtcctcaccccacgtccagcgagatgggctaacctgcccaaggccacacagccaggagcttggggccatccagtgtggacatccattgtccttcaagtcgtggccaccaaggccccacgtgaggctccctgctcctcacctgtcctggctctgtgtacagggggaacccaagtctgaggggtctccagcagggagaggctgcactcctgaggcccagccagggccgggtgagtgcggggcagcaggtgtcagcggtgggggaggtacgggtgggaagcggggcctcttccctgacccccgccacacttggctgcccctccacctttgatcactgaccctcctctgtccctccagggacactttcccgccagtgctggtgctggctggccaaacagtgtgggaacccagggactggccttcctccaggcggtggcagccggggaggggcctgggcacaccgtgggtgagcagtcactgcagagcctcccctgggaagtggcatgatgctgtggtgtctcagggaacccaggaagggcactggctctgggctgggccccacaggcatcagtatatgtgtgcccctccctttgccccatgcccttccaatgaccccaactcctgcccgaccagatttcacaccactgtctggccatct

SEQ ID NO: 95207 - DNA, 45945 bp, Homo sapiens
gtaaagcatttcacaaagcctaacatctttagagatgactattattaccagtatgtcatgatagtattattgtatcataaacttctcaattcagtaatagatgtctggaaggttgaagctaaagcatcaagccacattctccagtttaccagtaataaagctgatcttgtgactctggtcacagtggtgtgctggagtcagctgctgccagctcacaagaacccatggctaaatgttctggaactctgcgagccgactgctaaacattcacatgcgccccactgccaactgacccatgcttgttttgcagtcagttcataagctgcaggagagaaagatgtgtttaactgcttaccttagagacgttatcagtcaagaaaaagaattaaaaggatctggtgacagaagtgaaggaacagtttggggagtgatgatgagtagttctgtttcaggcattttgaataatatttttcagtggaatgtaaacgggcctggtgctgaagagagagaaatgggctagagataaagatttggaagttatgggatattggcaggactggaggattttacccccggatacccaggagccatggccccaaccactgatccacagcacaacgtctatcatctcactcaggctctgttctcattctctccagtggccccaagtcatatcttattataattgtctcctgattccttcccttctttctccctcctcaattcaccccattcattattgcctgattaatttccctaaggcaccattttgatcaccttctgtgtttgcttaaacaccttcagcagctcctaactctttgcaaataaaatcccaactgtcctattcaaatttgtccttgaggcaaatccctgtactttctcccctccatgcctgatattcatgctgtcacccataattttgtatacagttaagtttaataaacattttggaataaagactagaagtcacaaataagctgctgttgtccatcagttccattgttctaactatcacttctcatgttgtagatgaaggtgaacccctgttataactaaaatatagaaatttcttgtacttgttaggcacccaacatatatagctaccaaatgcttcttaatggcaagaaacaaattttccaaggtttatttttcattcaagacactctacacatgctcctggcaaggcagttctaagctccagaagacacttgctgccaagaaccaaacacagctgttcaggcaacagaggaagctggwgctcggtgaaaaaccaaaccaaaacaaaaccctgcccgcayatttgaggatggcacaggtcccagatctacaccttgaaacgaatrgaagatacaagatatttgatataaaagaaaaygaaagtgccggaaacagaagttttctctctcaaactgacttcctccaacgtgcacagagaataacaacaggactcctaaggataaaaatagtgtttgctgatgggaagagggctacttctccactgaaccatggaaaacctaaaatcctccccattgtttcctgccccatacacttgtactcaataaagatctctaagaatgatcatgtggagactaaatattacccaaaatggaaaaaatttaaaaacaatcccgaactaaggggagaagtggctgcctgggagcatcagcatggaaaccagtgagcagctgtgttctttgtttcctcatagccatcatcacctgaacaggcaggagcattggtcacatctgccagcatcatgggagtggcagcatgaaagggaggacagaacagtggcccagctcccatgtggaccaggcaggcagttgtcatgctatcttattcatcacttacaatgtgaagaagttggcactatgactgctattttacatgttggaaactgcgaaccccccatggggtaagggaatggcccaagctcatacatctggtaagtagcaggtggttcaggcttgtgtagctcctgaggcaccaatacttccagttgcattcaaaagggtgctgtaggtgttctacaaaacaaacaaagaaaaggtaagcatgttgagaatacagtgggcgaacacagtttattacaaacctttaatgttctaacacacattgtatagagtttctctggtttccctacacttaattcactgcagaatttttgttttgcctggaacacttcatgggaccagtgttcccataaatcattgcaggacacccctctggtctcattagagtcttaggtctgttttatttttttgtcttgttttgttttcttttttgagacagggtctcactctgttacccaggctggagagcagtggcatggacagggctctttgcagccccgatctactgggctcaagtgatcctcctgtgtcagctcttcctaagcgggctggcaccacttttggaagagtctagggaaagcaaaagaccattgggaaggattgtgacaggattacctacaaagtatatgggaacacagggaagggaagggggaacaaggagaaacctgcactattacaatagcaatggacagttcttggaacttgcatgccagtggtctttgaagtgctttagtcctcatagccacctgtaagatagaaatcattctaacccccattgcagagataagggaaataaagcaaagaaaggttaggttttgaattcaggtagtctggctcctaacacctgtattctatttgttcatattgaagagtcttaaatggagcagaattctccaccaagtagcataaacaaataaacttttgttaagacactgagatttggagattattgaccaatctagtagatcaaggagagtgctcaacatctgatgcaaagagcttcagaaaatcatagtatagtaagaagaaatcaattcctgctattggcagcaatgccaaagagcataagagaactctgtatagtgttttattattttcaaggcacttcatgagcacgatttaatttagttcctgagaaggcgatgagacatctgtgctctcagaccttatttcacacctcccttcaccacaggggattggtttaacagacattaattgctgaaaaagcaaaaagaggacattgaggtaactcagagaaagaaactgcaagaagcacactacaccactgggctggagcaacaaagggatggagctgggattgttgaaaactggaagtttggagcagggctcccatggagctggaacacagatctttaataaggaagtgctgcctgtcgtccctggtgccatagaatttcatagggaaacctctgcagagctggggctcagacttttgaggagatgtcacctaagtggtattgatacctctgaagggtacagtaagactgggtctggttgtgcagaaaagaaaaaaagaaaaagaaaaaagctaaagactagaaccaatcactgctgtctgagtagagaaccattactgcgaagaccctgacctttgtagcagcaagcaaacaaaaaaggtcacctctttcctcttatctagactttcagtctccctctggtatcaccattggcagagcctgacataaagtcagctggcaaatgagaaagagaatttgctcagtcccagcctcaacctcatggaatccatcagaaaaaaggtagatttgcagctgagagatgatagcctgataaccagacaggcatcagtacatttgaaatttttgttggtaatgttttcaataccagtgactcaaagcaaattaaaatgtgacattgtttaatatgatattttgatgatttagtagtttcacaaaacatatatatccgatttcagattgaactggaatgtctctaaaaacaaaacataaattactacgaactgacatttattgaaagtgctacctttgtgtcaagcactctgcccagcaggttatgtgggctatctcagtcctcattttacagatggggtaaagctgaggcttaaagaagttaagcaacttgctttgaagcttcagagcaatagagacagaatttttatgggcagcctgacgaagcctgagctgttagccacatctcagtactacctccccattccctttactgcttaggtggtgcacctttactattaggtggctataccttgggaacgaacacaacaatcccagactcttgctagaatcatttacttaactccctgctgcagcaccatttggtagctaagactgcattctaacatgaagcattcagctcttcagtaaccaaacacataatagtgagggtcaaaatagactctcatcttccagttgatctctagcaaacagtcatagcatccgggaatttcagggctgcattataggcccttaccagatgtctgaattcccttctgttacagctcaataaacagttatccagcatctgtttgaatacttttcatgacttgtaacacacaactgtataaagctgctctctgtatatttttagacagctgagttactaaacaggtcttacttgcggagaactggaatctattactctacaatttccacctgaagatttctgattttgctttcttgagcaacacagagtgctttacccatgccttaaggcagctgtcacatgactcttcccctaatacggttgtgaggtgctcacgtgttttggagatagcaaaagtctcaaataatatggcacagacggccagccatggtggctcacacctgtaatcccagcactctgagaggccgaggtgggccgatcacctgaggtcaggagttcaagaccagcctgaccaacatggtgaaaccccatctctactaaaaatacaaaaattagccaggcgtggtggcgtgcgcctgtaatcccagctattcaggaggctgaggtagcaggatcgcttgaacccaggaggtggaggttgcagtgagctgagattgtgtcactgcactcactgggcaataagagcgaaactccatctccaaaaaaaaaaaaaaggacaaagggtgagcagagctcagattggttattggagaagacaatacagaggaaggctccttggtggttaagagtagtcttttaaaatcagacagatctgagtccaaatcctagctcaatcatttctcagttgtgaaaattcagtagctctgtgaccttgggcaaattgtttagccaaatgagaaaggtaggaccacctgacagtggtattgtgaggatcctgtcagctaaggctggtaggtgcttgccttggccgtgtagtagctgctcaggaaatgagatctatagagtgtattggtgaaagacaaatttaattttgcacataaagttatgaaaatgtctccttatggcagtgattatcatctaaaagtcataccatcccactgaagaagacctattttagggtttataacagactactctctggacaaccttaatccacttaaaaaactaatatatgcatacagcatttggaatccaaagaactgaattcaagatatggcttggccccttattctgtgatcttgaataactgagccttggttctcttgcttataaaatgtacctatgtaagtgaacaggtggtaatacccaccatgaaatactatggagcagttagaagcaacagagcaattagaatacrgatctggaaaacatagttccaagtgaaataaaaaggtgattggcaaaatgagaaatgtaacaatgccatttatgtaaagtcaaaacaaccacaagcagaatataacacccatgcaaataacagacatccagtacagtgtaatgattgtctacaaaaggaggagaatgcaagtgagttgggaggtttaaaggggatcaataaataaagaccacagaagggcctcagtacatttagaaataaataacatgcaaacaatgatgcttccctaccttcctcacgaggttactctgaggagctaatgagattgtgcgtatgaaaacaaaagttaattgactgtcttcattatgatctccatattggacaaatgaactgaacagagataaaaattccccatcacactttggcaggaagctgttgccagggcagcacctgtgaagccctggcctggcttcagagtctgctggtgagatgacatcaaaacccttcgtgtaggagggtggcagtctccctcccttctggagacaccaccagatgggccagccagaggcagcagcagcctcttcccatggatccaccacgagcgtcccacttgagccctcggaagaagagaccccggcagacgggtgccttgatggcctcctctcctcaagacatcaaatttcaagatttggtcgtcttcattttggagaagaaaatgggaaccacccgcagagcgttcctcatggagctggcccgcaggaaagggttcagggttgaaaatgagctcaggtaggasarcatcgatcttgctttgtaaataagcagaggctttrtgaacagcttcttgggaacccaaggaacctgtgttttcttccacatgtggaagaggtgatcttcccactgggagaacagcagatttgaaatcaaagaacaactagttaaggaaaacgagataagtggggactgaatacaattatattgaaactagttgacaccaaaagatgagataaattttttgttttttgcttttcactcctatgagatgtgttatttagggatgataagcagaacactaattggaaaatttaatgctgaaccactcaattctattcttgaccaatttgaacaaagtatcactgggttcaacaaaaaagttttggctactttgatgcagaaagatgatttggttgcttggttcttacctatacatctgggcgtgctaaggcagctagcatctgtggtgggcgaggatgactagccagcttaccacaggcacccagatgtggccttgaccacatttttccaaagagtggtcctagtggggttcttagaaagagagatgctaggtaaagatgtattcactgttaagacagctctgtccagggatgacagacatcacactgagtgagatgtaatcagagcccaggcaaggaggcgatagaagcatttggaccacctagattggttcactcactaatccactcaccttgaacagcaattattcttgttgtttttctaacttctrtgtaagctcttcactgatctcaaatagatgaagagaaaacaagcaaaatccagaaacaaatggtattagaaccttgacataagtgatggttctggattaaactgttaaggggcttgcaatgaaggagtaatgatttatgcagttgaccgctttgactgtgcaagaaataaattgaccacaaattttcaggcaaaactataaaaattttatgtgaaaggacattttgattgtataaatagtctttgatatttgaaaataaaactgacaagcatgtcatgcagaagaaatgtcagcttccaagtgttgaggagacatatttcaaaagtcarttttcagatatgttaatgttcgcaacaccctgattcatatgacattgacttttcattcattttttgctaaaatgccccattcagaaattcctgaatttcctatggccyttcttccacctgatttctctttgcaaggtctccttttctctcttgctgcctctttgtaacctcctacagccactctgaatctcattttctaacatcctttccaagaaaatcctagatttcatctaactgttaagcctgcctgatattacagacttacatagaaggctagagttggagaagacaggaagattatataggtaaagaagccaaaaaaatagatttttttttttttttttttgagacagagtcttgctctgttgcccgggttggagtgcagtggcacaatctcggctcactgcaacctccgcctcccaggtgcaagtgattctcctgcctcagcctcccragtagctgggactacggacacgcgccaccacaatcagctaatttttgtgtttttagtagagacggggtttcactatgttgaccaggatggtctctatctcctgactttgtaatccgcctgccttggcctcccaaagtgctgggattacaggcatgagccaccacgtctggccaaaaatagattttttgraaaagaaattaaaagccttagcaaatatggaactgcttttcatggtaaagaaatttgacaagggttaggcaggaaggaaagaaccagaagcaccacttactggaaagctctccattgaaacgtccaagcttccagcaaggacccgctgatttattatagacacagcaatgaatacatacaaggcggctgaggcaggcactcagggagatgatgggaggtaagtttcttctgttggcaggacagctgaagaggcagctacatgccccagatgcctgctgccagggaccaagcccagctgctcaggcggcggaggaagctcactggtgcatggtgagcaaactgccgctgtgcatgtgatgatggcaaagttcccaggctggtagctcagaagacacattaaatacaaatgtgctctatggcgcaaaaataaaccacaggaagtagaagtcctaggtctcaaacggaatttctgtgcatagatatatagactttaattggatagagaaataaaaattattgtaggggacaaatctctagatacgaaatttagaaacctcaaatcctggctctgagcytccccagccatggggtatgggacaaggtcccctctctcccgaytgattttaatatcctgataaatggcctatctgatgtgatcaccaaatgagataatgcatgtcaatgtgctttgataaattaaaacagttagacaaatgtaaagtgtaattattttcttgtgaattgctggatccattgacctttacagcaaaaccctaaggaatgggctctccctccacaatatgaacaaggtcaaatgatatcaacaaatagaacaaagacaggaaagaaacccgtcaacatgttataactggttttttgggagtgggggttggtagggagagattatggctgtttttattttctgggttttccagtttttttttttttttgttttgtttttttgagacggagtctcgctctgtcccaggctggagtgcagtggcacsatctcggctcactgcaacctccacctcccaggttcaagcgatactcctgcctaagcctcctgaacagctgggactacaggcacgcgtcagcacgcccagataatcttttttatttttaatagagttggggtttcacgatgttggccaggatggtctcgatctcttgacctcgtgatccgcccgccttggcctcccaaaatgctgggattacaagcgtgagcaccgtgcctggcctccaatatattttttacaataagcatatatatatgtatgtgtgtgtgtrtrtatatatatatatatatatatatatatataagcatatatatgtgtgtgtgtgtgcatatatatatatatattttttttttttttgaggcagggtcttgttctgtcacgcaggctggagtgcagtggtgccatctcggctcactgcaacctccgtctcccagactcaacggatcctctcacctcagcctcccaagtagctgggactacagatgcgggccatgcccggctaatttttgtagagatggggttccgccatgttgcccaggctggttttggactcctagctcctgccttcacctcccaaaggattacaggtgtgagccaccgtgcccaggctacaataagcatgtactttaaaaataaaaataacaaagaaagctgttttttcagctgataggcaacagttttcattgttcctaacacattctttggctgtcagaaggattaaattagagaagaaacctgattcctgctttacttgggcctgaacacacaaattagaaatggtgtacctcaaagtgttgcactgtctggagctatttcattctgcaacatgcatgcaacataattgggtggagctttgctaacatttatgctatattgcaaaatacgtgccattcaatgtgccataggaagctggtcttaaaacgtagataagggaaagtattaaaacccttgaggcatttttgcatatttatgaaaagaatactgaattttattccatggctaacttcctaaattttagagcaatttgccacccgggtcaagctggagaaggatcagaacctactgcttgtcactttcttatttcatcctgagttccaatacgtggagctattttaaaatttcattctgttatcaaccctcctccataaacacattagtgtcactcgagtccatgtgaagagaccaccaaacaggcattgtgtgagcaacaaggctgtttatttcacctgggtgcaagcgagctgagtctgaaaagagagtcagcaaagggtggtgggattatcattagttcttacaggttttgggataggcggtggagttaggagcaatgttttgtgggcagggggcggatctcaacaaagtacattcttaaaggtggggagaattacaaagaaccttcttaagggtgggggagattacaaaatacattcgttagggtgaggcagaaacaaatcacaatggtggaatgtcatcagttaaggctattttcacttcttttgtgtatcttcagttgcttcaggccatctggatgtatacgtgcaggtcacaggggatatgatggcctggcctgggctcagaggcctgacaattagttaagcttactctctgtgtcttgacccaaatcattgatgctgaggaagaaaatgcacgaccaggaaggttrgctctccacctttgcatctacctagccgtttaacacttgccaagttccattgttcaagcagcttgacacccaccagaggatactgtcatccttcctagacttccatagtttatctacaaggatgccactggaaggcattgtcttcagtgaaagcaagatgcagcatcatgtcatcaccaataaagggctttgttagtacctactctgtgcagtatttgtcaggttgtggagacacaaaatagtggaagacatgagtcctgcaaacaaggagtttacagtcagacaggaaagtcaggaattgtacctttgtcrtcacctggaattaaaaaagtagcatagcatatattccaagtttgaacaagttttctttaaaaaaaaaaaaaagttagcatttgcctgctcattttttacttttagtcttctagtattattttggtctagttttatctmaactggctgcttgccctttccattcagtcattatataatgtttgacatgtggattctgtctcactcattatcccaaaaccatcgcctccaaaagtccctggcaatctcatggtagtaaaatgcattatttttttccacctgaatgttggtaaagactctctccttgactaaactgtagcatggcttctagcagttaaggccatgtccctaggatggccccctttaaaatgcctgcctgagaaagttcatcactgccaggagaatgtcctgtttattctagccaaaggcaggcaacagggagctggcccgtgaaccctctcttaaagcagttactttagaaagttgcaatgataaatcctttctctgtccctttgagatgtaaatcttctaaccatccagaactgtcttccaaggatctgaaaaaagcaacccttcaaagaggtaactccgactttcagattctgtgggagggagggcctaacttcagaggaccttcctctaatttacaccacaaaagtttgcttctcctccaggaaagctccaattaacaaacccagatggcctagtcacagggaccaacccccctactacccctcaggggcacacccttcccctagcagcacatcccagttttttaaaagtctcatgccttttgttcccataaacactggggcctctttcctattgccatcattatgactgaatataaccatccttcccactttaactagtgtccagctttgttaatctttggcaatgttctattctacacttcaaatttatggtgtctgaaatcaaaatattcaaagtcattgtttgcaaaataaacagaacatcagtcgaaggaggtcagtttcctgctctagaaaataaaagttgaactggccactctccaggccaggcccagaatccaaacacagattccctggttttctttacagtttttcttgctctttccctaccaccttgagtgccttctccctttacctctctgcttcccagaccttagactcctgaaagcccccagagagaagctttcctccctagaatgctggtgggagtcactgcctagggtgggctcccagcttttccttttgatgagcaaaggctcttaatctcatccaattacccctctctgactccacaagccacgtgtagacctcagctacagacttagacaattttctttcacataggaggcctcaagaaatatttgctcagagaatgatttatctggtgaatataaaaccagcccaaggaacttgtgtttaccaagagtaatttttgtaatgaattttttttctgcaatgcatgagtattaattttgtaatcagcaacataataaatattttatttttataaattcaagagcatgagcatgagatataagcttttttcttgctctgatccaaattactttgtatttcaaaatttgcggctttaaattaacaaaaaatttcttaatcccatktaaggtgggccaaaaaaaatcgaggcaagatcgtytcagtcataagtacagcagggctggagacagaaacctgtcyttagtggtgctaggtgctagtaagagtttgcaataaaaccaaacaaaactgcatgatctttctgttccaaggatactgaaacagatcagttgctaagtgaaattggtagaagggtttttaaactgtaaacaggtcagtttaactgtaaatgactatttaagtcactgtttacaaaataagtcctatatcagatgggaagaatcaggaatgacctctccctgggaagaagacagcaggtgaccatccatgaggatccagaaagtcagacagagggtgggaaggagtctatacccaggcaaataaaaatagctgycactttcctcctggagggtttttctaattatacttcatgagaggcaggatcaactaggaaaagaaagacaggaagaacagggraattattgcctgagggaaaaaatgcagaactgaagtctgtgagttaattccataacccagggcttttcagacatctgagtgccacagtcacgattcttgtaatatcttttaccacatcttttattataatatatacgtaatctgtttattttgtttgtttatttgtttggggggagacagggccttgctctatcacccaggctggagtgcagtggcrcgatctcagctcactacaatctccacctcctgggttcaagcgattctcgtgcctcagcctcccgagtggctgggattacaggcacgtgccaccacacccagctaatttttgtatttttagtagagacggggtttcaccatgttagccaggctgatcttgaactcttgacctcaagtgattcgcccacctgggcctcccagagtgctgggattataggcataagccaccacacctggccagtgtgtttcttttaattgtccctaaactgactcatttaaaataaaattagccttgttctaaggaataatatccataaaacctatgatctgagatgcataatttaaaatacagatataaataaacacataagccttttaaatgttcaattgtgtacctcctaaaattatgtcacgtacctgcagagaaacgagtaccatgttggaaaacacagctgtcattgaggccaaaggctcgagtgggagtcaaatctaggctggggcagttcaatagaaaagatctttctctacagtggtgtttctcaaagtggagttcttgggctgtggggtggttttaaaacataggtcctcctgtggagagggaggggcaatttccccgtcctttgcatctgagagtgctggtgactgattcaaccagtaaggtacagtggaaatgagactgtgtgactttccctgggacacaatctctgggaccccagagcctcatgtaagacattggcgcctcctcttagaccacataaagttgcttgggtccccagtccctagttgcactgagcccagctttccagccatcctcaccaaggtggcagaatgtagaaccacggggaacatcagcacctcagcagaagaatacagggcagagagatcacccagccaagcctgcctgaagtgctgacccacgaaattgtgagatataataaaatagttgcctttttaagtcattacattttgggatcactggttatgcaacagtagataacgaaaacagactgactatatcagaatcaccaatggarcttgtcaaaatgcatattcctgggcctcaggtgcaattctccaggrattctgaagtctcataatgggacccagtaatctgaattttaacctagcttcctggatgtctctggtagacactagagtttgagagacattcctttagagctattcattcattcattcatctatccagtctaccgtcatctttttaccattactataaatctggccatgtgctgggctccaggcataacccagagaccatgccactgtccctgctctcagggacaccaaggaccaagctgggcacctgacagtcaagcactagttgaaggaggagaccctgaatcttcttccctgtaggagactgaggkaccaatgccagttctctcagaattgctataatttgttcaagacctcccaaacttagtccaaagcactaacaatcggtcatggccaagaaattaggagaagattgaattcactgatattttggaaatagccatctcagcagaaccttgggatctctgaggttgaggttggctgccggagggtttctgtcaccttttattataagaaggaagccaaggtctctgtgggcaaggcagaaacaacttcagcctcaatcacagattcatttgcccttgaaaatgacattcatgtatattttcccccaagtagaaaagtgaccatagatagttcattacagaaaatgagaaaataaagaaaaacatttcaaacacacaaacaaagctcccctcaggcatctaaccacagtctagcagaacgttaagaggttgcttgagtcaggcacacctgggtttgaacctcggcttcatgtaagctcccccaggcttggttttctcctctgtgattacattgcctactgtgctaggctgttgtgaggattaagtaagaatatgtgcacatgtgtgtatgtcattatcattatctttgctaatagtcacaagtatttctttctagtctgattccctttatatgccagtatttattgttggttacttaatagtgccttgagccccatcccatctgtactccccagcattctaatgtccccatcagaggcagggctgtgtccagaggaatcctaggtggagagatggtggcgatggagcagcagggtaggagtggatggtgacaggccagaatttggacgatgagtccagggctcccccttgacacgtccatctccctcagaggtttagggaaaacccagagcccagagagcctgacagcctccctgtggctgctccgtcttgatgtgtggctatggcaactgttctttcaagttttctggggcagttctacatgtcctgtagtctagtttagtccatataatattgtacataaaatagcaaaacacaaattctatgtggcagcagcaaggcaatacgtttactgctgttatataggaggtgctattccatctgtatttctgcccttgggaggaaatcgattttcttattattatgatacccatccagatgttactccctctgcaacaagaggaagtgagcagctccctccttttccaaagaacacaaagtcatggatggccaagcacatagactttgatgagaacagccataggatcaaatccctgctccacctactaattattcgctgggtgaaatttttaacatttccaaggctatctcttcccttttttttttttttttttttttttttttgagatggagtttcgctctgtcgcccaggctggagtgtagtggcacaatctcaactcactgcaacctccgcctcccaggttcaagtgattcttctgcctcagcctcccgagtagctgggactacaggcgcgttccaccacgcccagctaattttttgtatttttagtagagacagggtttcaccgtgttagccaggatggtcttgatctcctgacctcatgatctgcccccctcagcctcccaaagtgctgggattacaggcatgagccaccgcgcccagcctctcttcccatttttagatggggatgatcatatctatctcatggcattattgataattaaatgaagtgatgtataaagtgtgcctaccagagtgtctagcatatagkaatattctaatattgttaacatttccagtattggagtgttcagagcagagagaaaaccactgtaccagcaaatagacaaacagctgccacaagatagtgataagaaagtatcagcagagcacactagaggccatgggtctccttagtaatactgctcggtaagggctcggagctgaaagtgaacaacacacagagactgtgaattgcctgtgaggggctgatggcaaccccgacacgaggaagcacatcacagcccagatctagctggccacatgcagaggatcagccgaactcaggcaacacaagacgatgggaaatacagtctgggccacaacagagattctctcaacaaaatttcttaaattatttgtggcaaaggaccagttttcaaaaaatgtgttgaagaccaatgcttcttttttttttttttaagccacaataaaactattttggtgatgtcaaattacaattaaagtttctaaatgctgacttacaatttctgaacttaccttgttgggaactagtggcaaccaatactgagctctgagtagcattggcttaagaggttttgtttgactttttggtttttgtgtgtgcttaagattattattgctcttttgttttgtttgctagttgcttattgaacaggaagtgggagtttaaatcagagccttccttcatatgacgtacagcctgtcatccacaaatttgtttgtattaattaagaaatgcatatggttctcacccaacaatgtgagcgcagacattctcacactgtctcagagaatcccaggagaagaggcagtagggggagtggtaagagtgtaggtggttaggggtcccagggttcctctttaacatacccttctccctctcagggttaggtaaaactctatttattgtaataatattataatwaataataatgtatcataagtataataatataataataatttttccctccaaaaggcagaaatatagatggaaaatatagatggaataacacttcctattaatccttgatccaaagaatccttcaggaattttattataaataaattttgaaataatatggatctacaatagggaagtggttatccatcttcctttaattcttgtagaatgttgctttgccatgacttatttctgtttaggcacatcctgccatccagatgrtctcagctctgaccccagcccacacctctctctgagcaccaacctcagatcccaactgtcaaccagatattttaatttggatctcctgctgtccttcaaatgcggcatgcctgaaataaacttcagttccaccgctccaccccttcccccaaagagacgcaacttcctaaatctgatttctaccaaaagtgccattactttactgtgattaatatgctggagtaatatttgactccctccctgaattcatctttcataggtgagctgatgcagatgtcyaccatatttctcctctgcttttctgtgccagactgggttaaaatcatctcacacttacacaatcatttcatcttcctaagtagttccgcaaccctccctaccccattacgctcccctccaaatcactgtatgtaccagactcgtcttttaaaataacactgtagtgctatcaatgttctgctcacaaaagccttcactggctccacaaccccagaaaataagatcaaacctcctcaacaggcttctaagaccttctagaatgtagttgtccctacgaattcagccacatctacaattacttcccaatataaactctccactccaacccaggccattctcctccctgtccttctggcccctgacccttttcttccaggagaaccctaagttctgccttttaggtgtgtcattcaggactagacacagtcccagctctgccaccaaccagctgcctctcccagcttacaccatgtttttttccttctctgaacatggcagatcttcatgcctcatgtcttgtcataattcacatcataagccatctgtttcrtgtaacatactagtgtctagtaacttcctttttcttctttggtacccaacctcctcctactaccatcaccgccaccactatcacaaggaatctagggttgtgcatataatagcaaatttaaaaatacctcatgaatcagattctatcaaaaaaagaagatggagaaagaggaaatcaaggaaacaaaataggaggagaaagagaaaatattgctatgttttctcttcgatgcttgggtatgctgtgtgctcatgctattgctcagatttatagactatttgaactgaaaggatcttaaaaatcactgggtccaataatataatgctgaatgtgaagacttattaaaaactagaaataacatatctggcccagaaaaaacaataaaagaaagatgagtatcatttaccagctgtgtgacttttagaatgtcacttgacctctctgttcctcagtttcctcatttttgaagtgtgaatgatgtaacacttattgaggagctaaatgagatgatgtaggtaaagcacatggcyaatgccttaaacatggtaagtgcttagtacctgttaagaaaaagatcyctgtccatgcttcgaaaacatgtaaatcaaaatttcttgaaggctggttataaataattaatttattrttaataataaactgtgagatcatttaatggggtgtttctatggtctgaatatttgtgtcaccccaaaattcataaattgaaacctaatccccaaagcgatgatattagaaggtggggcctttgggaggtgagtaggttatgagggctccacctagtgaatgagaaattaatgtccttaaaaaagaggcccgagagagctgccttccccttctgctatgtgaggacacacagtgggtgccatctatgaagaatgggccttcactggacaccatatctgccgaccccttgatcatgggctttccagcctccagaactgtgagcaataagtttctgttgtttataaattactcagtctaaggtattttgttatagcagcctaaatggattaagacagttgcttaawccatgtaagcatagctacatctgtacctatttctatgtctactttggatcataatataaaacgtatttctaactgtgggtcactgtcaaacaagtttgaaggccattggattattaaagtcctccactagtaaaaatggagcagcatgccaaaacctcatgtggaatgctaggtgctactttaagagcagttttaccttccatcttttctggaccttggttttccatcaacgcctcagtcctgctaatgttgtctttattgttcgtgcatctgacatgtaacccggaccactgttgccatactaattaatgtagagagaattcccttgcatggagrcctaaattctccacacctatggttaggtctarcatgtgtctttctccatcagatggaatgctcagaaaccttgaggaaagaggagagcttctgattttgaaagatgtttcagctggtaactctgtcttgcattttgcagtgattctgtcacccacatygtagcagagaacaactcgggttcggatgttctggagtggcttcaagyacagaaagtacaagtcagctcacaaccagagctcctcgatgtctcctggctgatcgaatgcatargagcagggaaaccggtggaaatgacaggaaaacaccagcttgttgtaagtgtcatgggtgtgattttcactgttctttgcttgatggttaagaacataggcttaggatcaacggagctggggtaaaccctaaattctctgcttactacctgtgtgaccttgggcaagtcacttagctttactgagcttcagtctcttcctttataatatgacataacgataatgccagcctcacaaaatggtcatgaagattagaacaacayacatgtaaagcgctgaacacaatgtgttgactatagcaggcatctaacgagtggtcgctattttcccgaacacatttatacacaaatctttcaaaatatttaagccttgatattctagcagccagaaaagcaggagattcctttttttctctcactgtgatcattcagaaaacaaaacaaaacaaaacaaacaaaacaaaaagttaagctctcaattccaaatatttgagcaattgtgctaaaatctttgggaagagggcttggaccataactacagaagttcatagaaaacgaagatgatatttaattgataggtcttttcatttttttttctgatttcaaaaataatacgtgttgataatagcaagttcaaatattagagatgtatataacataaattttgagtctcctataattttatcctccaactacagacaactacttccaaattttttccrtacatatctgttattrctattaatttttattgaaaatggatgcttatgcatttgtttaggtgagaagagactattcagatagcaccaacccaggccccccgaagactccaccaattgctgtacaaaagatctcccagtatgcgtgtcagagaagaaccactttaaacaactgtaaycagatattcacggtaacgggactttacatcaacacccagggcaaacgaagggcttgcagcttctttctgtggaccgcaaattaaattataaatttttctgaaaacctgggaaagttttcctcccacctacctgcagccctagmctgatctctgatccttctatccttcttctttctatcgagactgggtctccttccttcctggaaatagacaaatacatttaggttatattctttagagacagyggattactatttacagatagttgtcattaatgggcgcaacacttgtcaaaagcaaatattctgaaaaaacaaatactggaattagtccaaaacatagtaagagcaaattacatagaaatggtaacaatacatcaacagcttttgctgggaaaccaaaaaattgagcaaacctagattccagcctttctgatattcactagtttgggcaagtcaatttctctctctgagcctgtctcctcatctattcaaaaagaaattggatggatcatatctaaagctccactcagccctcagattggtaattgtgttttgaatggccctaaaacccacaactgcttgtctgctagcctagagtcagtggttagctggatgaaacatgtagtagtagatcaatacagagcttctcatttctagacttccagctccatgtctgtgttggaaagactaggaaattgtagctactggatatgctgagcatgagatcacacagctacagctgcttcctcccctgctagaaatacaaacgtgccctaccttaaataatcctggctctgggtctgtgtgacctacgactacactcattcattcaacaagcctgtgttaagtgctgtgtttcatggggctgctcagtgatcaaggcagaattctagccacaggctagtgggaagatagtacagaaggagggattatgctgagtcatgactagcaagatgctgtgagcaccaaagcattttttagttaaatcatctgtgaatgtttaatagcagtgtactccaagtttccgcataatgcactctggtacctgtcttttcaattcaactctactccatgacaccagagaggcatacaagkgtatgggagaccccatcctgacctagaaggaaacacgcaagtggtattccaatatttaaaggagagcaagaggcgtttgtgagtgaccactggctcaggggcttggaagcaaatctcctgcttatctggttttatcctgcaggatgcctttgatatactggctgaaaactgtgagtttagagaaaatgaagactcctgtgtgacatttatgagagcagcttctgtattgaaatctctgccattcacaatcatcagtatgaaggacacagaaggaattccctgcctggggtccaaggtgaagggtatcatagaggtaagggtgaaatgggatttgtcccacttcccaataggtaggtgggaacgggggagagagggatgtagctaacagattttcctgtcaactatgtagatgtggtgtacatcacaaattttcctttatacatattcctctctctctcctctgtctctctctctctctctctctgtttatttttatacacatacacacacacatacacatatatatatgttaggggttgtgaatatcctagtcacatggcaccaaaatacgttagtggtggcaggtgtcagagttaccgatagtgaatccgttcgggtctgcagcaaccccaattattgcttccgcagaagaaagaattcgactggggggcataaggcagaaaaagagactgaggcaagtttcagagcaggagtggaagtttattaaaaagctttagagcaggaaagaaaggaaagtacacttggaagagacccaagtgggcaacttggaggacaagtgcagcgtttgaccttttgacttggggtatatgttggcatacttctggggtcctgcgtcacttttcccrtgattcttcccttagggtgagccacccgcatgcacagtgccctccttgtgcttgggaggggagcatgtgcagtgtgtctactggagttgtatgcatgctcacctgaggcattcttcccttttccggtggaatgctccggaaagtcatactctgccattttgtctcttaatgtgcatgctcatgcccactcgcccaattcctgagattttaatggaagctgctgattaccaatttcaagtgtttttatctattgggaaattgcctctccctggcgccagttgtgactaatcattttatagggtgacaactgccagaccatcacggaattgcctctctctagcactggctgcaaccaattatcattttagagagacagtgtgataactcctggaccatcacctgatggtcgcctgacattcctggtttggaggggggagccctctcctgccctgctcatgcctgactagctacctactctaacatataaatagatacagacgtgttatttataatccataccctaatattatcacagctggagctacatggaaccagctagtagaagcagaactctcccatactgttattaatcacagtgaaagactcaagtggcctaaatcttgacagcagggaaatggtctgatttccctcagttccacctgggggcgccaccttagagcagtggtgcgtttgacatgaagtggaggtggttctacacctctccagggagagcgccagaggttgtgcttatttactgaacggtgtttagggattccccagcaaagcaagttggtcatctggtagtaagtttctgtatagtcaagtgcaaggtatattattcaaggacaattatcccaactctactcagaggaagggggctctgagctagacatcacaagggcttgaatgtagattggctttttggtgggtccaaaattaaccttgtcaatggaaaagtcttcttatttcagtaaggtcatattcattgaagagaaaattatcaccaatatttggacatacatttttcagtgaatattttggtttgggattctgtagatctggatcctaaccatttgtatctttgttcctaaggatcgtaaaggggtccttggatatatgatgagctagcattttcaagattgtagggaaatgtcttgttttctccagatcaattagggaaatacccctgcatgtgatgcatgcacatttcatgagaaaccaaactactaggtccatgaatttgagagtcttagacagtaattgtccaacatcactaatttaaaatatttttcaactgtccattaggagattattgaagatggagaaagttctgaagttaaagctgtgttaaatgatgaacgatatcaatccttcaaagtaagtgattttacatatatttattgaaaatggtttttcagttaatcttattacttattctggctggttgtattagtcagcttgggctgcaataacaaaatacagagatggcgtggcttaaacaacagaaatttattttctcaccattctggatcaagatgtcagcagggtcagtttctggtgagggttctctttctggcttcttcctgtgtcctcacatgctcccctgctcacatggtgagagagagacagagagaacaagcaatctttctggtgtcacaaagacactaatcctgggccgggcaccatagctcatgcctgtaatccaagcactttgggaggccaaggcgggtgcacttgaagccaggaattcgaccagcttggccaacatggtgaaaccccatcattttacaaaaatacaaaaattaggtgtggtgaggcatgcctgtaattccagctacttgggagattgagacatgagaatcacttgagtctgggaggcagaggttgcagtgagctgagatcaygccactgtactccagcctgggtgatagagtgagactgtctcaaaaacaagacaaacaaaaagacactaatcccatcatgagagccccactctcatgacctcaaaggccctgtcttaaatacggtcatactggggattaggacttcaacatacaaatgggttgggagggggaattccgtccatagctttggtctaggaagaaaatgcctaaataaattcaggtgcccagattattgccatgctgtcgtgatgtacaaattgccttaccctccaagagtctgtcactcatgggtacaaacatcatgggacatgaggaccatgggggggttggtggggacaggacggaactgctcttaaagagcagatttgtgtctgaaaatctccttactgcatcttcatttacttggaagcagggtttattacctcccaattttccctaccttagagttgcaagtggaagggacttccaccagttccttcaaagcaaaagtgatgtacaggcctaaaatatggccatgagcaggagcacaggcttggagtgtaaacagaccagggtttaagtttgggctgtgccacttcccacctgtatgatggtggagaaactatataacctacatgagcatctcttttcaaaatgtgagggtacctatgcagagcatgagtgtcggtgagagacccagcaaaagggagagccctatagagctagcgtatcactcatggacagcacaggcaggccgtcaattagactataccttagccctgcacaggtgccagaacctgcttgttacttctgtttcattttgtaatgccacatgtcaagaaaggactcacctgaaataaaaaatgcccttaaaaataaccatcacccacctgctcgttatattcaggagaaactaggtcaaagatttgcttatactttttcttcattgcctgagacctagaaagggtcatgactcggatgttataaygattatcttagagactgatggcatgcctttccctccattttagctctttacttctgtatttggagtggggctgaagacttctgagaagtggttcaggatgggtttcagaactctgagtaaagtaaggtcgsamaaaagcctgaaatttacacgaatgcagaaagcaggtaaattgtctctcctaaaagtcattgttgctatgggctggtcgggtcgtggtggagctctaagtcagttacactgcaactccartctgggagagctgggacacttctttgatgtccattgatgcttggatctaaatcctagctccagcagtttccagctgtgtgatcttgagcaagttggttaaaacctttgaaccttagttacctaatctatgaaagagagataacattgatacttagctgagaagtcaatcagwtaatgcaggcaatgcctcagcactgtgtctgacacagagcaaaggcgccctccactgtggctgtttgtggtccttcacccaaatgtcaagccaggttgtgctgctgatctggtccttactgactcttccggacattgggtcctggctgtctccctgggtaagagttgtgggtgaagagtcaaagacagaagggttggctgctaagaatacttgaacagagttgttgcctggcacaaatgtgaagatgccctagaaactgtaaaacaccaggaaaatagaagggaactggtggaaatctaggcacagggttgrtatacccaaccaggactctttmgccwaagacaagaccgtggtgggacatgagtgctgtcatcacccacctgaaagcctggcagggcctctcagaggttgaaggtagcctggtcacttccatttatgaggctcccagtaagttttttaaaaatgaaggaatggcaatacagtgtgaaaaaaactgtgtgtttaaaaaaatgtttacttttaacaagcaataaaaatacaatacagttgtgattcaaaaaggagtcacagccatagtccctactcattttttgtaaagttgctaatctttgaaagattgctaataatacaatgccacataggaaataaaagagtctaagaaaaaaagatccagtatttatattccaggaccctgaaagcacacgtttaataaggatgatttacaccagttctcaagatgccattcaaaagaaatttaaataagtattaaacataagtagcaagtaaatggtttggaatgatgagtaaagactctcaatgcttagagagaaattgggaggcaatatagtgtttcatttggatgaaacccttatcaaatgacgtccagtgctctcaggatctaagggcttccaattccctagctttgtaaactggayttttgttcttcctgttgagcttttccaaccctttgaatgaaacagctttattcatttagtcaatcagtgatttccatctaactgtttaatgctaccagttctatgcagaaatcaaggaatgccctcccattatacttatacccccacaagtagttataggcaccccttggagcagcactacaatgaatggaattgccaatgggaatagcttagaatactgtgaagggtaagctaattgaacatattgaaaggacagttcatggtcagatggataacctgatccagttttactcatatttgcacttgattgcagttccctgaggcttgagcgtgcacatgccacgtttgccttgaaaagtcagtttatgaactatagcagcacatatttaaccttatactgtgtgataagtttcctgtaataagttagtcgccttgccataccaaaaaggaaagccaattaaattactttcatggatgtcaacaaatcatcatagtcttacatgttcattcctgatagstgcacatcttcttaaagaaatagttgtgaatcctgacttttggatcgtgtatatcactgcataagcacaggtgtttgtggttacccagtgagttgtactttgaatattagtcatgatgacagtttctgtattacagcctaatagagcattgcttcttagatcaaactcctcatgctcacaaaaatggccatgttgcaataatttttagaaatgtggctttttaataaaaataaaaaataagtatcatattgaaataaagaaagtagtgttccacaagtggcgtggtttggtattggacacagtttataggtgtattcatatgaataccattttctcttggtcttgccagcatgtttccgtgactgtccccattagagataacatgggaaatttggcagggtgtgcaagccaaatggccaccctgctgcctcccttccacaatcccagggtgagaaacaaggaccaatagatttactcttgtcatttcagagggccagtggcaggtgaaatcgcaaagaagtagacttaggcttttcaaaagaaagaactggcacaacagagtttacaattaggaaacaggctcctctggaggtatcagagttccccattattagagtcaagcaaagtttgaatggccccctcttggagaccctagataggagagcagcgatgctgaagcatgatttgatgtccctcaggctctatggatctaatcaccaggctcatctcctcaccaatacttcaccccaatccttggagataagcctcccttctcctttcctctttctttccaaatctccctccacactgctctgtgggaaccaccaagttagcttttcatcataacaactctgaactttcattaattcatgctggtcaggcaaagaagcaacaagctaaaccacctaagatatttcctgccttgcttcagacacacatctactctgctcctattcttgactttaattttttaatggatccatcaccttccaactctaaatctcctcatcccaaatctttatgcgttaccttttaaaaaacagtaggacacagcctattgatcaagaaggctggttcttcagtaggaagtcagatctgaacagtttggattccagagggatgtgaaatattgtctccttctcaggaaattgtaagcctctaggttagaaagcaaagaaccactgttaccctgaaaaattcacaaccaggagaaccacatggactattctgtctctgtgggaatggagtttggtgttgatgcctgtagtcatgttagctctatcrtggggacagaatccccttctactgagggctggttgtttcacacacgtgtcactctctccattgacctgtcaaatggcctctcaggatttctgtattatgaagaccttgtcagctgtgtgaccagggcagamgcagaggccgtcagtgtgctggttaaagaggctgtctgggcatttcttccggatgctttcgtcaccatgacaggagggttccggaggtaaataacttgggtggctttgcctcctctgcccgaatacttcagtggctccctgacttggacaggcatctgaaacggcacaaaaggctgtgatctggtgccagcttctttctacagctttatctcctgcctctcacatttcatttcagcaaccccaaatggcttgtcatcccctgcacattcagagctgtttcttgcctgttgctttgcttactcagamttttctgctttgactgccattcctcaaattgtcgcttggctgacttcccctcattctttaacactcaatttagatggcaccttctccagaaagccttccttgactccctctttctccatgctggattagtgcccctcttccatgctccctgagtacctgcaaagcccttgatccacatagttacagtgatttgttcctgtgtgtggtttctccactaagtttgtagagcttagttctcagcaagactagttcatgatgcctagcacaaagtaggtgctcaagaaatcttggttgagtcaataaatgactgactgaatgaattcatgaatgagtgaacgcttcacaaggatgtatgttgttgttggatattgaggcctgcatttcagaaagggatttctttcctcccacagcctcctctacctctttctccagccctctcacctggtggcttttggccatcctaacaaaataggtttggggcaaggaagaaagtaagagaagatcaaatctaagataatgcctttactccatgtcataattccaagagcgctaccttgtattatgtgaatacaattcttagtttgcttgttgtcatgcttgtctccatgtgtgtatgtgtgggtgcatgtaggtttgtgtgagtgtgtagaataaataatttttttgttattttttgccttgatatacataatcagatacatgctatgtatgactttttctgtgtcataaatttattttgtaaggaacagcgatgtgtaaccaaggatattttgtttcttaaaaaaaagtcaagaaccttctatgttgcamatcttaagcatagggcatagaaacaaaggtgattttttaaaaatgaagactaatrtctaattgatttccattttatactgcttttgaaaattaggggtaagaagatggggcatgatgtagattttttaattaccagcccaggatcaacagaggatgaagagcaacttttacagaaagtgatgaacttatgggaaaagaaggtgagaagaaagatgaaaaatacatgcacacgcaaacattatgttaacacttgaattttgcacattacttgccttataattgtgtaatgaccatctaatcaattctcaattatttgtggcagcttatacaaagccatatgacctacaataagactttcctgttttgggtcctagagtacatgttatgaatatgtcctgtatcttgtttattatacttaccctattgccaacagggccaagggtggctatgcatttgtgtttgacatgcagaggcattaaagcacccaatcaaagtgaaaagtatgcactatgaagacctgggaaatgtaagctggaaagctgcaagcttgggtgaggkggcaggactgcaaagactgggataaaatcagtctaagaggtgttgatagtgcctcgatagattcgaggcacttcgtgctgagatggaatgaaggaaactaatgagggcaagctgagccctgcagaggtcatggctcagaagcccccatacattgcagagatcagacttgtgacaggcctattgcctggtggaggaaaccaaagtaagctaagctaaccctgcagccagagccacatgcaagccctgactcctgtccaactctagtgagagyctcacttcctagagagaccagagggtcctacccttgggacctgtagataggtctggctgggctggtgtttctcctcacagcttcctccttcctgagtagtttgcatctgtttggtgtggaccaagcttactgatatcccagaaaaggaaaacctcagataaagtgaaaataaaagctagaaacacaaccctagggccaggggcactggaagtgaagactcaactttagaaccagatccaaactgacacgagtttgaatactgggcgtcgagtcttcccagaaggagttggagggaattagaagcgaagggcagggaagggatcctggctagagagcctcacactcagccttgcaaccctcctcagaaggcacctgagactaaatttggacggagccttcctgtgggaggtcaagctgagtgcatctccctcctgccccacagctctcttcctgagaactggccgctctgtaccctggggaggatgggaaggatggagaggtggggaaatgcctcctcctagtcaggagtttctcagtgtccagtaggaaaaataaaagaacatgctgatgtcaatattcagtcaaccagtgggtattgatggggaagccagagcccagagggctgccctgtagatagccggggctggagatctagaggtggcatcaggggttgtgtgcatgtttgacaactgtggcctgctgcagacaaccttctgaatatgcagacaggagcattacgttcaaggatgcattctcaaacaccttgcaaaattcaagacaaaacccaataaagaatggcccatttctctcttacccaccaagtgacwgtttactgttaggaatccagctttgtgggctttttttttttttttaagggaaggtgtgttattacaaatttggctttcatgtgagacttgttcatatgttttatatctcctttttcaaatttacataattgaaatttacacaaaaggctgctattctgtactagtttcagcaagtttccttaaaaagtggaattgtattttccggagctggtgattcgaggttaactacggcaacatctaccacctcctccagaggttcttcctaacattagtgcttcccccttcaaatggtgttttttcttcaaggcgttgaagggtgaagagttccctctattgaggtcaacaaaataaaaagtatctttttgaattgagataatgtcttgtgcaggtttgtagaagaaagacaaagcatgattcctaacaataatcaatttaccaatgatgctcaaagtgtggtccctggtccgggaacaccagcattgcctgggaacctgtcagaaatgccctccctgcccctcctgcatcactctggggacagagccctgcaaactgagctttagcaaaccttccaattgcttctgatgatagcgcttttaaacatctaacctaaagagtacatggtaacaaatcacacatcccagtagcttgatgacattatttgagggttacttgctgtttttgttgccagatttagtggttgctagcaygtttctctctcctgtccccacatctgccctgtgccatcaggaactcccaccaagaatggcaactcgattgggcacatcttagaatcacttgtccactttctggataggcaactttaagtgaaacatgtgtcattaactttatcccactttctccaaggcaggtggactaacactctcatgagaaagagtctcccaagtgctacctagaaatagcaagtcatcttgccccaaagttagactcagcctccagccacaacgcttttggctggttaaacctggtcatcagtataatrtgaagggacactgtctttgtccatttaccttgctataaaggaacacctgaggctsggtaatttataaagaaaagacgtttacttggcccatggttctgcaggatgtataagaagcacgacaccaagcatctgcttctggtgcggcctcagggggcttacactcatggcagaaggcaaggaagagctggcaggtgccgaggtcacagggtgagagagaaagcaagacagagtggggaggggccaggctctttgtaacccccagctttcacgggagctaacaaagtgagaactcactcattaccatgaggatgaggacggcacaagtcattcatgagagatcttcccctatgacccaaagacctcccattaggccccacctccaacattggggatcaaatttctacgtgagatttagggggacaaacatccaaactatagcagacactaactcaaagctgctccccagaaacaatatgattttttaagttttattatttatttatttctgagacagggtcttgctctgtctcccaggctagtgtgcactggtgtgattacagcttactgaagcctcaacctcccaggctccagggatccttccacctcagcctcctgagtagctgggactatagacacgtgccatcatacctggctaattttaaaattttatgtagaaatgaggtcttattatgtcacccaggctggtctcaaattcctgcagcgtggctttttgtttatggttggtttgtttttaaaggactgaggagagcccagagcactagctgaggttcagaagtggagagggagattttcttgcagttttgccattaagtggctttgcttcagcctctctcatcgctaaattccttttccgtaaagggaagataakgcaaccactttcttagtgttttctcctagtgtttgcaggtgggcctttaatgcaaggccaaacacatgtccatgttctgctcgaatctgaaaagatttcwttaagaatccagtgttaaatcatagatcttcttcatcagggccttttcctgatgccrttctgtttcttttcagggattacttttatattatgaccttgtggagtcaacatttgaaaagctcaggttgcctagcaggaaggttgatgctttggatcattttcaaaagtgctttctgattttcaaattgcctcgtcaaagagtggacagtgaccagtccagctggcaggaaggaaagacctggaaggccatccgtgtggatttagttctgtgcccctacgagcgtcgtgcctttgccctgttgggatggactggctcccgggtaagtgctacatggacccatgggatgatgttagctttctgaaagacgtaggccgagtctacctgggcccaggggagagatgacggcaacaggggctgggtgacaggggaggggccagtacccagaaacctctaactcaaggcatcctgtccacacatggccaagtatgacagattaatttagaacagttattcccagtgtgtggtccccaacaccagcagcagcaaccttacccaggaacaggttagacatggaaattcttcaccccactccaaacctatggaatcaaatcagcatctctggggatttcagcccrgaaatttgtttggaaaaggcttctaggtgtttctgatgcagctcaagtaggagaaccactgaagtacagaaaccagcaaggggattgaaataggaaacaattaataaagtggagaggcaactcacagattgggaaaaaatrtctgcacatcatacatcacataagggccattatccagcatatacaaggaaaccaaaagactcaataacaagaaaacaaataatcctatttaaaaatgggcaaaggacttgaatagatatttctcaaaagaagacatataaatggcaagcagatattgccatcttgcttaacatctctaatcatcagagaaatgcaaattaaaaccacaataagatgttatctcacatccgtcagattggctattatcaaaaacatgaaagacagcaggtgttagtgaggctgtggagaaaagggaaccctcttgtattgttggtggtgttgtaaattacacattttggaaaatagtatggaagttcctcaaaaaactaaaaacagggctaccatatgatccagcaatcttacttctgggtatatagccaaaggaaatgaactcagtatgtcaaagagaggtctgcactcccgtgttcattgcagcatgatacaccatagccaagatattatataaaaacaacctaagcatccacagcagatgaatggatttttaaaatgtagtatatgcacagtggagtatgacacagcctttcgaaaacaggacattctgtcatttgagacaacatggttgaacctagaggacattatgttaagtggaataagtcaggcacagagagacaaatactgtatgatctcgtttctgtatatgtagaatctaaaacagtcaaactcgtagaagtacagaatagaatgtagaatggtggttagcagaggctgggggatgaggacagaaaatggacagggaaaagggtcaacaagtacaaagttccagtcagacaggtggaataaactctgttctattgcacagtatggtgactatagttaataaaagtgtatatttcaaagtagctaaaagagaggatttttaatgttcttaccacaaagaaatggtagawgtttgaggtgatggacatgctaattagtctgattttatcattctgcaatgtatatagatgtatcaaaataycatattataacccacaaatgcatacaattattatatgttaattaaaaataaaatcaagctataaaatttttctgaaagagcacaagttgagttcatcccagacctggttgcaagctcctgctctgcttcttgctgttgggtgatcttggacaagttcyctatatcctgtaaaactcaattttcccgtcaggaaaatgaggacgatgaccttagctacttccctgagttgcagagacattaggtgacatgatgttctcaaagcctcagcaccaagccagcacgtggccagtactggataagtagtagcttccatatcctgtcactcacaggagaggacacctgtgatttgagtcccattcgcatgtgttccaccctcccaactaaacacctcaccctgtttctcctgttttcccaggtagctggttgttgctttgagtgaaatgggttcgtagagggttttttatacagatgaatgacacaacacaaattaattgttctcagccgtgggttaaatgtcaggtgtctttgctttggactggaattaattcagcacagcatcttagcactgggatttcttactctaatcacaaatgttgactgacaactaaatgcttttttcattcctaaaaaaaggggaagaaaagaaaaaatataycataaatgcaacttgtctgatagacataaatctttgggaacacatagttgattgagaaaggggaacgttccagaaagaagtccttggttatgcaatgtcatgccagttaagcatcactggctgaagtggttgacatttgcccattttatttttaagatggacatgttttcaacacattctagtctgtttcctcagagtactcagaaattgttgctgttggttctgcaaggcactggcagagcactaagctcttttgctttttagctgggtgactttaaacaaataaaggacttctgattgcaaagtccatctcctcaaccatcccgggtgagctttcctaaaatagcaaattgttccttaccactagagggcaccagtatcccaggcttgctccctactcccacatgaagaggacaaaatttctagattgtgtttctctcaggaaaactagtctccatgacaattcgttgccctcctttcccaaggtgttcctgtcctctgtcttaggcttcatgtattgctcccttcagtctcagagcccattcctgactgtgggagatgtcatccaggagcagttgacttagacgatcagtttcatggcatctcagtgtgaaaggatgttaaagccagagggagtcttaatcatgtccttcctccatcctttcattcactcaaccaagactcagggagtctggatgacttgacaggagatgcacagccaggtagggacaaagtccaggctggaacgggttccctgactcctccatcctcttttacaataacaatattccaaatcatgtaacacccaccaaactagtatttatccagcatttactctggaccaggcattatcctggtagaacgctcacgctattcatttattcattcaataaaacatttgctatacatcttctacatgcgaggcactatttgagggaatacagttgtggacagaacaaaccaggttcctgctctcacagagcttacattctagtgtgttcatgggagcacggacttctgtcaccagagaatttggccctgggggaggaaaatcactttgagaatgtttagtggagttacatatttcactagagggatgtagccacctaatactgaagacattctagaygtgttaataatttattttaactatctcctatccagcagtttgagagagacctccggcgctatgccacacatgagcggaagatgattctggataaccatgctttatatgacaagaccaaggtacagttctcttcctaaaaggggctactttgatcctcatccccaaggctggcccccgagctyttttcatggactgattttagtatccaggtatggtttcctttgtyatgcgtgttctatttccagttcatcatagttgagggcagcaagaaagatttccacagactcgcagtttccacccggcccagaatgcaattcgagagattttggctgaaacatgatgagctaattgggcttccagaacaagtccagcagtgaacattaactgggtttggtatatcctcggtgttggcaatgagtaactccaaagtaaaccagggatccccagaaatcacaaatactacttgtgtacccctcaaatgcagggggcagtggcattttgagtggccatgtaggccattaacaacagtctcctgcaagaaagagagcaacagagctgccctgagacataaatgagcatccagctagtctcattgactacccatgtcactcatttggtgtgctagtcttactgtggtcatgatccaattcatccctcagcaaaacgatagatgcctgtagaagttagaagagttaaatatccaactgttaaatccacagttctaagggctactcttcttacagatatcaaggacaccaaaataggctccatggggaagaaaactcaaaataactagaagtaatggtagtggccaggcgcagtggctcacgtctgtaatcccagcactttgggaggccgaggcgggtggatcacttgaggtcaggagttcaagatcagccaacatggtgaaaccccatctctactaaaaatacaaaaaataaccaggtgtggcggctcgcacacacccagctacttgggaggctgaggcaggagaatcacttgaacccgggaggcagaggctgcagtgagccgagatcacaccactgcactccagcctgggcaacagagtgagactctgtgtcagraaaaaaaaaaaaaaaaaaagtaatgatcatttccctctaggagcttgtagtctaaatgagatgtattcagttagagttgtctcagttacaaatgttagaaatcaaatctaaagtggcataaacaaaaaagggaacttgggttatatactgcaatgtcgaagcgttcaggggcagccgaatatgggtgctcaggcaggcttccctcagtattgcctttattctcaggcaggtttccccataagtcccactcttccagctacttcaacagagaagagcctgtttcctaatagttcccccaagaatcctacctgatgctcattggccaggcctgggtcatgtgcctatccctgaacccattactgtggctctgattggccagacttgggtcatgtgctgcttcttggaattggragcagctgcacctaaccctcctggactgagagtcaagaggrgtggtttcccatagaaaaatccaggtgctgctcacagaagagggggctgtggatgctggcaggaaagcctcggatgctaagcatgtgggtgaaggcagattcacatagtacaatgaaggaacacttacaaattaatacattctaaatagttcaatgtaagcaagtaccttctatgtgcctagcaccgtgctatgtacaagaagggatggaggagaagagctgcttggtcttaaagagatcacagagtgggatcctgctggggttagaggcaagcatggaaagctaaggaaaacccaacacatacaagtatcctataattaccagcagtacaaaattataactgcatgttagaattacccagtgcgttcaaatagattgattataagatctctcctgagcttctgatttcactggactggggtatggctcaagcttcaatgtttattttttaaactccatcaggttgttytaataaacagctgtggttcagaactacagcccgtaggaaaaatatccaaatggcttttgctgaatatgttaaagctgttatgattttactttaattcatttagtaccatgttttggaaagtcagttaaaatgactttttatactcagaagcagggaattatgtttgggctgtaattcattctgacaaggcaattttataagtaacactttcactgtgtccacaccatggtgcttatgaaaaatatctgaatgcacatatttcttgttatgttttcagaggatattcctcaaagcagaaagtgaagaagaaatttttgcgcatctgggattggattatattgaaccgtgggaaagaaatgcctaggaaagtgttgtcaacawttttttcctattcttttcaagttaaataaattatgcttcatattagtaaaagatgccataggagagtttggggttatttaggtcttattgaaatgcagattgctactagaaataaataactttggaaacatgggaaggtgccactggtaatgggtaaggttctaataggccatgtttatgactgttgcatagaattcacaatgcatttttcaagagaaatgatgttgtcactggtggctcattcagggaagctcatcaaagcccactttgttcgcagtgtagctgaaatactgtctatctctaataaaaacaggaggaaacaagatgatggaatctgtttttcttcactcaaatattataaactattttaaaacacaagtgtaaccaagtggaagaataaagagcttacagtttgtcttaaggggacaaacaggtttaattagaagatgcagagattccagaggggatttgggtccgttctggagcttgtggaggaggggtgctgcctctggactggctcagctcggctcagtgcctgctccttcccggccatcatacagctggttccctaagcatcccagcacaggaccacataaaggatgtattctccctgccatcgtgctgaaggaaagacaatgtcctaaaccatcaaagaaatatctccctcttttttccatcttggagcttctgtctacaccttatggctcagtctctctcaggaagtcagtctctcttggcttcttatctgagggcacccaagggaagggagggagccctggctgagggaaattttggaactcccaggctccagacccattctttcctcctgcctcctccaggaggcatagaccctttgccttgaagggagttaacaggtcatctgttccagctgcttccgtgtcttcagcctgctaaagagctgggaggcccatgacgaccgttttcccttccttccagtccctctgggaagaggatattgggagatacaataccttttggctattgtgactaatgctgctgtgaacattggcctacaagtatctgtttgagtccctgctttcaatccttttggtagggacctagtaataaaattgctagattcaatggctattctatactatgtttaactctttgtggaaccactgtactgttttccataacaactgcaccgtattacattcttaaccaacagtgcgcaagcgttccaatttctccacatcctcaacacttgttatcttctgcattatctgttttataatagctgtcttaatgggtgtgaagtggcgggtgaaaacttttgcccatcctggaacccaaagacagtccaggctgaaactaacacactgaaagggcctcagatggtgtgtgtgcctgtcacatcttgagttgatggctaaaaaaagctggggacaacaagagggtggacagcagccacccccactggcctcaaatcccaaaatccacaaagtattctagtcttttctgctgcccagtgtttcccagttatgacattcaagattattctaggtagtaagtagatgaatattttcatactgatataatcaataaatatttattgggtgcttaccatgtcagtcatttttctaggcacagggcatagaaaagataacaaaactgtcaaaaatctctgcctgtatgattataagcataaagcttatgttctagaaaggtgtttatttgtgttcgaaaggtgttaagaaaatggttccttattgatggtagtgatataaagcttcctttttggaataggtttatttatataagaaaagcgactcaaggtcagggaaatcatttaggaaatattaccagtgaaatgggggagtggcaagaatgaggagagagggacgcaggtggctgacatttgggaaatgtgcaggtggccttgtcgccctcactgagcaactccccagccctgttctctggaggtccccaccacacaatagccccaggaggtccatgccagaggagtttccccatcagagaacctcacagattctaaatgctactttccttatttgaaaaggcctgttggagattccacaaatgccatgtcttttttttcttttttgctgtaagccagaatttttatcagttctggacatgttttttttttttttttttttttttttttgccgtaggccagaatttttttcaattattgtggtgactagttaccagaactcagccttcgcctgtgcctcctactttggcagcagagcgccctctgatggctgacagaagaatccttggaggcaagcacagtatgatatagcagatcaagtaggaagcagattatctgttaaaaacattggaactatatgtaagaagccatggatcaccgatgctctatttgttcacttttttcccagccttttaaatctgtgttttatttggggtagtttttattgctgtatcttcaagtttactaatcttttcttctgcaatgtctagtttcattaaacctctccagtattttatctcacacattatagttttcatctttagatgtatgatttagtttttaaaaactatcttccatgcttctatttaacatattcaatttttcctctagcttattaaatacatggaatatagtgtaactgtttcaatgtccttgtctactaatgatatcatctgtgtcaattttgagtcagtttctattaactgagtattctcctcattatgggtcacattttcctccctctttgcaagcttggtaattttatattggattctagacattgtgaacattgtgaattttttcctggatatttttgtattcctgttaatattcttaaactttgttccaggatgtggttaatttacttggaaacagtttgatgtgtcctcatcttgcttttgagctttgttaggcaggactcatcttacttttgagctttgttaggcagcactaacgtagtctaatccagggttaatattcttccccactactgaggcaatacttttctcagtgttctgcctgatgcctggtgaattatggtgttttctactctggctgtttgggaacaggcacggtttgtggcctcccactgagaggcctggcccattagagcttagggtattgttccctctaatccctttgtgtggttctttctccagccttgggtagttttctcacatgcatatgctgatcaatggaataatcaagaggtctcctctgtctctgtgcaactctttctccagtactctgccctgcaaattctattcaccttggcctccatggacttccagctctatctcactaacagcatgtgcaaaagccatgtggtgcaaggaccatggtgtcagagaaaaggcccacgtggcaggagggccatggcataaaatgagcagagagaaagctcttgcagctggaggttcccacgtgtctgagttgcagagagaaagcctatgtttgtggacagaccatggcatctgaagggcagagaggaggcctaagtggttggggaatagaaactagaagaggtgggacacaagactaggctttccccagctctcaaaacaaagacccatatccttaccttggctttcataagtgggtaatccctggccaggtgagtcaacagtaatcactgtttgactcttcatgacaaaatcagtcacatttatggtagaattttgtcaacatggtttgttctcgctcacaatcaaatctttcaaatcattttagcctggaaatgaaagtctatgataaactgattctctttcattataaatcagattttaagccccaggttacactcaccctgtcctccagaggcccccttcagttttagaaatagttctacagcctattggacaaactcggccaacttccaaaatgttccccagtctcacctgtccagttttagtatttttcaccccttaacttattggagttcaggtagcctctctataggatggaggagagaggtttttttctgagttttacttggaggtacagcactttaatgtatgccctgacataaccagacatttcagccatttggaattctcagaggattgaagtgctatgcccatttctccttctcctctaacttcaggtaaaggaaaaagaagaagagtatagattcttatcttatttgagcccgagagagatagttttatgtctttgagcttagaggcaaagcacctgtataaaagctttcctgatattatttccttggatggagattcacattcaattgggtagagaaacgtttccacaaacacccagtttagcattttcattatgcccccaacattgtcttaggacctggcagattgtctgacattggaaggaagccagtgcacatttgttaaatcaattcacgcattaagcaataattctcatcaagatggtgggagggcaaaggttataygacttcacaatctttcaaaaattagttatcactttttggtcttcaattaacatcgcaatgttgcagggaaaaacgccttaagcaaaactaataattgttatttcttggcaaaataaagaagaagtgagtatctgtctccaccagcaaagtcaggaactgagaagaatcatagagggtatagaaggctgtgctgatgggagtgaggaacaggcaggcagaaggagtgctttgcagggtttggggaaaatcaaagtagaatgtttggactggatggatgtaactttatagataaaccaattcaaacaccagatgatacaggaggaaatgagacccacacacatcgtgcaacctgactaaggtcacttaacttaccagcagccctgggttagggaagcagagcttctgactttgggtctcatcattttgcttaccacacagagctgccctccatgaaagactgaatgtcttctagcctggcagagaaagtgccaatatcgggaatatccctgggataatcttggttccagggacagagccaatgttctctaatataggcaaagaaaagccacaaacattttgtaggttcataagaatggccattttacttttcacttcattccaacataagttcttgtgtatcatagcagaagtaaatgacagaaatgctgaacctttctagtttaatagaaacaatgtttaaatattctaagccrtggattataagtagaattaaaataagtgatccaaaacacaagtcatccctcactttatagctacatggcttagtcacatgcatatttcaatccagccttacaaccaccccatgggctaaaaggatggaggatgagaactgctgtctccactttacaagtacagaactgaggctctggatgatcaacaatcggcccaagggctgacacctataagtatcaaagccaaggccacggctgagttctcagtaaatccaaggtccttcatgacatgtaggagaagtacaagcaccaggatgactgggaatgtctgtttaaaaatggctaaatctgcttgtttaaggtaattagatccagaggacttggcacaaaactgagtttcaaaaggggctttgaagagcaggtattgacatgtggcagagattgggttcatagaacatgttcttggttattcagggaagaggggcatgtttctgagtaatcagaagccctgtgtgagaaaggaatattttctaggatatctgtgtggctcatggagctgctggatgaacttaagatgccctggacccaggccttcccactgggaggcctggcctgctagagggcaatggctatacatgggggaaccaggctgcctggaagcctcctcatgggagtgaaagtgaaagcctgtcccaagctggctgaatggcaggcacgttgctccttggcccattcctgtggtcctgtctccatccccttgggtcctcttgatttttctttctgccaaacagctttcccctagatatccaaggacttggttcttttctccaagtagacttggttctactccacagagtagatacagccctcatttctaataatcttttggaaaaactcttgccttccccgcggccccccatctttactttcaacacacacacagtccgtcgc

SEQ ID NO: 95208 - DNA, 185564 bp, Homo sapiens
gttcgagaccagcctggccaacatactgaaaccccatctctactaaaaatacaaaaaattagccggacatggtggcaggcgcctgtaatcccagctactcaggaggctaaggcagaagaattgcttgaacctgggaggcagaggttgcagtgagccgaggtcgcaccactgcactccagcctgggcaacaagagcgaaactctgtcaaaaaaaagaaaaaaaaaaaaaaaaaaaaagaaaaaaaaagaaaataggaagctcgataatgctcatgtctgccccataccagatgagtctctaacagaatcgcactatttccataggaacatgggacaattagagacaattatgataattatttgatctgtcctttccaaatcttcctgtttcctctacacttcaactgacaagtcctaacaacaactgacgagtcctaacaatgttgccatctctcaagtttagagatttgttgcattttattccttaagccttataattcctccattcaagattttagatacttcaaaagggtattttctggaagaattctctaatttctatgatagcaatgtataaatctaccgaaactcttgcagtcatctctttatggcacttcagaaccagtagagagatgtaggaaaagggctgtgatgctgtcccctgcccagaagatggcaggtgattgacaacactctgtctgctttactactccaagtctgctaaattgaaaaaagaacatagggaaacatgccccttgccagtttcattcttcatataagtaatggtcatttgtacagagtaaaagaggttacaatacctgcatcattgaaagcaaatgaggattccacgttaaatgaacctgacctttaccctctgtgataatggataacatcttaattacctgacttttcagcttgctgaaaagtcagcatgaatggggctctcaattctggggcctttcagactactcactctccacacatctcctagatccttcttattcaaagtggggtacacacattagtagctccagcatcacctgagagcttctcagaaatgtagactctcaggccactccgcagacctcagtcaacatcttcatgttaacaagatctccaggtaatgtgtatgcatattagaatttgaaaagcattgctctgaaacaggtgatgttgatgctgctgttctgtgggccactttccacctctgatctgaaatcttcaaaccctaacgcttccaagagctatttaaacatttccttcggaactcataccctgaaaaccacatggaggagatatttacctcatgtaaaatgcagttatttgtatctttacacatgaaataaaagttaaagttaagctaagaaagaaggtgaactgagatggcaaaatatctatctggctattttttcatggcttaaatgaataagagaaagtttacattttgtctctcacttcagtgcaaagatattggcggtagtgatggtaaacataggctaagtagaatttttgcctaaaatttctaccatcacagatgatatattacacctaaaagagcttaaaggtatttagatttctattacaatttcagatgtcaaaggaagcctacagaccatctgacctaatcccatgaggaaatttggatcctcagaggtaaaagggtagcaaaaagccagagggccagcttgcagagccaagagtagattgcagatctcctattcctggtgttttttccccactccatcatgctgtacagactttgactaaaaacgtaatttactgatgatcattatcgtagatacatatttttttgaattttattttattttgagataggatctcactctgttgcccaggctgcagtatagtagcatgatcactgcatgcctcgaactcctgggctcaagcaatcctacctcagcctcccaagtagctggcactacaggcatgcaccaccacacccagctaattttcctattttttgtaaagactgggtcttgctatgttgccaggattgttctcgaactcctgggctcatgcaatcctcctgccctgacctcccaaagtgctggattacaggtatgagccaccatgcctggctgtaccaatagatactaagcaccatggggaaacaaagatatggtccatcctttcatggtgttgacaatttacctggaaagacatgatgtttacataaactaataacaatataataaatcctataggttctaagacggtgactcaaacaataaatgctttagaacttctgaggatgggcttacttccaaaagatgagcaagaaaacactcgtggaaaatataggtatttcaaaatgcaaagagaaaaaggaactatagagtcagaaagaaaagcaaatacaaacttgggaaaaatacagggcatatcttgaggacaacgagtagatgagttcagccaaagcagagggtcaagtacagagtaatgctaaaagagccaggaacactaagttggatcaaataggagatctgacaggctggctaagaagctggatgttattttatggatagtgggaagtaatggaggtttctcagtaaggaagcaacataatgcaatgttatggaaagatttatctagtgaaatgattctccacaactgtgtatactgtgtgtagatgctatgtgtgtatatgtgaggaaggtaggtaaataatcagaaccaaagggaaatttttgcctttttcatactaaacatgaatgtacaccccaccctcgttcaggaaaaagttcattgatgtaatgaaccataactactattggaagtggccatattcctccctcaggtgtttaaagaaagttcagatccactgatcccgaaggagtgtgcaggatggtgtcgggggcaggagtggggatcaaaagcagggagcaccaggtaggtgccattgcaataaccctggagcatgatcataaggctggatttaaaaggcagtaaaatgtttggaaaagaagagacaactttctttttttgagacagactctcgttctgttacccaggttggagtgcagtggtgcaatctcagcctcccaggctcacatgattctcctgcctcagcctcccaactagctgagattacaggtgcccactaccatgcctggataattttttgtttttttagtagagacagggtttcaccatgttggttaggctggtctcaaactcctgacctcaagtgatctgcccacctcagcctcccaagtgctaagattacaggagtgagccaccgcgtcaggccacaaccttatctgaaaatgaagtattcatcttgttccctttaccctattaccatctaaataaccacaaggcttctgataactgctttgaaattcaagtcccccaaaaccaaaaactggttgttttctgagacaaatatagttttgcaattcttattaacagtcagatgaaatcaggatgaggtgacttccaggatgcaagagacatttaaatccattttgtgcaggaacattattttgcttcatagacattttaaaaagatagattagcttcatatctttagaaatgttatagccatcaccagcaaatctctaagtccactaaccatccccaataataataacctctaatctttattgtactctacagttgtagagcgctttcatatacaaagccaatgatattatttctcactttacagttgaagaaacgagcctggaaatgctaagggatttgcccaagtctgtatagctggtaaggaaatggcaggactgagatcctaatctaatgctcctcctacactgttgcctcatgaaatgaaaataaggttggcatagactcatttgtcaaagatgttcattcaaacattatttggtgcttactatgtgttaggcactggggattcagttagtaccctcatggagattgtagtaagtggggaatatagtctatctgtgattatctgagttaagaggaatgattaaaatgattgaaattaaagttctttatgagttttctgatccatagccaacagaacataaaaagttgcaaatgtggccaggcgcggtggctcacacctgtaatcccagcactttgggggtcgaggtgggtggcccatgaggtcaagagatcaagaccatcctggccaacattgcaaaaccccgtctctactaaaaatacaaaaattagctggtcatggtggcacacacccatagtcccagctactcgggaagctaaggcaggagaatcactttaatccgggaggtggaggttgcagtgagctgagatcgtgccactgcactgcactcctggcgataggtggaggctccgtctcaaaaaaaaacaaaaatgcaaatgtattccgtaataagagagaagaggcagaaagaggcgtagagattcaaaggacaaaaaaaaaaaagtttaaaaaaaagaaatggaaaaaaggccagaataaaagccaattctcaataaatgttagaccaagcttgtccaacctgcaacccaccggccgcatgcagcccaggacggcttatgaatgcagcccaacaacacaaatttgtaaactttcttaaaacatttgacattttttttgctttttttttgttgttgtttttaactcatcagctatcgttagtgtattttacgtgtggcccaagacaattcttcttccaatgtgggccagggaagacaaaatataacactcctgtgttagaaaatgagaacaaccaacatgtttctactcacagttgttcacatggacacaaaactgcctgattccattagaatccatgaaaactcttgaaggaaacggggaattactcctgaagataacagagttgtctacacaaacccagcttgaagacctgtgaggaaagaggagggagaagatatatttagaaggggcggggcaggtccaaaaaagagtgtcccagcaatatcggccagatgatgccaaagaggactccttgggcacctataggacgacacgaaggtcttattctactggccagccctgctctagagaatcagaaaaggcaattcctaggaaaaaccaagggaatgtcctaggagtggaagtacgggtgggaggcacaaagactaactcttcttacatccaaatgttacccgttgtaggccccaaacccctttaggattcagtctgagcaacgaagctcaccttacgctgcctggaaggcagaaggagaaaactgtcctcggatggagaagatagcagtccctgtcgcagcagcaatttatatcgcaggctccaggagtcaagtcacagacacagatcggtaagactatgaaagtacgacacagagtgagtgggatgaagatccccaaactctcccaggtgctcaccctccttcttccgacagccccactcctgctttgtggcagctcaactttgctcacagaattttagatctcagaagtaagtttccacccccacaacgttttccctcacctgggaagaggtccacagtcctattcccaggggccgagggagtcacgagagtagggaccactgtagggagtccaggcacggccgggcgagttgcagtcgcctctgaaggggactggagggttccgccatccgtccctcgctgcagctccaaagacgtgggcactgcccctgatggggaggaagagggctgaggccggacgccatcggggaacaccagaaagaacacttgcaggagcgcgagctgtggggtgcgcatggggcattcagggcctccgggtccgacgtaggcctccgcggtctccaatcgcattgccagagcgtgggtgggaggagtcgcatagcgtctgacgccatccgcgtgcctcttctcattggctcatgagaaggctgagagctcttcaaccaatcgaaagtggggttgttacagctctttcagtgtccttcggtctgcgccctcctccttaacgcgggccgggccgtgcctccgttgcctggcaaccgtcagtgacgaagaagcccttgcgccttccttccgctaggtggcggtaggagttcggcggaccgagaggttccgcgcccacttcgcggcccagaggactgagcccggcctccggtgcaaggaaaccccagaggccggaactagaattgcaaattttttttcaccccggattccaacggtgagaaaccctttctatggaagaataatgttctcaggtgggggaaacacacctaaggtcacataccttaaaaaacagtctcctctaaatatggctttttttaaaaaaaaaaaacacattagaaataatgttcattcagctccttacattttaacattgagaaattttgaaaaccctaaagaaatgcatcaaatcattaaagatggactgcatgtttgttgttagaaaaagcagtgagagaaaaataagaaaaaagggcaggaaaaatgtgagaaaatagggagagaaagaataaaaaaaagaaacattgtctaggaggtgagaaaataagatggaggaatggaaatagaagatttttttccccgtgttaatggcaaattttttaagcctctctaggaggtttttgttcttcccgggaatggcgtgcctcttccgattccccacagcagcgcgggccatgggactttccttcggtattggaaatgtaccgtagctgcactgtccagcatggtagtcaccggccttatgtggcaattgtgcgcttgaaatgtggctagcgtgactgaggagctgattttttttttttttttttttttttgagacggtgtttcgctctgtcgctcaggctggagtgcagtggtgtgatctcagctcactgcaacctctgcctctaggattcaggtgattcttctgtttcagcctcctgagtagctgggatgacaggcacgcgccaccacgcccggctaattttatttttatttttagtagagatggggtttcaccatgttgtccaggctggtctcgaactcctgacctcaagtgaccctcccgccttggcctcctaaagtgctgggattacagctgtgagtcgctgtgcctggcctgaatttttaatttttaaattgtaattaattcaaagttaaccacagacgtgagtagctaccatattgtacagtgggactgtagatgatcaaaatcttgctcctcctagacccagtattttcctatgtccacggttctgacatctggattattttggatatttagttttagtatataaattaacatctgttaagagttatctaaaatctagtacacttacctaaaatctggtcaatacctccctttacaagtgaatcatttaactcaggtaagttttaggacatttgactttacttgaattctcttacaagatctttattttctaatgttttgaagtcagtagctaaaagtctctctgtgttataaatattttcaaatatgtttttatgttgttgtgtgatagacagctatgggagatatgtgtttggtcttaaaacatttatttaccttattagtaatttctataggaaaaggccaagttcatattattcagattatatgatcatatgtatatactagaatgtaaattccaaaaatagtgagttttgtctgttttgttcattgaaatatccccatgcctagaacagtgtctgggacatgttagatgtgcattaaatattttaaaaatatattaaaaattgttttgttgaactctttagaattaatccttaggaatatttttagtttattttatttcaggattgtatttctttctataaaatttcttctttttgcaaccaatttaccatgtaatgatctttctataaaatttccattgtacatctgatcagagactattttagatttcaaagtttggaatttaaatggcaactctcaaatagtgttaaattatttctgaatttattagcgttggcaaaagactgttggttgaagtaattttagagatgagtgataaggaagtaatgtttccggatctttttgagttgctttttcttatttttgaattttaacacaacttttttttagaaaagttatttttttctcttttgttatagttaagcaaaaagattatttgtattgctgttttttaaacttgttttatttattgatttaattaattaattaattaacttatttgagagagtcttgccctgtcacccaggctggagtgcagtggcgccatcttggctcactgcaacctccacctcccaggttcaagcaactttcctgcctcagcctccctagtagctgggactacaggtgtacccaccacacccagctaatttttgcatttgtagtagagacggagtttcaccatgttggctaagctggtctcaaactcctgacctcaagtgatctgcctgcctcagcctcccgaagtgttgggattacaggcatgagccaccgtgcctggcatgtattgctgttttgtatttgtaagaatctctgtaatatagaactctcaatacttttgagatccagtattaaaatctgaaagataattttgtggatgaagaatgaaatttattcacatgtgtcatgcagatgtcaggtttagtatggggaccaagtcttaaattgagatcatataatatcatctcagaagcagagatttccaaattagatcatatgatactagcagttgtctgtgtttgggattaaaagagtttaatatgtaattggaaatttagcaaggagattgtactgagatggcagacaacaagttctgtccttttcccacttctccccccttttccaaaaatctctgaaaattacagaaaacttagatacacacacacttgtgcatacatgaacatgcccagaattgaaatacatgaaggtgtgctctcatgggccagacattataagaatacttgaaaaatagaaggcacatgggatggaattgaaggtggacaaacaacagttgcataataaaggccttatacagaaatggaagtgactcttggagtgctctaagcacacagaaagaaggtatttgttatcaatagtggcccttagacaattctatgagttattgattgaagtaccactgtaggaagagccaggtcagcctctcaagcttatccctacttgtgcttgcggtggatagcagaagaattttcccctaaaggtggtggtgggggtggcgggaggcagtccatgtatacttttactgaaaaggcaggacagtgccctggatggcttctgacatttaggaggaagagagaggccccacacgttgagactggtcctagcccactactaggtttgcgtgtctcctccaaaattcatttcaaaacttaatccccaatgtgcagtattgagaggtgggacctttaagaggtgatttgatcatgaggtctctgccttcatgaatggactaatccattcacgggttaatggattaatgtgttgtcatgagagaggaactggtggctttacaagaagaggaacagagacctgagttagcaagttaacacgctcagcttcctcaccatgtgatgccctgtgctgccttgggatgctgcagagagttgccagcagcaagaaggttcttaagagatgcccccttgaccttgggcttcccagcctccacaactgtaagaaatgaattccttttctttataacttatcctgtttcaggcattctgttataagcaacagagaatgaacgaagacagaaaattggaaccaagaagtgggattttgctgatgacaaatacctgaaaatggggaagcagctttggaactaggtaatgagcaggggctggaagagtttgaaggagcaggctataaagtgactgtatttcagtgaatggagtattaagggtgattctggcgagactcagaaaacaaaaagacaagggaacatttggaacttcttagagatttgttaaatgattgtaaccagaatacggatagaaatatggacagtaaaggccattctgctgagatttgagatggaactgaggaaggtggtattggaaaatggagtaaaggccatccttgttataaattggcaaagaacttggctgaactgtgtccatgcctgagggaattgtggagggccaaacttgagattaatgaactagggtatctagcaaaagaaattcctaagccaaatatagaaggagctacatgattacatttgacaacttatgctgatattcaggagcaaaggaataatttaaaggtagaatttatcatgaaaagggaagcagagtggaaggatttggataactctcagcctgaccacatgaagagtaaaaaagcatgttcagcagaggaaaccaagggtgcagcccagtgactgtttgctaaagagattagtttggataaaagggagacagataccattcctttagacaagggaagaaagatcccaaaggcatttcaaagatcttagagggtgcccctcccatcacaggcccagaggcataggaggacagaatagtttcagaggacaggtcagggtactctccacaggctcactgcccagggccacctcaagggagtcccaccggcaagatggctctcaccaggtatgcctctttgactttggacttcccaggcttcataactgtaagaaatcaatttttttctttataaattacccatttttaggtattctgttataagcaacagaaaatggactaagatacacaccttgtcaaactccacatctaccattttcttcttcaaaaaccctgcaggtggratgcaataagcagatcccgcctgtgcataggctaacagggaatctcagttaccaaggtggacacacactcaaaagatctacatttgaaaaagaaaaaacccagcaaacaaaaaaagggtataatattcaagaaacatcaaaacccaaggccgagtacagtggctcacacctgttatcctagcatttgggaagcagaagcaggaggatcgcttgagccagggaggttgaggctgcagtgagccatgatcacaccagtgcactctgccctgggtgacaaagtctcttaagtaaaggaaaaaggaaaaaaaaatttaaaaaggacaagttagaaaaatagtttagaacaaatataattaacatttatrgagagacatgagaattttgcatctattagagaggaatcaactaggaattgtgattaaagatggaagaaaaatgcacatttgggccaagtgtggtggctcatgcctataatcccagcaatttgggaggctgaggcagggtgattgcctaagttcaggagttaaagaccagcttgggcaacatggtgaaaccctgtctctacaaaaaataaaaattagccaggtgtggtagtgcacacctgtagttccagctacccaggaggctgaggtgggaggatcacttgagcccaagaggttgaggctgcagtgagccttgattgtgccactgcactccagcctgggtgacagagcaaaatcctgtccaaaaaaaaagaaagagagagattgagagagagaaagagagaagaaaagaaaggaggtaagaaggaaagaaagatgcacatttgacccctcttttgaaattttattaaaatacctgttaaaagacttaaaagggtatatatttataaaaacaaaaagtaggaggtgtggttgaccatcagcatggtcagtatggaagatttttcatacatttttgaagaaattggaaggatattgactgaagaagcagcagcctagaatatccatggaaagggactgcagccaaaggagacagctgccttccagcagaataccacagagtagccagaactagygatagcaagtaagagagaagataaaaggtaaagttgatggaaatcaagaaaatacatcgaaggtctatatggtatatggaatagtttgcctttgtactcaaaaggacctataactagatattttctttgaggaaaaaatagagaattctttctagaaattgatacactagttaatataagagagatttgagaagtaatcaataaaacattcatgagagcagaatatttggcaaaggagcaatcagaataagagaaagctcttggaaattaaaactattaacttttttgtttaaaattttggaagataaatataaggacatctaatctattgaacaaaaagataaataaatagaaaatatgagacactgaggattaaatctacaagtccaatgtttgattaatatgagttccaggaaaaaaaaagaaaatggaagaattaaattggttaaggaaatattaggaactcacacctgtagtctcagcactttgagaggctgaggcaggaggatcgcttgaggctggaggatcacttgaggccaggagtttgagaccaacctgggcaacatagtgagactccgttcctacaagaaatgaaaaaaaatacctgggcatggtggcacgtgcctatagtcctagctgcacaagaggctgagttgggaagatcgcttgcacccaggaaattgaggttatagtgacctgtgatcacagcactgcactccagcctggacaatagagcaaatctctgtctctattaaaaagaaaagaaaatggaaaaacaataaaacaaataagtccaaatatataaataattacaataaatatgaataagtttaattcatctattaagaagtatattcttttttttttttttgagaccaagtttcgctcttgttgcccaggctggagtgcagtggcatgatctcggctcactgcagcctccacctccctggctcaagcaattctcctgcctcagcttcccaagtagctgggattacaggtgcccaccaccacgcctggctaatgttttgtatttttagtagagatgaggttttgccatgttggccaggctggtctcgaactcctggcctcaggtgatctgcccgcctcagcctcccaaagtgctgggattacaggcctgagccaccgtgcccagccagaaataaaatcttaataggcaaatgctaataaggaggaaacagatgtggtaatagtaatgacagtcaaaatagaattccagcctagtgcagtggcttgtgcctataatttcagctactcaggaagggaagttgaagcagaargactgcttgagaccaggagttcaagaccagccgggcaacatagtgagaccttatctctaaaaatataaagataaaaataaaattctaagtgaattatatttgagggcaatatatatttcatctttataaaagttacagactacctagaagatgttaaattaatgaatccttgtggatctaaagacattgttttaaaatataaaagcaaataactagtggaaagagtagactaggtaaatccaccatcagagtaaaagatttttatcatacctcttccataaatagatagattaaataataaaaatagagaaaaagatttaaataagtgattttaaaattctcaatttatctatagatggtgtagaacttgaacctaataagcaaatagtactaattattttcaatcatacttggagcattgacaaaaattgaccatgtattatgccacaaagggaatctcaatgaagagaaaaaaggcaaagattttatagtacattctgcttgccacaatgcattaaaattagaaattaacataaaaggacagcaaaatatcctcttggaaattaagggaaaaaatcacatttttgaataaatcttgagttaaaagaaaataaacacaaaaattacaaactaattaaaaatgaaagttaaacaactagaatacatagaacaaagccaatagaacttagagaacttttatattttcaagtacttttattttttaaaaagaaatatttaaaataatcctaaacttaatcttacaatttagtaagcaaacaaattacaaattaaaagataaagaagagaattcataaagataatagaggaaattaaaaattaaaaacaaataaaaaatcagtagagtaattgataaaaccaatagctggttatgtgaaaagataaacagacaaatgtttagaagatcaaattaaaaaacacaaattaataatattaggtcccaataagaggtcataacaattggtatagacttaaaatatatatatgattaatatatattcagtaaaatagctgacaagatggagaatttcaccagagactgaaacctatgaaaatgcatcaaatgtaaatcctagaactgaaaagtacaataatggaaattgagaactcttagattggtttaacagtggattaaacacagcagagggcaggattagtgaactgaaaaactagattatttgttaagatctagtataaaacatgggaaaatgtgttgaaaattcagaaaagaatgtaagagacaatgtggggagagtggtagaaatactgatatgtaattgggccccagaaggaaaggagagagataatggggtagacacagcaatatattaggatattttggctgaatattttcccaaataaatgaatgttatcaatctgtagattccagctctacaaaacccaaacaagataaatttaaaagaaaataatacatggggatatcttactcaaatcccaaacattgacaaagagaaaatctttaaaatgtatagcttaaaaagacatattaccttcaaaacagcaacaataacacctgacttttcttgaaacagagtctcactctgtcgcccatgctggagtgcaatggtgcgatctcggttcactgcaaactccgcctctgggttcacacaattctctgcctcagcctccagagtagctgggaatgacaggcacctgccaccacgccaggctaaatttttttttttatttttagtagagatggggtttcaccatcttggccaggctggttttgaattcctcacctcgtgatccacccgcctcgggctcccaaagtgctgggattacaggtgtgagccaccgcgcccggcctacacctgacttttcaacaaaaataatggaagttataaaaagtcgaatatctttaaggaagctaacctaaaattgtatacccagcaaaagattcctcaaaaatgaagataagataaaaatgtatttataaaccaaaaactgagggaaaaattaccactaacagacccacacaaagaattgctaaagggaattcttcatgctaaagagaaaatgatctcagayggatgcatggaaatgcagaaataaatgaagagcaatggaaagaataaatataatgtcaatatagaaaattcaattgtattcctatattatagccataataaagtaaaacttttagatgataaaatgtacaattacctgaagaaacactaaatacacaggaataaatctgaaatagtataagatctttacatatcactgggcgcggtggctcacgcctgtaatccaagcactttgggaggccaaggcaggtggatcacttgaggttaggagtttgaggccagcctggctaacatggtgaaacgctgtctctactgaaaatacaaaaattagccaggcgtggtggcaggcgcctgtaatcccagccactcgggaggctgaggcaggagaatcacttgaacccaggaggcagagattgcagtgagctgagatcgtgccactgcactccagcctaggcgacagagcgagactctgtctcaaaaaaaaaaaaaaaaaaaaagatctgactgggcgcagtggctcacacctgtaatcccagcactttgcgaggctgaggtgggtggatcccctgaggtcaggagttcatgaccagcctggacaacatggtgaaaccccatctctactaaaatacaaaaaattagccaggcatggtggttcatgcctgtagtctcagctactcaggaggctgaggcaggggaattgcttgaacccgggaggcagagattgcagtgagctgagatcacgccactgcactccagcctggcaacagagcaagactctgtcaaaaaaacaaaacaaaacaaaactacatatcaaaatatataatatttctgagaggaataatagaaaacctaaatgagagctgcaccaaattcatggctagaaagacttattaatgaaaacatgtgaagtcttcccaaattcatgtatagattcatacagtccagtaaaaatttcagcatttttgggtaaaaattgacatgctgatttcaaatttaygtgtaatttcaaaaggtcaaaaatgccaagagaatcttaaagaagaacaaggctagaaggcctctacctactagatatcacatcttattattaagataaaataattgttagaataaaatggtatcgctttggctccaagatcaacaaatagatcaatggaaaagaatagtgtccagaaaaagacccacacatatgtagtcacttgatttgtgacaaaggtaatattacagtacagtgaggaaagggtgattttgtcaataaactgtgctgtaccaattggatatttatagggatgacagtgtatctgtactcctaccttacctatacccaaacatcaattttacatagattttatacttagggaaaaaataaagcttctagaacgtgatgtaagataatacgatcctgaggtaggcaaagggtttttaagctggacaaaaatcactgrtaataaagaaaaagattgtttaattgtgtcttgttaacattgagaatttctcttaataaaaagacagtattaagagagtaaaaaggcaagctactcaatggtaaaatattatatatatatgtatatatatgtaaatatacacatacacacatataaaaagaaggatgtgtacccagaatacgtaaagaatccatgtacaatcccccaaaaaattgaccaaaattttgaccagacttttcataaaggaggatatataaatgagtaataaacataaaagagaaactcaacatcattatcaaagaagtkcaaatgaagacaataataagatagaattccatatcttttaaagtggttaaactttttaaaggtggaggatatggagttactggatatttcatttgctactgataggggtataaattggggctaccatttactgttgggcttcatataataaagctaaacatatacataccctatgacccagcaaaatatacacttttaggtgtatacccagtagaaaatgtgtgtgtgtgtgtgtgtgtatggtaaatacatatatttaacaaaagacttgtatgacaacatttatagcagcatgatttaaaatagcaccaaactacaatcaaccttattatccatcaaaagcaaaatgtatataaattgtagtatactcatacaatggaataataatattgcaatgaaaatgaacaaagtactgccacacaacaattttttttkttgttgttgttttttgagacagagtgtaagtctgtcacccaggctggagtgcaatggcgtgaactcrgctcactgcaacctccacctcccgggttcaagcgattctcctgcctcagcctcctgagtacctgggattacaggcgcctgccaccacacctggctaatttttgtatttttagtagagatggggtttcgccattttggccaggctggtcttgaatttctgacctcaggtgatctgcccaccttggcctcccaaagtgctgggattacaggcataagccactgcgccaggccaacttagacaatctaaatgataatcgtgttgatttggccaggcatggtggctcatggcactttgggagtccaaggtggttgaatttgctttagctcaggagtttgagaccagcctgggcgatgtagtgagacctcgtctctatgaaaaatttaaaaatttagttgggtgtgatggcatgcacctataggtccagccacttgggaaactgaggtgggaagttcacttgagcctgggaggtcaaggctgcagtgagcagtgatcatgccactgcattcctgcctgggtgagtgagtgagaccttgtctcaaaacaaaaacaaaaacaaatataatgttgatctaaagcaagatacacaaaagaacatattatattaattcatttatataaaattcaaaaaataggcaaaactgccttatattattagaatgttggacagtggttatgttatgggatctttgggttgtcaattttcttcctagaaacctctgtggccagtagcgcctttgttcaagttcttgtcctgcgtccaggaagaatgaggtacacagacaagtgaaggatgaacaaggcaaagataaactttattaagtgttagaacagctcagaggagaccctcagtgggtggctcctctctgcagatcctccagtcaagtgttcagctctcagcatagaggaggccctggggagggtagctcctctctgcccgctggtcgtcccatcatctgctgctctcagcagagaggaggccctggagagggtggctcttctctgcagacaggttgtttggaggtctctgcaggcctctcaaactgtcagcagatggtagctcttctttgcagctkgttgtcccctcatctctgtcctctgcatcctctgtyctgctctggccatcctctctagtcctgtggctcatagggtagtaagtacatgcagattggtccatgggtggtcataggcagcagggagtccccactctggtgtgtgggactggtggcctggccctcagctttcaggccctccatggcctgaaggtggtgccttactggggaccccacccccttctgcccagcaacctgtctgccttccgcygccattcatggcccgggtgttcagcccaaccccacttggagagatccgagcaggcrcygggagagaagagaggtcaggcagtgggagcagacgctcctaagcctgcagggactgaggggggtgccttcctrggcacccgagggtgcaggctgcagagatggccgggtcctgtgcctgggagggtggccacagctatacctgggagctcccgccctgccaactcagggatcccgcttgttcccaactcctgcctgctccatgcagcggggacctggtctgcagctgttggtcgtgggggctgcagctgcacccgggagggcagatcctgcctgctcctggcctcctccaagagcacagggaggctcagatgcacagccatggtttgggcagctgcagccctgcccaggagggtggagcttctacctgctccatagagcatgaggcctgggtctgcagccacagtttgggggggctgcagtggtacctgggtagctcccaccccaattcagaaagggcaggcctcccactggctccatggagtgcccaggcccagcggggcctccctgctgcagctagtgtgatggtagcatccgctgccatcagttatgtttgagaggagtagtgactgggtaggaatacaatggagatttctgagctggtggtaatcatgtcttcaaatgggctagggttacatgggcaggctcactttttttgttgtttgtttgttttgttttgttttttgagacagagtcttgctctgtgtctcaggctggagtgcagtggtgcaatcttggctcactgcaacctccacttcctgccttcaagcgattctcgtgcttcagcctcctgagtagctgggattataggcatgtgccactatgcccagctaattattgtatttttaatagaaatggagtttcaccatgctagccaggctagtcttgaactcctgacctcaagtgatctgcccaccttggcatcccaaagtgctgggattacaggtgtgagccacctctcctagccatcactttgtaaaaattagtggagctatatatacatttgatttatgygttgttctgtattcatgtttatacttcaacaaaaaagtttacttaaaaaaagatactagatttttccaaattagattgtcaacaatgaaaaagtttgatgacatcaaatgatgatataaaaaaatgggtacactgcattaggaatgtaaactgttatagccttttttggagggccataggtcagtatctattaagtttttatatgcatatgcccctttattcagggatttaacttcttttttttaatttttatttatttttattttattttwttttttttgagacagagtctcactctgtccctaggctggagtgcagtgccgtgacctcggctcactacaacctccgactccctggttcaagtgattcttctgcctcagcctcccgagtagctgggattacaggcatgtgccatcacgcccagctaatttttgtatttttagtagagacagggtttcactatgttggcctggatggtctcaatctcctgaccttgtgatccgcctgcctcagcctcccaaagtgctgggattacaggcatgagctgctgcgcctggcccagagatttaacttcttgatagctattccggagaaatccacacaagtgtagaagaggcaaatagaagcatatatattggaaacaatgtaaatgtctatcagtagcagagtggataaataaactatgatgcattcattatggaatactctgcaatagcaagaatgaggtagttctttatttagtgaaatggaaatatctccaagacaaatacatgaaaaaaccaagttacagaacagtacacagagcatactatcatttacactaaaaaaggcacatttaaactcttaacccagtgtctaataaaaagttaaacaatgtttktgtggtagtatgtatgttgtgtggtacttagattttgaaaaacagttaataataatttcgtgaaaaaaattctgctctggtagcaaaagaacagcggtgagagctctctcaatacaataattacaaattgagcatttcttcatttttaaaaacttaactgagtacctgtagaatcattttcatcagctgagactttttaaaattaaattttctatttcatgatagatgaagttgtaggttatgcaacctacaaccttcaggtagatgcatgaagttataggaaattgagagtactcagagcaatcctgtgtaccctcaaaggtaacacttcaaaaactatcatacaatatcacaagtggaataatggcattgatacaacccaccaatcttcaagatttccccagttttatttgtgtgtgtgtatatttagttcatgaaattttaatgcatgtgtagtttcatgtttccaccaccacagtaaagatacagagcagttctgtctccctgaaaatctctcctyttttccttattttttttttctgtttgtttgttttttctttgtttttttgagacgaagtttcgcttttgttgcccagtctagagtgcaatggcctggtctcggctcactgcaacctccrcctcccgggttcaagcgattcttctgcctcagcctcccgagtacctgggattacaggtgcctgccaccacgcccggctaatttttgtatttttagtagagacgaagtttcaccatgttggtcaggctggtctcaaactcatgacctcaggcaatccgccggccttggcctcccaagtgctgggattacaggcctgagccaccgkgccygggcctcttgtcttttcataaccaaacccacctttcttttcccactcctgctccccaagatgcagtgttttttgttgttgtttgtttgtttgtttgtttgtttttgagacggagtctccctctgtcgtccaggctgaagtgcagtggtgccatctcagatcactgcaaccaccacctcctgggttcaagcaattctcctgccttagccccggccccccccaccagtagctgggattacaggcatgtgccaccacgcccagctagtttttgtatttttagtagagagggtttcaccatgttgaccaggctggtctcgaactcctgaccttaggtgatccacccccctcggcctcccaaagtgctgggattacaagcgtaagccactgtgcacagcccccaagacgtaattttaaaccatcattaatttttataataaccatgataggccaggcacggtggctcatgcctgtaatcccagcactttgggagacggaggcggacagatcacttgaggtcaggagttccagactagcttggccaatatggtgaaaccctgtctctactaaaaatacaaaaattagccaggtgtggtggtgctggcctgtaatcccagctactcaggaggctgatgcaggagaatcacttgaacagaggaggtggaggttgcagtgagcagagattacaccactgcattccagcttgggcaacagagccagactgttttaaaaaaatttttttttaatgatactcatgattaaaataactatgtaatttatctaaattattgtttacaagcatttatctaagtaagttgaataaacggtgtctacatgtttagtagaaaacaaatgtttagtagctctggcagaattcatctccttgctttttaagagattaataaacaatgaatacattgtagaggaaagaagtatgttttcactttgaaacctttttaaaaatttttctttagccatttagtattaataacaagggaagtagtattaataacaagggaagaggggtttctactccttttctttttttctttgctcttcttcctcatttcatcccttggagactgtctatagtcccacattttgtccagttttgaatctgtgtaattttgactctatggcagaaactgtttattgctgactatatatttgttctctcttctctcaaataaacagagccccaactttttactgagcacaatatagccaaaagatgacattgcccagcctctttcgcagatagctgtggctattccaggatcccagaaaatggtagccacaaatgaaggcctctgaagcagaactgccctggatctttactgtgctggtgccctctcrgactttctcttgcccttctgtctctggcctctcattctcccccgagaaatggaaactagaattcctcttcccccaggtgggtcatagaagccagcaacaaaacctaaaaatatcactttaactttctctttctcccagcctttctgtataaaaactggccataaagaaatgatctgacctgcctcgtttgactgttccagattgttgaaacccattctggagaggcttctaccccacatttagactgttgaatcccattgcagagcgggtcctgtcccacatccagaaggaaggaaggcacagaggtcaagaagaatctagatagacagcattgctgagtttctcccactcagtctatagcattagatcacactctttttttatcctgttatatttctacatggctgttcatacttggttgaacctaagcataaaagtggacaattcccctatatcttttatttattttatttattttcactttttttagggacagggtctcacactgtcactcgagctggagctcggtggcacaatcacagctcatgcagcctcaaactcctgggcccagcatacctggctaattttaaaattttttgtacagatggaatcttgctttgttcctaaggctgaccttaaactcttggccccaaggcatactccctcctcagcctcccaaagtgctgaggtcacaggcatgtgacactgtgcccagcctccccttcaggtcttcattctgcagtctcctgtgtacgtgtaaaattatgatcaaataaatttgtatgccttttctcctattaacctgccttttttgtcagcgattgtcagtgaaacttcagagggcaaaggggaagttttccttggcccctccagttttggtgctgtgaacaggataccaaagctgctctgttcttctggaagctgcaatgaagggaaccaaggacctgacaagccagcagaagggtaagaaattcttaccagtcaggctcccggcctctctccctctgtggaatctggtagagccgatggtaaaaatcactgtttgtctcattttcatctccaaaaccttgattaatgagaaaaaaggatttgtgtgactagttttgggtgtagcgactctggtgtccttttttggtaygaatattcacattgttcggtccctttccttccagaaatagtctttgtctttccgtgttgttgtgtcataaagaaggatgccatagggtaggacatgggcctaaacccccataaactctctatttgagctggcactgcagactgatcagttttgcggttctgactagacctgtgtctataaactttgctgtagtccccaaaataaaaaccagatgaagttctcctattgtcttatttcatgtccgtataagaccttgacttttgagagcattttctcttggtccttgcgattttagggagcatgattttcaggtcacattaggtgaccagtctaaaaatggctggtcacataagattttaagcggtatactttttgttccaactatgtcaagctctcaggggagtttgtcttaagttccatctgtaaggggctcctgttgcctggttaggctgggaaaattctaatcccaggagggcctacctggtgccagtggattaacgggtctgtgactggtggtccctggcaaatttgttggttactagtggcaccatatgcacaaacaccagccttaatagtctgtggtgggctgggcactgtggctcccgcctgtaatcccagcactttgggaggccaaggtgggcagawcaygaggtcaggagatcgagaccatcctggctaacacgatgaaaccccatctctactaaaaatacaaaaaattagccgggtgtggtggcggacgcctgtagtcccaactactcgggaggctgaggcaggagaatggcgtgaacccgggaggcggagcttgcagcgagcagagattgcgccgctgcactccagmctgggcgacagagcgagattctgtctttaaaaaaaaaaaaaaaaaaaawaggctgtggcggcaagagtctttgttatcttaagtctacttctcagtgaattttcggggatcatggagactgtctcctccatatgctctcaaggaacacctcttgtttatatagtaaaaacttattctaaacctggaaaattatctcctggacttttcatgaagaggcttattgttgagtcactactggaatttgtaaaccattggaaattctaatcatcagtggccaaaagatggatcctttaaattagaaagaactttaatttttttttcttaaaaagaagattttggagatctctcattctaaacaattgtcttacttgtatttatgggacaatcaaawtaaagaaagacacaatagtgtcttggcttagaaattctcttgacaaaattaaaatgcaaaagtctaacccaaaacaaaattaaaatcctttgtacactcaaactgcctgctttgaattccctgtgggatttacaaataaggcattccaccttgtggtgcagtggctaagattctgtgctttcacacctgtggcctgggtttgattccttgtcagagaatcagtccctgtagtacttgtaagctctttaackcaacagcacaaacatttataaaacttggtttaatatttgtgtgactcttgacttttggggtacccatttgttattgatggacaaatgtccacaaaaaaggtagacaggatatccactgcagctggagtgagagacaaggggtgggttagctctaccatgaagcagcagcagaaaggaaaaaaaatctatcaactatttttatatccatccatatagccatccatccattcatcaatttaaatagttacagctattttggcataagtccaaatttttgtacagctcaaagtgtagtaagtctctattttatttatttagtctagaataatgtcaccattatcacagaaatgacatctacatttttcttaagttaaagtttgaggcctgggcatgatggctcactcctgtaatcccagcactttgggaggcagaggtgggcagattgcttgagctcaggagttcaagaccagcctgggcaacatagtgaaaccccatctctacaaaaaatacaaaaattagctggatgtggtgccatgggcctgtggtcctggctacttgggaggctgaggtgggagaatcccttgagcctgggaggacgaggctgcagtgaactatatgattgcaccactactactgcagcttgggcaatagaatgagaccctgtctcgaaaaaggaataaaaataaaatttacataaataaataaataaataaacgttaaagtttgaaaacttaatttaccagttatttttcttatttaattagtaatacattacttcttttcaggtctcagttttggattgtaactaaccactgttctcttttggaggcatagtgccttaataaatgtattattttgtctaccaaaccatgtgtttgttgccaacttgcagtctagcagtaaagaagctaattttttcctgagtttaagattatgttgaaaaatagaatagcttataacactttataatattatgtattataccaaacagagatgaaactaaataagtttacaacctcttaatctttgcacaaatgctatcatttatttattcatttgtgcattactttacttcatggaaggaatatatttatcatttatttgtttttcaaacagaatttcaaaaattttttttttttagaatatgcagtgtttgtaaaactacaacagcagcagcaacaacagtttaagaataagattagcccacatattatcaaaatagtattttcaggtctgctttcttacatcttgtgagaatgtacattctggatactatcttactgtttcagtaagccttggaattgttttgcaaaaggacaacgggaatgaaaagaatcgttaagttttcactggagagagttattcccctcggttatccctggaatctggaaacattatagtttataaacttgtttaaataaaaggtttttgcaatgattcttgttatgcctttttgatttctcctggaacttcatgataacaatatttattttttgtgaactttacttaatcaggagtcatttcagataactgagtcataccctcttgtctctttctcctttcaattctgtcagtatttgcttcatgtattttggggctctgtggttaggtgttatatgtgtataattgttatattttcagatgtattaacctttttattatgattagatgtccttccttgtcttaatgtgccttgtcataaagtctatttcatcttatattcatatagccattccagctctttcatagcagctatttgtgcatgctattcaacctactgtatattttaaactaaactgtgtttcttttaggcaacatgtagttagatcttgtttttttttttaatacatcctgacaatttttgtcttttgattaaactgtttagttcattcacatccagtgtagttattggtatgtttggatttgtctattttgctatttcctttctatatgtcttatttcttctttttcctctgttccccttttactgccttcttttgttttaaatcaatattttaattcatttagtgagatataattcacatacctttaaatttacccctttaaagtgtacaattcagtggtttttagtatatttatagagtcattatctaatttcagaacattttaattactcccaaaagaaatcctgtatctataagcagccactmccatttccctctccctcatcccctgacaactacttatttatatttgtatttttgtttgcttgtttgtgacagggtttcattctgtcmctcaggctgaagtgcagtggtgtgatcatggatcactgcagccttgacctcccaggctcaagcaatccttccacctcagcctcctgagtagccgggactacagatgtgtgacaccacatccagctaatttaaaaaaaatttgtgcagtcaggggtcccactatgtggcccatgctggtcttaaagtcttggtctctagcaatcctcctgccttggcctcccaaagtgttggtattgcaggtatgaaccgctgtgcccagctcatttttaagtatatttttaaagttcatttttcagtggttactctagggatttttatttttcttgaacttcataactttaacttaaaatccacttcaggttaatggtggtttacctgtgataagrtatggcaactttgctccactatagctcagttctctccttttgattttggttgcgaacggcagtcctttggttcctatttgttcctgcattgctgtggtttgagtatggtttgtcgccaccaaaactcatgttgaggcttggtccccagtgtaacgggttgagaggtggtaagactttaaaaggcatttgagtcatgaaagatctgctcttatgaaaggattaatgccatattgtgggagtgagtgagttctgtctcttgcagtactggattaattactgagagagcaggtggttataaagtgaagtttcctctcatgttttgtctcttttccacatgcttgcttgccactgtcatgtgtgctcctgccatgtgatgccatctgctatgttatgatgcaacgtgaggcccttgtcggatgtggcttcccagtcttaaacttcccagtctccagaaccatgagctaaataaacttctttttaaaatcaattacccagtctcaggtattccattatagcaatgtaaaatgaactraaacatgcatatccttgctgagcgtgacagatggcaagctttatttgtcttctgacactgagccatttctgtagctagtcatatagtcaactagctggtcaaggtgaccatagagtggtactgtgtccctgctcactacctaaggagaggcagggaaactggatttgctgcttgctcaaaaagtgttgggccctttgcctgggttgcaacccactgtgtgggtaggcatgggccgtgtgggatttaggcataaggaacttaggcaaatatgttgatgtgcattcttcttgctgttctgtgagtaataaagtcttttgtttatgatgcaggaatcttgtgtcttctgcctgtttccatgggacagtgtcaggataactgtaagctttaagtaagctacaatcccaaatccttcaccttttaaatttgttttcagcaattcgcctagctacctagatgtggttctctttgtgtttatcttacacacattgttcattgaggttcttggatctgcagggttttttttttttttgcagttgcaagatttaatagagtgaaaacagagctcccataaaatgggaggggacccaaagggggttgccgctccctgctcaaatgcctgggtttatgtcctgatcattgtccctccacctgtgctctcaggtgatatatgatttgactctttctttacctcctgctttagcctaatttgtattctagcgagccctctttactacctgattggtcaggtgtgagctgagttgcaagccccgtgtttaaaggtgggtgtggtcacctttcccagctaggtttaggaattcttagtcggcctaggaaatccagctagtcctgtctctcagtaccccctctcaacgggaaaacccaagtgctgttggggaggttggccgacaaccgctcttaactgcttcctgctgaattggggcatgataggggtcgtgcagttgagatttcctcaggaggggtgccttcaatgccattaacatcagagcatgggctagcaggccggtccaggggtctgcagtagatctyagtcatggacagcatctggggctccatttgaagaacgatttgtaattttacagcttcgattctggaagaggcaaacttaacaaggagcttaaacatacagggattgaaatgtatggcctgaagtgcaggggcatatatgggtgtgggcggtgaaagtggggtttcctttagaaaaactcctatatgatggggcatcaatatttccaggaagctgcattctccatggaagctcttggtaaggggagctactggtagtacagtggcatggaggaggtgcagtgagagtgaaagttttgggtgaagggttttaagtaatttccactggttagctgcaggcaaaagtatttttccttcttcggtggctagccatcctgaggggaggaaactatgtccttgtgaggttccccattctatgtcttctgctgagtactggggcttggtttcctggaggggattaccccatactaggggtccttctataagcatttctaatggagggggtcctgccttgcagctcttctggcttcaatatcctcttggtggttcccttctatttccctttcctttcctttctggtgaccccagcagtgtaagactgccacctctttaggtttctctgtacagccaagaataatctcytaatggcttcctgatgtttgataggtgttccctcggaagttaggaatttcctttctctccatattgctgtgtgggcatggagaactaggtgagcatacttagagtctgtatatatatttaccctttttccttcttctaattctagtgcccgagtgagggctattagttctgccagctgagcactagttcctggagcgaggggattactttcaagtattccattattactgaccactgcataccccacttttcgaagtcctttttctacaaaggaacttccattagtatacaagttgaggttgggatcagttaagggaacctctagaaggtcccctcgagtggcataggtttgagcaatcacctgttgacagttatgttctatcttttctttattatttggaagaaatgtggctcagttaagagttgcacaagtgtgcagttgcagcactggccctttaagtaatagagcctgttatttaagcaaatggttgcctgacagccacaagtctcctttagcagtgagtatgctgttcacatcatgagatgtccacacggtaagatctcttccctgtattattttaactgcttcagatactaagactgctactgccaccactacccgtaaacaatgaggccaaccttttgccactacatcaatttccttacttaggtaagccatgggttgcaagctggtctctcggacctgtgtaaggattcctagagctattcctcttttttctgtgacatataaagaaaagtctcgctccgttggcaagcttaatactggggcttsggttagggccttctttagggcctggaaagccgcttctgcttcaggtgtccttcttactaaatgggtattggctttctgagtttccttaattagtgtatataatagcctggctattttgccgtacctgggaatccatatttggcagaagcgtgttatgccaaggaaccctcgtagttgctttagggttttgggatgrggataagccagtataggctggatacgttccttactgaaggccctggtgcctttggataattttagccctacgtatttaacctgctgtgagcagagctgagcctttggtttggaaaccttgtagccacaggtggcgaggaaatttaagagcgtttgggtggcttgatggcacaaggtttctgaacgggcggctaaaagtaaatcatccacgtrccaaaggacaagagtgtccaggtatgagawttgactcaagtcttgggctaatgcttggccaaatagatgggggctatccctgaacccttggggtaaaacagtccaggtgagttgagacattgggttcgaaggatcttcaaaggcaaacaagaattgagagtcaggatgtacagggatgcagaaaaaggcatccttaaggtccaggactgtaaaccactctgcttcctctggtatttgggaaagcagagtataagggttaggtacagctgggtatggagggacaatggcctcactgataatcctgagatcttgcyctaacctccactgtccattgggtttctgtactcctaaaattggagtattgcaggggctaytgcatggttttactaggccttgggcttttagtttcttaacaatcttttggagtccttgttgggcctcgggtgtaagggggtactgcctttggtagggaaaggaggcagaatcctttagtttaacttgaacagaacaggcattctttgctcgtccatattgtccgtctgttgcccagacttcaggattaattccttcctcaagcagagggcaacaaatgggtgttcttttcctgtgttcaggtgtataatggccgctgcttttgctagaatgtctctccctaacargggagtggggctttcaggcataattagaaaagcatgtgaaagagtaatgttccccagtcacaacttagtggttgggagaaatatctagtgactggctgtcctaggacccctcggatagtgacagatctggaggacagttttccgggacaagagagtaagactgagaaggccgtgccagtgtccaggagacagttaacctcctggccctcaatggtcaaacatacccggggctctgtgagggtgatggcatgggctggtgcttgccacaggcaccctcattcctgctgctggatcatctggttagtggcttctgactcagaggaccttcatcccctggggcagtgggccttccagtgattcccttgacataaggggcatggacgagggggcagcttatttctatttggacaatctgctttaaagtgtccttgtagaccacactggaagcaagccctattaggcattcgatttgctcagcctttctgtgttccagagcctccaaagtccgcttgcctgagggccatgactaaagcggtggcctttttcttatctcgttagtccagttccacctgctcctcctgatctctattataaaaaaccgaggttgccaagttcaatggggttttttaagttttgctccatgcctaaggcggacttttgaagtgtttttttttatgtctgcagctgactgactgataaacttatcctttaagactagttggccttcaatagagtcaggtgacagagaggtatgcttcctcagtgcctcccttagtctctccagaaaggcagtaggattttcttcctttccctgtgttatagtggacatcattgaataatttataggcttcctcctaggtttccctagtcctactagcacataagttagcaaatgtctgtggcaccaatctccatgttctgattctgcatcccaatgagggtttacactgggaactgcctgctggcctgtggggaatcattctctttcctctgttgtcatcctatcattgacctgactgagataccagagatcgccaaactctcaggctgcagttatggtggcacttctctcatttggggttagtgtctgatttagcagtaacattatatttctccatgtcagattaaaggattgtcctaacccttgtaaaacatcaatatagccatcagggttatttgagaatttacctaggtctattttaatttgctttaagtctgacagggaaaaaggtacatacactctgactgggccgaattctccagaatacatcttaggggcgtttttgccttaggggtaatgtttcctatctgaaaaaaaaaaaccgggatgccatcacccctagtcattctctgatgagcattagtgctagagcgtcttctatggtcctaatgcttattgctttccagggtgcgtaactacccatggacctctgcttatcgggttagttacgcttaccaagtagcagtcctgcaccccttttcccgcctttcttgaccacaaagaaaagggtccaggctgctgtattctagtggtcctttaccagcatgcccaacattgcctttgtgctcaggggtgagttgtagagctgggctgggttcctgagtatttcataacaacccagttgccccatcaagatacattccaataaataaaacagttcttatgcaaatttgtgtcagagagggtgtaggtaacattttgagtcaggattgagatagatttttttgattctataagtgctttaagacttggctgagtgaaaacagctcgaacatttcagcaaaccaattattaggcaattctcctaactctgcttccacaagagtctccctatcaattactgaatacccattgtggtttttttttttattatcccaagttcattgtttttttgtttttttttaattttttaattttttatttattattattatactttaagttttagggtacatgtgcacaatgtgcaggttagttacatatgtatacatgtgccatgctggtgtgctgcacccacccaaatgtccaacaatgatagactggattaagaaaatgtggcacatatacaccatggaatactatgcagccataaaaaatgatgagttcatgtcctttgtagggacatggatgaaattggaaatcatcattctcagtaaactatcgcaagaacaaaaaaccaaacactgcatattctcactcataggtgggagttgaacaaagagaacacatggacacaggaaggggaacatcacactctggggactgttgtgggttggagggaggggggagggttagcactgggagatataccattgtggtttttttctcaatcacctgggaggaaacctctatcgtcctgtcctgaagggagttcctcctaggtctggtcggacctttgtatggtaattaagatttaaatcccctgttaggaaatctgctgggttaagggaattttcagtggttaaggttaaatcacccttttctaacagaatagccccatacgagtaagatttgagttagtaagctaccattttgcttttttgacttaggataattctgaactgatgaggtgtgctcacaatgaggtttcctctaaaagttatttttctactttcttctgttagcaaagcagttgctgctacagattgaatgcatttgggccatctgcgggttactgggttaaggatttttgataggaaggctgcgggttgtcagtggtctcagtgttttcaggctgttacgcccttgtttacactgacaacaaggtagtattggagtgttatagggtcatggagaagaccttccatgatcaattataggttttaaatttaccctggcttttaaaggaatagggcacattgttttttctttactacttctatctttctctttctttctctctttgactccctctttgtctctctttctttctctcccctctgtctctctctttctctctcttttctcctagccctttacaaacttggggccctggcaagggtggtggggaatgggtctcacataactgcccatgtckagagctgtatacctaaattgggagggataccagggacaagactctctgggttcatagcctaggggcctaaggatgcagtgtagagctcccttagatccctttggagatacaacttgctagaggaaatgaaactctgaaccattagtacctaggaggcagggatgggaggaagtagattcagaggtaaggagaattttggggctacactttcaagaaagtcgtggttgggacccaggaggtatgggtcagaaggaaaggtaggggcacacacatgggcaactgttgagtagagacttctggctgtgccatgatctgaaccagctaatgctgggagttcgggacaacagctttctgcctctagttggccctcggcttccccaggaaaattgaaagcggaagctgattctaggcagaccaacattcccaacccacaaggattgggggttgttagaaagccctttcccagcacaggcacggtggctcacgcctgtaatcccagcactttgggaggctgaggtgggcagatcacgaagtcaggaggtcgagaccatcttggctaacacggtgaaaccctgtctctattaaaaatacaaaaaaattagctgggtgttgtggtggacacctgtagtcccagctgctggggaagctgaggcaggagaatggtgtgaacccaggaggtggagcttgcagtgagccaagattgcaccactgcactccagcctgggtgacagagcaagactctgtctcaaaaaaaaaaaaaaaaaaaaaaaaagccctttcccagatagcctcacacctgagtcttaagtccagcggccacactaatcgtttttaactggccaacaggtgcctggtattttcctccaattctaaggaaggataggacagaatagcaagtgaaagtggtccaatattaccactttggatgtcccttcgtggtcaccaaaatgttaccggggyggggtggtccttgttcttagagctcccaagatcgtgggccatttccaagatggcggcaagcctcttgttctctgacctggggttcttggcctcacggattccaaggaatggaatctgggaccatgtggtgagtgttatagctctattagaagccgtgggtcatggaagagaaccatggaacccagcgactagtgttcagctcaactaggacgaacctgggcacttagccatgcaggaacaatggcgagcctttagcctgattgggagtggcaatgggcacctcgctggatcaggagtgcagcagacaccctgctggatccagaggggtggaagtcagtgatgggtctgcgacggtggcaaacagcagtggtggatggcaagcgaaagctcagctcaagccataacaaacatggaccagaagaatgtgcagttgcaagatttaatagagtgaaaacagagctcccataaaatgggaggggacccaaagggggttgcccaggttaatttttaaaagtaaaatttgagaagttttgggcctttatttcttccagtacattttctgctcattttttctctctcctctttgtctgggacacctcttacatgtgtgctgggacacttgaaatggtcccatagatctctgaggctctttttatttttcatcaatctatttccctctgttacttgaatcagatcctttctattgatatattgttaaattaactgattccttattctgatactttcaatctatttacttttgggcccatctagtgaatttttcatatcacttattttgcttttcttctctagaatttttatttgattctttgctatggcttttgtttcttattgatatttcctattgctgaatcattatyatatttttctttgattttttaacatcataataacttcttgaaatctctgctaaatcctatatatctggccccattcaaagtcagtttatactgacttctttattccccctcggtgagtatgggttatactcttatagttctttgcatatctagtgatttttaattaaatactggacatatgaactaatatagcaactcgggattctgttttatttttctgaggattgttgttttctagcaatttgtctgggattaaactgcagattctcttctctgtggtgtgtagctactgatacctctgctcagctttttattcttaatttttagcctggctttctgcaagttgccctcatgtctactttagtttagtggacagcctacactttaggagaggttgtgttaaaaaaactgagtccacagggattccacccactcctgctcaatctgtttgtgagttagggaatgctttcaaagttatagccagttctcaaatctctggctttcactttttgctagcctgtcttggatttccactatacacaggtcagagagagatatgtggaatgcttatatcttctcagataattccattaaatttttggttggtacacttcacatcccaactggaactacaaaaccgtggggttttccctgttcacatctagctggcaaaagtggttttctcttcccaccttgggttgagcctgccctctctggaggaaagctgctggttttcatggctgaactactatcttgccaagctgtgtccatgttatgggtagagactaaaggggagtcatccctggcaagcaggtcatagtttcccattgttgttacccaaagttttggagacttttcatgaataaatgcttttcaacttgttgtctgcctttgctcaatttctggtgcactgaaatggctgtgcttgataatagaaaccttacctccttttagatcactttaccctcttctatttataatgttcataaatatatcatctacatatactagaaccatagtgaaagtgttataacttttgcttctttcatcaaatataattttaaaaactaaagagaaggaaagctttttataattattcatatttttgttgtgttcttcctttcttcttgtcttccaaaaattcttatttaacatttcttttctgcatagaaaacttctgtaactattcttttagggtatatatgctggtgatagattctgttcattttccttcatctgagactgtctyaattttcctttcattcctcaagaatatttgtgctagatataggattctgtgttgacaattcttttattttagtagttgaaaaatactgtgccattttctctggcctctgtggtttctgatgagaaagctactgtaagtcaaattaktttccttctaaaagtaaagtgttgtttctctctctttactttcaagatattttatttgtctttaattttcaaaagtttgatgattgatgtgttttggtgcattttggggggtttatctctgagagggttcactcagtttcttgaatttttaggtgtttgagttcccagtatcatctctgcacactgggtcctgagtgacagaagtgcccaccagaagtgatgctttttcccaaattcatccttttgaactttgtgctcccagagaagtggcaccaccttcaaactcaggttagggtcactggctcactgccatcttcagtttagaatttaaaatccagagaactcccaagaacatgaagctccttcgtcagtgtttccacagtaaattatgccccagctcaggttcagaagttgatraaatgccaatttgtcccgtgtagtccaagcagtttagtcaggttatgagatttgtttggacaaaacatggagctctaacatttggagattcacagtgtgacctctcgatttgagtcatagttttggtacactgaattttcccatttatttgaggagaaggaaaggagagactcatttaatcaagaccaactcttgtattattaacaagactagaccacctccaaaacataaggcttccattcatatttattctctagaaattttttctctgtatctgagaatggtggtcaaaattcagtctacagatgacctcaaggtctctacctcctgtttggaagttgtctaggaaatccctttgataacttatatgtgattcatatttttcgatcataaagatttgtttcatttattacccatttctttgtggaaagaattccctcacgtgtcaatcagttataaggactcaagatgtgccgtgggaagaatgcaatctctctacctccaatcccaccatttgcttgtgagatcaatgttttractcctttaagcacatgtattttcttattattttaacctagaaatgatatatgcttgcattacttttytcatggttatttacaactaattgtggagtaaatgaatttagccatgtttaaaaaaatttaagatgtcagcaggcaagtgatagaggttgtttaatagaagttctcttagcagcatgttaaaaataatgctgcaataatatcatctacctaaatggttactcctagcagtctgatgccaaaatctaaacaaatctagaatttttatatgtggagtgacagttgtacaaacatcacagtattcacataaatattttgtataagttaaattatctaagtttattattaagttattatccttcccatccaaaatattttttaaatcctaagacaacttcattgtagttttagttattacaaactggagcaatctttagcaagtttgggaatatgaaaataatagcttatttaggctatctaactattgaatttgtttcatatttcagttcacccttgaacaatgtgggggctataggcgctgagcctcataaaaaattagcatgtaactgttgccttccccaaaacttatctattaatagcctactattggccagaagccttactgataacataaacagttgattaatacatattttgtatgtcatatgtattatattttgtatttttataataaagtaagctaagtaaagaaaagattattaagaaaattgtagggaagagaaaatatatttacagtactatactgtatttatggatactgtaagtttatgttgtctgtttaaaaggtgaattgtccatctgaaatggtgggcagctgcagccgcaaacctcaatttatggtacatatcaagcaattcatctttttcttgtaatggcatgacttttctctgcttgttgggagcacttccagcatcactagtggcactttttatggatcccacggtgttattcgaggtttctagtattgcactaaacacaatgaaaaatatgtgagagccatgagagatcagtttttactgtgacacacaatttactggaaagatgaactgctcacacagagatgatgttcgtcacacagtgttttaagcagattcttgcaacacttgagctccccacaatggcaacagaaggtagctatgaaatcattacaatagtacagtatgttctacggtgaattttatgaagttatgatttaatactgcatctttatgtttatttccatttctctcaactgcaaatggcactatgtatagtctgtgtttgtgtaagttttgataaattttaactttttataatagagttacatatattttatgttagtaaacaataaaatagactaatatctacatatattttatgcattcatgacatacctaactttttcttagtattttcaatatttctaggctgcatggttcatctgcatgttttttcaaattgttgcaaatttctaaaaattttaaaatatatatatattttttgaaatccacatgtaagtggactctcaaagttcaaacttgagttgttcaaaggtacttgaattctctccagcctttctctttctgtccttaaatacatcaaatatcctaacattttaaatggagttcctaccaattatattcagagaaacacagtatgaagcatgaaaagtacctatatggaaagtggcttatcacttcatagagatttttagaaagtaatttcctttaactttattgggaaggaggttctactcaaaaactgtttcctggagtagtcagtcttaagctgctgtatgtgttatgcttcttaccaaagttcaggagggcactatctgtttcctcaggatggtgtcaaaatggagtgttggcagtgttccttatgtgaagtaaagagataacagctagaaagctaattaaaatagagtagacttgctttaaggaagcgggcaaaaccttttccttcccagaaaaatttcctactcccacccactgcaaagacttgaaacaatagagtcagcaaaaagaatggcaactttatgttcccttttatgaaatttctaattttgtttccttaagtctctacctcactctatgttgtcttgggtaggtaagaattgacaaatgcttattttcctagtagtggtacatttaaaaacaatctcccttcccctaatgttccttttcaaaaactttattccagccaaaagagtgactttacattgggaggatcttaagacaataacagcgagatagccttagaggaaataattgccttttgtttcatgaatttctctaacttagtgatatcccgattcctgatttgtagcaagtcagaaacactgaaatctccacttaggaacattaataatgtttttcctaattcactggatttgattattgcacacagaagctattcttcccagtatttctttctttctttttgagacaggttctcactctgttacccagactggagtgcagtgacacgattacagctcattacagcctcaatctcccaggctcaagtgatcttcccacctcagcctcctgagtagctgggactgcaggtatgcatgccaccacacctcattaatttctgtgttcttttgtttttttttttttgttacagacaaggtcccgccatgttgcccaggctgttctcaaactcctgagctcaagtgagcttcctgtctcagccccctgaaatgctgggattacaggtgtgagccactgtgccagtatttcccactataatcaagtggtgccaccaccatttggcttatatttctacattaaaagggaagtgaaaagagaaaggacaaagaatcaatcataatcttgggcataattactgggtcatcagaaatgttaaagcatataaggacaaaagaggaagtggctgaaaaagtaaagtacagtgaaaaataaaaggaaataatggggaaaaaaactatgactttattagaaactgatatataattagaatgcagatttttggtgagagattagtggtaagaawataattgtaagtaaatatgtgttatttatttatagccattcttattttaaaaaagatatgtggtggtaaatatttatgtaaatgtcttcctaattgaaaaacacaatgaaacaaaaatagtggcatttctttttaacagtgttgtgtttaacaatggaattgcttcctatctgtctggaaaagtgaaggtatactaatacctcacacttgtataacctttgtgattacagagcattttcccattcttttgattttcataatagcttcattaggtcaatagatcttactctactgtgaaggtgaggaaacagcccatgctgctaaggacttgcctaaagtagcgtcattaataattatcagcaccagaactagaattcaagtctcctcttatttaggatttttcttcaactgtttggtctctcaggtaacttttccaagatcttttccagtttcactagttttagctaatatataaacatgtcataatatttttatagccaaacagtgctgtctgagattttaaatcttgagacttgagaatgcctgaaggctagtgtgctggatattctgtattcattctccattctcctccaccctgctctgggtcctgagagaccggccagagtgaactgcatcagggggcttctggttaggttcagcaggagattggaggctgggagcagagcaagatctggtatttattcctcagctccttccctgctgggccatggatgagtagtggctgtactctttaactgaagatgtagccgaccctctgggccccctacccatgtaccctcagccctcaccattccttatgaatggtggtggcttcttcttttgaaaatacctgccactctctgcctgatggctttttctggccatagaaacacgcttagcccatgcacaggaccggccagaggttctggatagttgctttctccagggaacaccccttaatgaatgatgtgtaggaactggtggataaatttctctctttctgttcccctgagttggaacagctatgagctgtattctacacctgtttcccagggggtccctatcaagacagagccccaaatgctgagtgtgtctaacattggatattcttttagttaggaagaaggtaagaattagaggagtggacatccttttttttttttttttttttgacagagtcttgctctgtcgcccaggctggaatacagtggtgtgatctcggctcactgcaacctccgcctcctgggttcaagctattctgaagtctcagcttcccgagtacctgcgattacaggcacctgctaccacgcccggctaatttttgtatttttagtagagacggggtttcaccatgttggtcaggttgaccttgaactcctgacctcaggtgatccaactgccttggcctcccaaagtgctgggattacaggtgtgagccactgtgtccggccagagtggacatcctttagtaactgcaacagaggcatgcttcgaatactatacttttttgagacacatgagataattaaatgattgacaacaatactaattaggccagcaatgattacagtgctattgccaccataatgccagtacaaggttggggttattggtggctgtcaggatggtggctgttagagaagagcttgttctgccctagctgtattcttcatggaggcaaagttcttgcaatttttctgtagtgccaacctgatgacacactaaccatgtacgtcttagttacaacaaagctattccacacccagccatctaacctactttgtttctcatctcaggcattactgtgacaatatttacactcagttgtagcaaaaataaaaattttctttttacatatcaatgaaaatttgtaggggctgctgggagggatttgctctctcaaatgcagtggtcgtgaatccccatgttaggtattttaggaaagataaaataagtaataaacagactcttcccttatcaggggaacccgcccccaataattcaacgttatttcacgtaggttcttttctatttccctaagtgttggtcagtcggagaaataaagggaaagagtacaaaagagagaaattttaaagctgggtatccacgggagacacacacatgtcggcaggttccatgatgccccccaagccgcaaaaccagcaagtttttattagtgattttcaaaaggggagggagtgtatgaatagggtatgggtcacagagatcacatgcttcacaaggtaataaaatattacaaggcaaatggaggcagggtgagatcacaggacgggggcgaaattaaaattgctaatgaagtttcaggcacgcattgtcattgataacatcttatcaggagacagggtttgagagcagacaaccagtctgactaaaaatttactaggtgagaatttactcaccgtaataggcctgggagtgctactggagaccagggcttatttcatcccttatcttcaaccataaaagacagacattcccagagcggccagtttagagacctacccctgggaatgcattctctttctcagggctgttccttgctgagaaaaggaattcagcaatatttctcctatttacttttgaaagaagagaaatatggctctgttccacctggctctcaggcagccagacctaatggttatcgcccttgttccatgaacatcactgttatcctgttcttttttcaaggtgcccagatttcatattgtttaaacacacatggttacaaacaatttgtgcagttaacgcaatcatgacaggatcctgagtggacatacatcctcagcttatgaagatgatgggattaagagattaaagacaggtataggaaatcacaagagtattgattagggaagtgataaatgtccatgaaatcttcacaatttatgttcacagattgcagtaaagacaggcataagaaattataaaagtwttaatttggggaactaataaatgtccatgaaatcttcacaatttatgttctcctgccatggcttcagtcagtccctcttttccgggtccctgacttcctgcaacattctctctggaactccaggtttggtagtaatggaggatggggtgaggagcgaagagaaattctgtgtgggaagaaatgataacataagtgtgagtggcagaattctttgttaagatgttaattattgtgggttcccagtcctaccctggctcattgtcaaaattatgcaagcttccctaaagcaataaggtaatagggaagaataaaggggtacctttgaagaccaagaaagagtgaaagttttgggtcactgggaagggatgaaggttcatgggtctatgggtaatggggactcttgcctgttctgtggtcatgtcctgctgggtaatacgtcagaaaggacagctgcatggtgtctcagagatgctccactccaagcaccagggcgtccagctgaggcaaagccccctcaccacactccccctttcctacttagcatggggaaagaaaggttgggcagtgagaatatcagatgggatcaagctaggtgtgagattagaaacccttctcccagtttctatagatgcactttccccagattctggtgtaagccaaggaggtaagaggactccagtaatgacagattgagtttcttgccagctcagagagccagagacttgagatgaatttaagttgatataaagaaaataaagagcagaattttttggacacctatatgtggtggattaagatggaayttgctccatgcataaaaaacagagacaaaaagggcagaatatggcaagggctctaggggaggctaagcaatggaatgtatctataataaatcatgatatgttatttgcaatttggaaaccttgcaggctcttctccacagagcttcttccagctgggcagaggaaagaacaattaaacggagaagggggaaggaatgattttctcttggattcttttcttgcttgctccgatttcataacataaagtacagtaacaagtaactgtacatgtagtaaatgtttattagtcaagtatgaagaaaatacttagtctgttaattccttcttttatggtagtcatatgtcacactgatttttatgtcacaaaatccatattgcccatcctccggattatagagacagacacaacattgtttggtgtcagtgtcaaggcatcatggcacacagggtgaagatcccttcgctcttttagttctccatctcacagactcctttgtcattgtgcaggcttcagagcagagacctctgtgcaatttctgtttttcatggaagaaattacagttgggtgggtagggttacaggcattttctacattgaatctgtatttcctggattccaaagcacttgatgaaaatagatttttttttttttttttttttttagacagagtcttgctctgtcttgcccaggctggagtgcagtggcacaatcttggctcactgcagcctccacctccatggttcaagtgattctcttgcctcagcctcctgagtaactaggactacaggygtgtgccaccacacctggccaattttgtatttttagtagagacggggtttcaccatgttggccaggctgttattgaactcctgacctcaggtgattctcccgcctcaactgggattatagacgtgagccatcatgcctggcaaaaatagatttttagtgtttggaaatcaagatgtgtctttcagtcaaagtcaaaagaaatctatttgtttccagagaatctcaagttatactgtgtttgtcattgtgcacaagtatgcgtagtatttcatagaagatatcatttaatctgattgccaaagcagataagttatttgtaacagtagttgatgcaggtaaattttaattaaattctagacctccaattggcttttaaaaccttttaaatatttaatacaattatttatttatttatttgtttgtttgtttgtttatatgagatggagtctcgccctgttgcccaggctggagtgcaatggtgcgatctcggctcactgcaacctccacctcccgggttcaagtgattctcctgcctcagcctcccgagtagctgggattacaggtgcgcaccaccatgctcggctaattttttttatctttagtagagacagtgtttcaccgtgttgtccaggctggtstctaactcctgacctcaggtgatccacccaccttggcctcccaaagggttgggattacaggcatgagccactgcccccggctgactttagtttttaatatggaagattgcctgttttagctgaacaatgaatttgaaaacaataggagttgttacgtactttggtctattttagaacattttcaaagtttttttttttttttttgagacagagtctcactctgttgcccagatgggagtgcagtggcatgacctcagctcactgcaacatccgcctccctggttcaaggaattctcctgcctcagcctccagagtagctgggattacaggctcatgccaccatgctaggctaatttttgtatttttagtagagatggggtttccccatgttgcccaggctgctctgaaaactcctggcctcaagtgatccacctgcctcggcctcccaaagtgctgggattacagatgtgagctgtcgtgcccagctagaaaattttcaaagttttgagcaatgtgtgtgaccaattcgtgtgctgaggaggagttttgcttgggaatggtacatctattaaaagtttctagctaaccttttcccctaaaatgtttattaaaatgtttaatatttaatagaaataatatgaaaatacataaagaaaaagttaataaactcctttcccacccctccagccattttctcttctgttcctccctcagaggattcttgttcatcttttttcatgctcttgcatgatgtgcatatataggtttttgttaaaatgtagcaatgatggttgcaygcacaccccttcagatctcttcactatttctgtgcactccaactcctggtgtagttatcctcccaacagcccagccctgcatcactttatgagcaaatgaccctcaggttactggaatgtgcttcatttatgcacatcgggggccataagtgcctttgaatttatgcttccaccccccawcccttaactaatgacygataggtgcaaaaatataaacttcagctcttgaccccctcatcagtataatttagtcaattactcccagtagtttctcagctttgttytgctttctgacactaaaaacaatgctataatataaaactgtctacatatattctatatatttaccaaaagtaattttgtctgtgtgtgtgcatgaaagagagcctccacttgagtctactgaagttgaactaagccactttctacaatattgagataaagtagtggagctagaagtatgaagaaggatttatggggggttaggcaaatgaatctttgtcctctcaacaagtatttactgttttcctactatgtgcaggctctgtgtacagtctactattcagtgcaggacaaaacagaaatggttcctgcccttgtggagctcgtctagtgggggartaagatattaagcaatgatgtcatatgtaaatctttgcaaattgaataagtgctatgaagaatgaatagaaggtgctctgtgagagttaattgggggcctaatttagaaatggaaaaacctctctggagaattgacagtagaaaaaaaaattaaaactttttttttttttgagatggaatcttgctctgtcccccaagctggagtacagtggtgtgatctcagctcactgcaaactctgcttcctgggtttgagcaattattctgcctcagcctcctgagtagctgggattacaggtggctgccaccactcctggctaatttttttgtatttttagtagagacggggtttcaccatgttgtccaggatggtctcaaactcctgacctcaggtgatccacctgcttcggcctcccaaagtgctgccattacacgcttgagctgctgcaaccggcctaaaaattaaaacttttccccaatgtttaaattatttacacagccctaaaattcattctaaagaattttgttttgtatttatttgaattgaatagacttggaattgagttttgctctaamttgcaatgactgtggaacagccacctttgttgcagaattcctctcaaacccttatgatggaacaacagaaaatctataactatgataggtggccaaattagctggaaaaatgtttgacttgtaaacgtatcatgctggggtacctggagcatctgaatcccaccaccagcaccaccactctgtaagaggaaaacctggtggaacaaatcagttgagggctgggacttctgggtagggagaaaggaagggagggaagatgaaggagaccaggagaggatcccaatgttctggaaaagtccctggcatatggtaggtgtccagtaaatatttattgaataaatgattgcgtgaatgatgctcagcagggatatggatactgagctcacatggactgctcagtagcctcatagggagaaaacactgttttgcattagcccctggaatctctgtgtgtgcatggttgtctggtgattagattggtaatgtcctgtgcctgccttgatttctagatggtaagggctcagataagaatatgaaccagcttttaccaggatggggtaattgtcagatattaatgaagtatggcagtaggcaaacctagggccaaaactgaagtgagggaggccccttgcttggccagatcaggagtcactgtccaaaggcttaggtcccatcattttcctgcaccaaagctggatatagtgggcagtcagcagggagccaaggagttgtgtgtggtcagggtcaagaaaggcaaaattcgtcagagaaatgcataccctgttggtgagatggagaagacctattccttctcacctcaaaccaagactcaccataaataggctatgcatactcatgatgatctgactattttgagtagcttgccagaagggtaagatgagaaaagagatctaatttacactttttaaaatgacaattagagggagatcacaacagccaaagaagattacctatttattaagcacataggcacactctggtttaggtgctgtgggatgttgaaggatttagatgaggaggagagaaaaagaatttgcactcagactcgagaatttgaagtcacactttggattgtatacacaggtatacttcagagatattgcaagttcagttccagaccaccacaataaagcaagttacacaaattttttggtttcccagggcatataaaaattatgtttacattatattatacattatattatagtctataaagtgtgcaatagcattatttgcaaaagtacaatgtatataccttgattaaaaatactttattgttaaaaatgctaatgatcatctaaaccttctgtgagttgtaatctttttgctgttggaggattttacctctatgttaatagctgctgactgatcagcgtggtggttgccgaaggttggggtggctgtggcaatttcttaaaagaagacaacagtgaagtttgccacatcaattgactcttccttttatgacaatttctctgtagcatgtgatgctgtttgatagcattttacccacagtaggactttcaaaattggtgtcagtcctctcaagccctgctgctgctttatcaagtaagtttatgtaayattttaaatcctttgctgtcatttcaacgatgttcactgcatcttccccaggaatagattccatctcaagaaaccagtttctttgcttatccataagaagcaagtcctcatctgctccatttgtatcatgagatgtagcaaytcagtcacatatttagactccacttctaattctagttttcttgctatttccaccacatctgcagttacttccttcactgaagtcttgaacccctccaagtcatctataagggctggaattgacttcttccaaattcctgttaatgttgatattttcacctcttcccatgaatcacgaatgttcttaatggtatctagaatggtgaatcctttccagaaaatttttgatttactttgcccacatccaacagaggaactatctatgatggctacagacttatgaaatgtatttcttaagtaataagacttgaaattacttcttgatccatgggctgcagaataaatgttgtgttagcatgcataaaaataacattcatcttcttgtacatttccatcagagctcctgggtgatcaagtgcattgtcaatgaacagtaatattttgaaaggaatattttttctgagcagcagccatcaacagttagcttaaaatattcagtaaaccatgctgtaaacagatttacagtcatccaggcttttttattccagttacagagcacaggcagagtagctttaacataatcctttttgtttttgagatggagtctctgtcacccaggctagagtgcagtggcatgatcttggctcagtgctacctccaccttttgggttcaagtgattctcgtgcctcggcctcccgaatagctgggactacagacacgtgccaccaagccctcctaattcttctgcatttttagagatggggttttaccatgttggccaggctgggctcgaactcctaacctcaggtgatctgcttgccttggcttcccaaagtcctgggattacaggcgtgagccactgcacccggcccatttaacgtaattcttaaaggccctaggattttcagaatggtcaattaacaatggctttaacttaaagtcaccagcttcattaggccctaacaagagagtcatcctctcctttgaagatttgaagccaggtattgacttctcctctctagctatgaaaaactctactggcccccagaggatgaagggcctaatgtggcatccaagatggcatcttcttccaaaagaaggctatttcatctacattgaaaatctgttgtttcgtgtagccactttcatcaatgatcttagcatgatcttctggatacctcactgcagcttctccatcagcacttgctgcttcaccttgcgcttttacattacggaggtggcttactttcttaaacctcatgaaccaacctctgctggcttctgacttttcttctgcagctttcttacctttctcagccttcatagaactgaagagagttaaggtcttgctctggattaggttttggctcaaaggaatgttgtggctggtttgatcttctatccagacctttcagacattttccatattagtaataaggctgtttctctttcttatcatttgtgtgttcactggagcactgtgtttactttttttaaagaaattttctttgcgttcataacttggctgttttctgcaagcagcttagcttttagcctgtctcagctttcgacatgccttccttgctaagcttaatcatttctaacttttgatttccagtgagagatgtgtgacttttccttttacttgaacacttacaggccattgtaaggttattaattggcctaatttcaatatattgtgtctcaaggaatagggaagcccaaggagaggaggagatagtgggacagacagtgagtggaacaatcagaccacaaacagcagttatcaattaagttcatcatcttatatgggcatggttcatggtgccccaaaacagttacaattttaatatcaaacatcactgatcccagatcatcataagaagtataataataatgaaaaattttaaatattgcaaggattaccaagatgtgatacagagacatgaagtgagcacatggtactgcaataatggcactgatagacttgttcaatgcagggtcgctacaaaccttcaatttgtaaaaatcgcaacgtctgtgaaacacaataaagccaagcacaagcaagtggagtatgcctgtaagaaacataaaatatgaaaaatcagcagtgtgaggcattaagcagttcccaggttgcttggcacttatgaaagtctcttagaatttggaggagagagggttagctggaagacttgaaagattcaaggtttgagccagaccctgaaggatgagctgagacaatcatcttaggttaagtaatgatctcaaaagtataaaaattgctattactattatctttttctgttttcctatttcttcagactttgctgcccccagaggatgaagggcctaatgtaaaggagaacaggaggcctgattttggcattacctcaaagatttgtcacccctggctgatctctgcaaaggcggaggcgttaacagcaacataggagcttcctgctgtagactgttctggtattgtgggatattattgtcctcaaaagctgggtgtgtgggccatgctgataaggtcatcggcattagtctaagggccatgtgttcttcaaaactttccactgactcttaggcccagcaaggtccagaagtagaagacagagatttatgctgtttggagtcttgattgcttggcaagtattaatacaattctggggcacttaacggttggttagtgtagtaaattttgcttaacactagcttttctgcrtctcagagctactttaagttgtctggcaatgttcccaaataagggtaaccccgtctggagaagcctaggccttttccttccttttgttattttttttttcaagtgctgcaaccagcagtcgctactccttcctgtcctccccctagagttgctgactgctctccagtgacatgtatttggaaactttttaagatactagaaaatcaacttagaaactttctttttctttttcttcttcttcttctttttcttttttctttttttttttttagaccaatgggaatattgtgtgttgtggatggaaagatttgaatactactatgttttcacattgagttcaatgtaacaaggccatttccgtgtcttggcacacagcctgagttaactttgctttgctggatgtggatacaatgaattctgtttgaacaagaaatcatgtgtaacaaatgcttttgcaaaatcatgtcgtcattaaagcagttactttaataaagatgggcttcacaaggggtttccggtacaacagctgcagttaaatatctatacactgttaacrtattttttaaaataagcttttaattatagaatagttttcaatttacagaaaagttatgaagatagtacagaaagttaccaggtactctctacccagttccctgattattaacatcttacattagtgtggtacatttgatacaataaatgaaccaatattgataccttaatatcaactaaagtccatactttattcagatttctttagtttttacccaatgttcttttctgttccaagattccaaattacatttaatcttcatgactccttargctcctcttggctgtgagaatttctcagactttttatttttgatgaccgtagcagttttgagaaatactggtcagaaatttttgtataatgtccttcaattgggatttgtctgatatctttctcatgattaggctcgagttatgcactttttggaggaagaccacagagtgccattttcatcacatcataccaaggatatgtgttatcaacatgatttatcactgttgatgttaatctagatggccttgctgaggtagtgtttgtcaggtttttccactgtaaagtcactctttcttactctttttctctgctgcactctttggaaagaagtcactatgcaggccatacttaaggagtgaggagttatgctttacctcctagagagtggagtatttatgtaactcatttgaaattcttctgtatggatttgtctattctctcccatttgtttatttaataattcatttgttaaatattctatttcataaatacactaatagtctatttcagtatagactcgtggatatttattttatactttggattatctttgaatatggttctattttattgttcaaattattctaattttggctattggaagctctattggctcctgtgtcactttgacacaccccatcattgtaagctttttttttcttaattactttctggccccataagatactccaggattgtcttgtaatatttcctgtccccagcctagagtcacctatttatcaggggaattctggttccttttactggagaacggttatagaaacaaaaatctgggggttagatgtgcttattgctactgcagtatcattgcttataggcccactctgctgacagagcaagaaaatatagatgtattttaaaccatatatatatatatatatatatatatatatatatawatgcacaactataaatagttctacatttattcatatgtatccctattaagctaaacctgagttcatactgatgtctctaacgttaatccattaccacatggatcattctagccatttccccttacttgtctataaccttccactctaacagtgagaagcctgactcctattgtctgtcatccatttacataatttctgattccagtatacatgtatagtggtttcagaattatgaatcttgggagacagagtaatgtacttttacacagttccttttgcctttggtcctgtagactttactcacatctaaagtgacttggggccgagagtggggactcatgcctgtaatcctagcactttgggaggccaaggcaggtggattgcttgaggccaggagttcaagaccagcctgaccaacatggtgaaaccccatctcaactaaaaatacaaaaattagccaggcttggtggtgtgctacttgggaggctgaggcacaagagttgcttgaaccagggaggcagaggttgcagtgagccaagatcatgctactgaactccagcctctgtggcagagtaagactctgtctcaaaaaaaaaaaaaaagtgactaggtcagcacccttttcctctacctccctctgtgaggttttttcacacatttgtaatacagttccattattttgtcagaatttaaatttcattctgggctcccttgacttcctgaataatttttgaaaactttgtatgggttaaggttcattctttgtgatttaaatttctgtagattttgacaaatgcatattgtcatgtatccaccattacagtatcatactgaaaaattttatcaatctgaaaatatcccctctgctttacttattcgacctttccctaccctgatgaatctttggtaatcactcatttatttattgtctctctttaaagtaagcagttttttaaaaaatttaaatttttaaaaatatttttaagttttggagctctaataagttgattggtctttcatagataatgagtactttgtttgaaaatgagtatctttgaccttaaagaaattatagcttttatcagttatacttgcaattcacagatttggatttgtgttttgaagcagcaataacatcttactttttttaaatgtttttttatttttagaaataaggtcttgctctctttctcaggttggagtgcagtggcacaatcatagctcactgcagccttgaactcctgggctcaagtgatcctcttgcctcagcctcctaagtagatgggatatagacatgagccaccatgcccagctaattttttaattttcattttttaaagacgagatccattatgttgtccaggctggtctcctggcctcaagcaatcctcctgaattggcctcccaaagtgctgggattacaggtttgagccactgcacctggccaatcttaccatttttgatgaagtgacagtcacttattatctytgcagacctttgagacatttagacaaattgaggcacttgatgtgggagtaggataaaggagttaaaggggatatttcaacagaacatttatgtaagagaatccactcatgcaaggcaagagagaggaagtagttatagctaaaaaaactaaggtaatgcctacacagcactgacttcattgagtactagcattgggttagatatttgccgtagcataggatcttcatttcagttcagcaaactctcattgagtgtctgctgtgcttgaagctgctgtgctgtgtactctaggcttaccttctcctgctgccacgttgggttgtagactttcactttggaagagttggccattctgccacattcaagggcttccccaagctcagttagggcattcctccctgactacctggaaataggaagacatgggtgatctcatgtcatacttcactccctctcccaacatggcctcagtcccacagctgctggttgaatacatagaatcacttaactttgggaaaaggggtggagaggccctttgtgctrtagaagggaaaggactttgactctcatttccttcaagtaccgttaggttacttctgaaaaataagtggaagatatcagagggggaaaaagcaagagacacaagtacaaaaggcaatgttttgtttaatctgaacatagattagtgcatagtgaagaggaagagaactcacccttaytgagtgccacctatgtgccagagtctgtgttgggagttctcacakatttattctcttttttacctccaacatggctttgtgaagtagattaaaaaaaagacctttattttatggatacattggggttcagaagggctcgctaacttgtctaagatcatacaaaaagaattgaatccagatcttcttaatgctctggcagcactctaaaatcatcttggcctttaaaaaaaaacgtggctgaaacctaccccaaactcaattaaattccaatctctgagggttgggatgggcattagtattttttataattgggccaagtgattatagtgtgcagctgaagttgagaaccatggctctgactaaagaggcagtgccactcctactactttccacaagaagggacggggcattttttgaacgagtgtgcattctaaatactcttggaacactttcagatccatccctttttctctgctcctcctaccctgcaccacagtgtccttttcatctctggatatctgtaagtaagcagatggaatgagaagagaggttgttattgatagtggagaaatacaaattcaattgaattaatttaatcagcattcctcttttgataaaacacgtatatgtagtgctgatagactgtcaaagcacaatgtcaagtagtgtcaagaaaatttgatacagttttccaaatttgttgacaactttggtttgttgaatatgcattcaccaacaccaaatagtactgacttattatcttggtttgtagggatcataaaaaagatggggcatggatctattgctggtaggaaaataattttgaattcctgagattagatttgttaattgccatataacatgtaacattttaccccaagatttttgaagtattgcgatttaccatatctatggcatctcaattataaaaatccattattttacagtctccttttaaccttgaaattgaccatgagcatcataatattttgattcaaatcaaaatgttcaaatgtcataatattttgaacactttgacatacgttatgaagaacctcttcgtatattcatctataactaaagttgaatacataaacacaggcattcttggaattggcaaaacatgtcatttcatacaatagttactttgggcatttattttaggatacgtaaaaccagagtaccacctctcatgagttttatcaatagaattctgttttaatggagaactggaaacaatatagagaacagaatgctcatcttccaccctatccgactagctctgtcctttctgtcccccctatctggcccctaatgatgcagaaactaccattactacttagtccaatttatgtggttcctgcttggtcactgttgggtttatggagtgtgccttaaaccatcaaaccacaatagcatattgcatattggacattgtgtatggtccytcctgatttctacatctgatgttaagttccacagggaaatctaaggaaaccttgatattgctgcctgattattacacaacagacaaattgcatggtgaatatacttttcttgcttacactggtttaacagttttttttggctttgatcagtttattgttcaattacttatatttttctggcaaatgattttttttttttttgaagtggagtctcgctctgtcgcccaggctggagtgcagtggcaccatctcggctcactgcaagctctgcctcctggattcacaccattctgtcacctcagcctcccaagtagctgggattacaggcatgcgccaccatgcccggctaattttttttgtatttttagtagagacggaatttcactgtgttagcccgggtggccttgatctcctgacctcgtgatccgcccacctcggcctcccaaagtgctgggattacaggcgtgagccaccgcacccggcccaaattatttcttttttctatttgcccctaaagtgaaatagcctattttgtgagtatcatcttgccaaattatagcattatttttaactacccaagtccattttgcatatgtctactgactcaggaaatattcagttacatttcttaaataacagtaataataccccatataaccactgcatatcatcaaataatctcccactttttcaccaggattcttttttgccttttattgcaaaaaatttcaaacatagaaagtagagagaataataaaacatatccccatataccatccagcttcagcagttataatgtcatccctaatcttgttttatctgtacctcacccattcctcctctttttgaaactaatctcagatttcatctgtacatatttctgtgtgtgtctccagcagataagggctttggaaaaattatagccacaatactactatcataccttaaaagttaacagttctataatattataaaatatctagtcagttttcaaatttctttgattttctttaagtttcttttacattggtttgaatcagaatttcaaggtcctggtattaattttattggtatatcttttaaatctcttttaatttataggtaactcattctcttttttcttctctgcagtttatttgttcaagaagttgagttgttttattgattgttttagtctagtctcctacaaactggattttactgattgcattcctgttgtatttttttaacgtgtttatccgtgccctcttttccccacaaactggtattaggtttagaagcttccatttttgggaagacagcttcagaggatgtgatgtgtgcttccatcagaaggcagagaatgaatgtttatacccccttttgttatgtgaacagtcattgatgattattgtttatrttcattcctttgtgaggtattgcaagatggtgatacccaaatgctaccaattttagtctttcattatctggaatactttaaagacacttttccccatcaatgattttgttgtcctggggtacattttgtgcagcaaagggaggttgagtgttgctattatcccccttgtgtgttttcacaataatgaattcgttctaaaggtgaacagtgatttcttcatagggtcattatgactatgtggatctcaatatatctgatacatttcaatccattgcagttattctttttattgctgctcaaatgtcttcttttcttatactttggccagtaggagccacttaaagttagctcctgaatccttttgacacaaccctagtaattttagatagtgtccttgctttctggtatacctcctgccccagacttggttagctatttttccaaagggccttaggccattttagtagaaaatagcatttacaaatagccatcttggtgctgggatagaaggtaatgatttagtaaaaacctatagggaaggagggaatgagccatgtggatattcgggaggacagcattccaggcagaaagaacagcatatgcaaagacttggaggccagagctgagggagcaagaagaggacagtagtaggaaagaaatagaggtgaccaacttcctggtgggaagttggaaggactttggcttttcttggggtgagatggagccttttataaattttgagcaaaagagttccataatcttttgttttgtttaatttttaactgaattattatagkttctgggttgaaaataggctgaagagtttgaagagtagaatctgggaggagaccagtgaggaggctatcacaataatacaggatacaggtgagagatgatgtggcttggatcagtgtggtagcagtagaagtaatragaagaggtcaggtcctggatgtatctggaagataggaaccgctgaatttgctaaaggattagacttggattgtaaggaaagaggattcaaatgtgactccaasgtttaaggcctgagatgttaatgaaattataaaacatgataacacgagtggcatctcttttgtgggtcagcacagtgtttgtgtctgtgggaaaggagcggggatgggtcaggcaaaacttcacgggggatgatgtggtttggatatttgtcacttccaaatttcatgttgaaatgtgatccccaatgttggaggtgggacctggtgggaggtgtttgggtcctgggggcagatccctcatgaatgacttggtgaaaatgagttcatttgaaatctggttgtttaagagtctggcacctcccctttctctctcgtgctccctctcttgctatgtgatgtaccagctcccccttcaccttctgccatgattgtaagtttcttgaggtcctcaccagaagcagatgctggtgccatgcttcttgcacagactgcagagccatgagccaattacctctttataaattacccagtctcaggtatttctttattgcaatgcaaaaatggcctaacacaggggaccagatatttgagtcatgaaagatatataggaggaccaggtggataagaggggaaacagcattctgagcagggtaatagcttgtatacattcagagttgtggccaggcgcggtggctcacgcctgtaatcccagcactttgggaggccaaggtgggcagatcacgaggtcaggagttcgagaccagcctggccaatatggtgaaaccccatctccactaaaaatacaaaaattagccggccatggtggcacgcacctctagtcccagctacttgggaggctgaggcaggagaattgcttgaacctgggaggcggaggttgcagcgagccaagatagcaccactggactccagcctgggtgacagagcgagactccatctcagaacaaaacaaaacaaaaattcagagttttataaggattatgggtcctggaattagattcagtttttggagtgcaggaagcctataacaggaaatgagtttagagaggtagagagagtccttacatattcgatgacaggaatttaaattttattttatgcatgataaggagactagaatttttaaagtctgccaatgacattatcagatatcgatttcagaaagatgagagagtatgcactatggcagaagtgacgagaatggagagaggagatgaatttgagagatcttaaggtatagaaacaattggatttggtaaacaataagatgtgggatgtggggaggggtctaggaggaccctgaggttgctgggttgtgtgactaggtggatggtagtgccattatctaatgtaggggttgggcgcagtggctcacgcctgtaatcccaggactttgggaggccgaggcagcctatcacctgaggtcaggagttcgagaccaggctggaccacatggcaaaaccctgtctctcctaacacaaaattagccaggcatggtggtgtgcacctgcaatcccagctactcaggaggtggaggcacaagaatcgcttgaacctgggaggcagaggttgcagtgagtcaagatcgtgccactgcactccagcctgggcgacagagtgagacatcgtctcaaaaaaaaaaaaaaaagtagggaatactggtactggatgggagcagatttggaagtaaagatacagagtacagtttggatgctaagtttgagctgcttgtgggatattctcttgacacccagtaggtggatggaaatatggatctggtgctcatgggagtggacttggcagaaatgtaaaggcataagaagttatgacctaggtagaataagtgaagtagggagagaaggcaaagggtgaaggtctagggaataccaacatttacaagacacaaaagttgactgaaaaggagccatcatacacagatggaggaggaaaatcagacatgaggggggttctggaaaataaggagagatcaattttcaagaaagaaggaaggccaacaatggcccatgctacatagatccaagaagataaaacacaaaaattggtctttgctttacaggccattggcaatcttagggcagtttcattggcrtggtgcggtgagaaaygggaatgcaatggaaggaggagtaaatgaatgaggagagaatggaggtgatgaaggaaggcaaaggtagaccatggtctcaagtagcttgtttgtgaaggagctgtttttgttttaattaattttttaaaaattgtgataaaatagacataaaagttactatattgctgggcccagtgtctcacgcctgtaatcccagcactttgggaggccgaggtgggcagatcacctgaggtcaggagttcgagaccagccgcctgaccaacatggagaaaccctgtctctactaaaaacacaaaattagctgggtgtggtggtgcatgcctgtaatcccagctactcgggaggctgaggcaggagaatcacttgcacccaggaggcaggggttgcggtgagccgagatgctgagatcgcgacattgcactccagcctgggcaataagagcgaaactctgtctcaaaaaaaaagttaccatattaatcatttaaaatttatttttatttttgtagagatggggtcttgttatgttgcctaggctggtctcaaactccaggcctccagacaacctactgcttcagcctcccaaaatgctggggttacacggtgagccaatgcacctggcccatattaatcatttttaacagtatacttaagtatttttaagtacattcacattgttgtgctgccaatctcaagaatttattcatcttgcaacactaataattcataccattaaacaacagaatttgtttttaagaatgagaatcacttaaatattttatatgcatagggggatgaaccggtacagtgaaagaggatgaaggtgtaggaaaaatgaaaattctaccattctaagaactttataagaccatttcatcattaaaagacagacaaatatctttacccctttctgacaactccttccatctttctgagtgcagttttaattttctactttctattacaaaaaaaaacaataaaattgatgataattttttgttgagaaagacgatttattttttaagataaattctgaggcctttagaaagatacacacaaactcccatctcttttataattattcttgtatgaattggtgataatatatacttaaccatagtattttcatgatgctgaggagggtgcgaacctggacaacgtgattaaattgtagcacagagcatattaccataaaaagcattaaatgttgtcaaaaggctcatgtaatatgaattaggggttaaaactatgtttctattactccatattcagtttggatgaacttcaaatatttatgaagtgctagttactataatgagattttacctctcctggttaaaccagaagttgggtactagaacaatttactttttactaactctttctctccctgatgamatgtaaagagaatgagacaattgtcaaagtaaccttttgtcgacaacgtctgatacaacatgactgaagtgaccttgaattttaattttgtttaaaatagagaactgtggctaggcactgtggctcacacctgtaatcctagcactttgggaggccaaggcaagcggatcacttgaggccaggagtttgagaccagcctggacaacatggtgaaacccaatctctactaaaaatacaaaaattagccaggcttagtggtgcgcatctataatcccagttacgcgggaggctgaggcacaagaatcacttgaacctgggaggcagaggttgcagtgagccaagatcacgccactgcactccagcctggatgacagagtgaggctctgtctcaaaaaaaagaatgtaagaacgtagtaaaataggccaggcatggtggctcacgcctgtaatcccagcactttgggaggctgaggcgggcggatcacctgaggtcaggagttcgagaccagcctgaccaacatggtgaaaccccatctctactaaaaatacacaaattagctgggcaaggtggcgggcgcctgtaatcccagctacttggaggcagaggcaggagaatcacttgaacccgggaggcagagggtgcagtaagctgagatggctccattgcactccagcctgggagacaagagtaaaactcttgtctcaaaaaaaaaaaaaaaaaaagaacctaatatcctaatgtaataaagtagagaaccgttgccacagcacccaccaaagtgtgtctctcattgacaagctcaggtacttgtttgtctgtttctcytgcctacccctcagccactctggatcttccctttgatcattcttttctctttctagctttgatgttttggtttccattctgtaattcgcacactattttgtggacatgctcttttcaaatttctctccaaaacaatagtacaaaggcagtcataaaccaattgttggtttttacaaaaaatcccatcatatcaccaaaaaccagttttatcataacaggatgaatatcagaccaatattcattattagagatgtagtctaaactgactcgrgagaagacatccattgagtctttcattcagtgtaattagttgttatcatacatgcaaaatcctataactataaagcatttcagaaataaagtattgttaaacagctccaaatttattaaagtataaaaaatgtattgagtatataccatgtggcaccrtgcaaagtaacagagatgcctaaactaaaaggttatcctttgtccttattaaagtatgactgaaagctcgctggagaatatagtttctacatagagtcaaaacagtccttcgggctcacaaatttaatgatttatatggtataactggctttagatacaaatttacatgccagacaagcaatgtagaaaaatcaagaactaggaaacaggaaaacagatctacatttctgctttgctgcaattcattcatttttttcaaccattcatcaaatatttattgagagcccatgctgtgagagaaactgtattaggtgctggggaacatggtagcaaataagagagaccatgtatgtgagcatgagcaggtggcttaacctctccacatctctaacctcttttagactcaatgtctgaggtatctttcagacctgaaatgctaaggtttgcaacagccttgtggagggagaagctgccaagtcgccttgggacttgaggacttaccttcctttcaaaggattarcccttgttttgatttcaaaataattttgttacacagtttaaaaataatttggtcaggctctcatctacattggggtaatcttgacggtctggatgtggtaattcatgctcattagacttcaaaggtaggaagtcaaagttgggaaatggtggatgactttcatcaattcatagccaggcagcggttcccattgagcagctcctctgtggttccacccagccttccaaccaataacgcagcgtctcctgcaggaaactcatcgcttgggtcacctgttgctctttgctctaatgagccttgagaaaggattgctggtcatgggaccagaggctttatggggagggaagaactgttcttgactttcagtttttcgagcgggtttcaaggtaacaactttcttattatctagcttcataattgcagtaaggaatagctttttttgcttgcagcygagatgactttttcaagggagaaaaagggatttctataacgaagagagggagagagagatgaagagggagggagtaagggagagagggaagaagggagaaagagagagagatttgaatatacattgcttcaaggatgcaaaaaattacaacctggaaaaggcttcgagtaactttaggaaaatgagctgctggactcctcagtcaatctgtcctttctagtcaatgaaaaagacagggtttgaggttccttccgaaacggggccggctaatttagcccctcccacgagcccaagggtctgttatatctctgtttccttgaggacctctctcacggagacggaccacagcaagcagaggctggrggggggaaagacgaggaaagaggaggaaaacaaaagctgctacttatggaagatacaaagggtaagaccaaaattgatttgatctgaatccttaagaaaaaaaaaatagaaggaaaaataaaagcccagaccaaaaagcaagtacttgaaagctggaggcaaaaagccctgaatgaactttcccaccctcttccttctgagaggaggcagagaaagagctttgggaaactttttaggaagcagagtccagggttgcagtcaagggtggctctagagcaagctggaggggctcatgaatattcattatcaatttgtattcagagttggtttttttagaggcaaatgactttttcagtccccttgcagtttaagaggcagctgcctcatctgcagtccggactcatctagcctcgggtctgtacctcagggtgtttgcttgaagatgctgggctctgcgtgtagatttgttttgttctcgaatttcttgcatgctttcctgttgtgaaattagcaaaggcttctttgctgggaacaagacagagaagttaatgtggcacaaggctgtcacaacaggaccccagagtatgtctttcaaaatgctgaaagtttcttgagatatgtgggggagttttatgtgggggacagagtgggggacggggacgggtagagggaggaaatagaataattctatcttaaaagggcaggtcacatctgactacatttagattttgtctaaaaactacaagagcagcctggtttgcacagatggtgtgcagtctctatcttttacctcttttgggcattttctgccargacggagagccagctgcttgccagcgtgtgagagccaggaagaatctctgcagcagtgagggagtatagggttgtaaacctccttctcctccttctttatcatctctaacttctaacattcccacatgcttataccgtatagaacatggaagaatagcatgagtagccaacatatttcttaatacttacaataatgatagctgttaatgttgactaagtctttattctgtgttgggagctatacctagcatattacatgtgctacttacttgtcacatgaaccttacaagtgctatcattgacattcccattttccagatggcataattgaggtactgagaggataacttgccttgagatctcatagttagtaagggctgagtgtggatggaggtggtctgaggcagggctggtgggcttttccactccccaatactgtttctctgctttttctggtgccctgacattgtggatttcaggtttgcaaatccttgaagctactggggaagtgatactggtaaaatcttaagtctgtgaaggaatttgtactttgcactcaagttcacatacattttcctcatttggtgctcatggccattctctatgagaagcaggtattgttattatggtcttttgcaaaaaggagaaactgaggtcagaaggggttagtttggtgacaccagtcacagctagttgtcaaaagtctggactggggggctggatgtggtggctcgcacctgtaatcccagcactttgggaggccgaggtgggcggatcacctgaggtcaggagttcgagaccggcctggccaacatgatgaaaccctgtctctactaaaaatacaaaaattagctgggtgtggtggtgtgcgcctgtagtcccagccacttggaaggctgaggtaggagaatcacctgaacccgggaggcagaggttgcagtgagctgaggttgcaccactgcactccagcctgggcgagagtgagacactgtctcaaaaaaaaaaaaaaaaaaaaaaaaaaaagatttggactggatctgaaaccctctgcttctggtttttcttccaacctacagagcagacccagtcatctctgaacgtctgtccccaccccaagctgcgcctcattgagttgctttcagttccccaaaggaactgcatctttcctcagactgaagctaggcrctttcttctgttttaagggcctatctggtactctgcttcccctttagtctggagccgagctgcctgggtttgaatttcagctccaccatttactgtgtgccttagtttcatcatctgtaacatgaagagaataacagtaacatctatcttacagggttgtggtaaggactgaatgagggattcatgcaaagtttttagaacagggcctgatatatagtattgctaaataaatattaacatttgctatcactgcttgaagcctcatattgggtgttattcccctttaagccttctctaatccttcaagtctagattagcccccatcttggatgcttctatagtacctcatcagttatgcctaaggtggcactcatcatacttgtccatgctcctgccctctgcatcaccttctctcccttccaattatattttctgtattcacctttagatctgcagtgtctagtgcaattttatttttagtctctaaacttgtggcaactttctcatcagtgtgggcagagtggtgggagaggggcctcagtcatgataggggtacaggaggtagccacagaggatgaccatatagcagtcatagagggccagaagccacgcaggaagtggacatatgctgagtactgattcrggaagagcacatgtcattcagcaaccaatggttaaggtgtcaggtttcaatgaccttctccatgaggtctgtgaggtcctctgacgtacttattgtgggtcagcttsgcagccacattcatcagcccctgggacaggttcttgaatttggtgttcctctcagagaacatcccaagctttccttagaaggtggtacacaccaggctcttgtgcaagtccaaaaggtccttgtcagccattagcaccttgagttccctaatgggaactcaataaatatttagtaagtgaagtattattattttagctgatgctcatttgagaccttcaagaggcttgtttaaaaggggacctttgagtttgcagtagggttccccactggtacatatagatctttggcacaatctgtaaagacgtccctctatgtggatacactgaaaaacaaaatgcatccctctgggtggatgattttcagagctaatgtaaccccatgccagggcaccctgttgggcaagtgaagctctggctgaacttcagcccctactccctgctcagccaagggccaaactggagatttcagatgcctcatagccaactttgctttctctgaacagaacatctggttccataaatagtgtctttctagccctactttatagcaaccttgctgtctgagataatgtactctggtaatgaaataaaaacaaacactacagaagttggccctgggaaaaatcataaagtacgctatggttttttccagcaccctccctttcctcttcctggcataccttcaaaccattttgacaaatattattgtgtgtctaccatttgtaagttcccatgccacacagatccttggataaacagtttgctcacggtctagtggggaagcctaataataatagctgggaagtgctaataataatagctaacattgatcatttattatgtgccaaacattgtaatgtgtgttgtctcatgtaatctttacaaaaattccatgatattggtttctgcatcttccagctgtggaaggaggtcatttggttaaggycacacagctaataataggcagaggggaaattttgactgatgtggttaggctgcaaagtctgggatcctaatggatacgttctacctcctcaagagctgtaatgtaagtctaaacaaagtgccatgacacagtggtgcacgcttgtagttccagctactcaggaggttgaggcaggaggatagcttgggcccaggagtttgaggctgtaatgtgctatatttgcacctgtgaataaccactgcactccagcctgggcaacatgatgagactttgtctctaacaaaataaaaataaaaaataataatacaagagaaagtgccatgagaagcagaatagggagcgatggcttctggagaaacttctcaaaggataggacacttcagttggatctagaaagatgagtagaatctggtgcccatggcaagccccttcaccctcccagcagtgcttgaagatcttttctctcttttaccttaactatagtgtagatttaagagtaaaaagcccccttttttcccaagctctgagcagtcaacctacttacatgtccatcttggagatttgaaggcagaagtacagagtttatccttcactatgggtcgtgtaatcaaataagcctttacaaagcaatcagctgcacattaaatgatttccttaatcatgattgcactgcggggtaataacatacatctggtaaacagtttttataaatcattgtgattggtattgcctttacttggtcaaattgcattttgagagtgctttccctcttgtgttgtctttttggttgtttctccgctctttataactggtaatggtgctgaagggcactagtgtttaatcgcaccaactactgtccagaggtgatgggctccatctgtgtagagtgaaggtgaggcctggagtaaattacatagagtttattcttttttttttttttttttttttttttttttttttgagacggagtctcgctttgtcgcccaggctggagtgcagtggcgcgatctcagctcactgcaagctccgcctcccaggttcacgccattctcctgcctcagcctcccgagtagctgggactacaggcgcctgccactacacccggctaattttttgtaatttttagtagagacggggtttcactgtgttagccaggatggtctcgatctcctgacctcatgatccgcccgtctcggcctcccagagtgctgggattacaggcgtgagccaccgcgcccagccatagagtctattcttttaagtacttcggaggaaggccaaaatcaagggcagcccctgtggtgaagaatcactaaatgtcttgatggtttggtgaagtgtgcaagagtggagtcacttgtttgtcttggtgattttggtgtgtgtgtgcatatgttctgaagcagtgcttctcaaactttagcatgagtatgtatcattagagaacttgttaaaaatgcagattctgatccaatagctctgaagtaggtctacatttctaacaagttcccaggcgatgataatgctgcccctccacagaccacactttgactggcaatgtggcagggtcatcgcatgccttagtctcagggcttattttggtactaaatgaccaagctcttcccaccctctactccctcaccaagctgccacttctagtcactggtcaggtgtcattgcaggatgatgggaagcctaattcatttattcattcagcaaatatatgccctagaacaggaaattgaggctcccaatttgccaaatcctagaaactggaatcttcagcacacaaaaactactgttacacaaaaaggccttgtgttagatttcctgcatgtctccaccttttctccatggctccaagcttccctaaacttcccttattctctgccttcaacttgagaagtactggagcagaatgtgtggctgcctgcagaatcttgtgctgggtgttggagtcccagggagctagaggtagcagggactcagggctctgagactggcaacagtgtgcctgaggcattgtctacgctctgcagaagaaaggtgggaataattctaggagcaaagcaaggaaagtgggtgcagagagaaccgatggaatttctttaggcttgaaaacttgagggggttgtgaagagaaaataagttgttggagaaaaaaatccagagtagaggttgtctaacatgtatgaaacatgctgtttttgttagatcatcaaagtgactttagagaccgacagtggcagtacatgccctgttacacaaagaggtgtttccttccataaccactgcttggtttaaaaaaatttaaaaagaagcaaaaaaaaaaaaaaaaaagaagtgtttccttttgattcataggaaggatgtaaagcattgctttatgtccgtgaggatacaagtaacatagcacatgcccattaaagaaaacatgatactatagattacagtagggaagaaaaacaatcacttgtaatattttggtgccatttcctggcagttttttttttttttttttactatgcctgggttgtttctctcatttggcattcacttgaataggaccttgaaaagttatgagatggcaccatgatcattaggctatatatgcagttttaaagcctggttttactgtagcagtgaagcacaygtattttccattttatagcgtggtctttgttagcgtaatttttatagtcacatagtttatttaacagttctcctgttattgaatattgaggatgtttccatttccaataaatgtcttygtgcaggaagttttttccatatgtaggattgcactctgaggacaggatcccagaaatagacttactagattgaaacttgttaatgttttttaaagttcttgattactgttgccaggttgcattcccaaaggttgggcccttcatgctctcaaaagcagttcctgttttgtggcatccctgacagctttggtgtttttgtttttaaataattttatcaatttttagattgttttagtttgtatttcttaattacagtaaatttgacatttttcacgatatacttcttttgtatactttttacatccttttcctgtttattataatacttatttggatttgatgtttttaatcaacttatgtgcatgctttatcatataaargtattcaagttttcctgccatacttataatagtttttctgtatttatttatttatttatttatttttgttatgacggggtttcaccatgttgcccaggctggtctcaaactcctggactcaagtgatctgcctgcctaggcctcccaaaatgctgggattacaggtgtgagccaccacacccggcctctgatagtttttctgaatctgttcttactgtgaatagatccaacacatttttatatgtggtgtcatcgttttctaaatagtttgacatcacatttttattctctgtagcccagaatattacttctaaaagattgtaaatgatttttatttttgtttgccattataattaatttttcattttttccatgatggttagagaatatggctttataatttctgaggtttccttgtaactaagcatatgatgggtttgtgtaaatctatgaacacttgtgaagaagctgtatgtttttaggatataaaattggatatttattaatcaatccagtcttttcaattatatggtaatttatctccaaccataatattctctgatgggtagagaggagcttagtcctaccaacaccttgatttcagtccagtgaaactgatttcagccttcagacttccagaactgtaagagaataaatgtgtcttgttttaaaccactgagttttttatggtaatttgttatagcaggcaaagaaaacgaatacggtaagtgtttaatgaaaggaagtgctggtggctttagttagttaacacacaggcttatagtggacattggttcgcacactattctaatcaccttacagatgttaattcagttctccaaccatccaaggaggttggtattatttactgttaaataactcaattgttaaagtctctcagttggtaagtgttgaagttgagattcaaatccatagttgttgatcttattatctggagacacaattcacatatcatacgattcrccaacttaaagtcgacaattcagtggttttagtatattcacaggattgtgtaccaccaccacaatcaattttggaacattttatcaccctgaaaagaaacctcatacctattaatgggcactccccatttcctccctacatggcccccaccgttctgagtcctaggaaaacaccaatctactttctgtccccacagttttgccaattctggacattcatttcatagcatatatcccattgaatgtatataccacattttattcatcagttgatgaatatttggattgtttttactttttgacattatgaataatgctgctgtgagcattcatggacaagtgttggtgtggacttgtttttaatttcttttggttatatacctaggagcaaaattgctgggtcacttgtatgtctatgtttaaccatttgatgaactgccagactgttttccaaagtagctggaccatttacatttccaccagcaatatatggtgattccaatttctccacatccttgccaacactttttattmcctatcttttattatagccttcctaatgagtgtgaagtagtatctcattgaggttttgatttgtatttccctgatggctgatggttttgaaaatctattcatgtgtttagtgggcatttgtggatcttttttggaaaaatgcctgttcagatcctttgcccatttttttttttttttttttttgaggtggagttttgctcttgttgcccaggctggagtgtgatggcgtgattttggctcactgcaacctccacctcctgagttcaagcagttctcctgcctyagcctccggagtagctgggattacaggcatgtgccaccacacccggctaattttgtatttttagtagagacrggctttcaccatgttggccaggctggtctcgaactcctgacctcaggtgatccacctgcctcggcctcccaaagtgctgggattacaggcgtgagccaccacgcctggcctctttgcccattttttaaatgggtttacctttttatgattgagttgcaatgattccttatatattcccttttcagatatatgatttccaaaaattttctcccattctgtgggttgtcttttcactttcttgatagtgttgtttgcagcacaaaatttaaaagttttaaattttgatgatattcaatctatagtttctttggttcttatgcttttgttgtcctatctaagaaactattgcctaatccaaagtcatgaagatatacatctatattttcttcaaagagctacatagttttagcccttgcatttaggtttttaatccactttgagttagtttttgtatatgttatgaggtaggggccaaacttcatgtttttgtgtgtgaatatctagttgttccagcaccatttgttgaaaagattattattttctccagtgaattgttttggcaccctgttgaaaatcaatttcccataagtgtgagcgtttttttctagactctcagttatattccatttctttatatatctagccctatgtcaattccacatttcttgatactacagcttggtagtaagttttgaaatcaggcagtgtgagtcctccaatttcattttattttttaaatattgtttggggtattatgggtcccattaacttccatatgaattttaagatcaggttgtcaacttctgcaaggaagccagctgagattttgataagattgcatcaactgtaaatctatttagagaatattgccatcttaaaaatattaaatcttctaatccatgaacatatgatgtctttctgtgtatgtaggtcttacttaatttccttaagtaatattttgtagttttcagagtgtaacttttgtatttcttttgttaaatttgttcctaagtatgattttctttttgatgctattataaatataattgttttaaaatttcatttttggtttgttatcatagatttactttttttgttgttgtattaatttttttattttaaaatgacttcaaaattacagaaaagttacaagaacaattcaaagagcatttcacaagtattcaccaatttaaaaaattctgccacatttatcattctctcttcccttttatatctctcccacacacaacagtcacatatagtattgttcctgaaccatttgagaataagttgtatatattatgttcctttacccctaaatatttcagtatgtatttcctaagaacaaagattttctcttatataaccacagtacagtagtcaaactcaggaaatctaacactgatagaatactttcaattgtagtccawaatcaaattttgttaattggtcaaacaattgttatcatagatttacttttaacctcaattacgctcaatactatattcctcataagttcttagattctctaacagtgcttcaaataataatgacttcatgctcttaatgcaattaagattcatttaattcaatacaattgtctgttgtctatttacctctactcatattttgtatgtttttgcagttcatattttgataaaatattgaaataactctttttatctacttttttagtcctaaattctgttcccccttctcatttggctgatatattttgtccatctttatttttaatctttctaaatccaatttgattctctgttttaataaaggaatgtaaacagttcacatttattttatctgccttttctcattttattctctttagtgtttaatgtttttttctgttatgctttttgctatacagactctggactttgttatttgtttttatatttccacaaagctgtgaataacggacatcttacttttaattgtacttgtagcaatcttttttttttttttgaggcagggtcttgctctgtcacctaggctggagtgcagtagcataatcatagctcaatgtaaccttgaactcctgggctcaggtgatcctcctgcctcagccttctgagtagctagggctacaggcgtgcaccaccatacccagctgattttttattttttgtagaaacagggtcttgttatgttgcccaggctgtggaaataaaagaaaagcattccatcctggctaacatggtgaaaccccatctctactaaaaatacaaaaaaaattagccgggcgtggtggtgggcrcctatagtcccagctactcgggaggctgaggcaggagaatggtgtgaacctgggaggcagagcttcagtgagccgagatcataccactgcactccagcctgggagacagagcgagactccatctcaaaaaaaaaaaaaaaraaagaaagaaaaaaggaaagcaaaacattcctgagcttaaatttatcttaatatcaaagtgaaattagtaatttttgaccccattatgagagaaggattaagagtttttgtgtccctgtgtcctcctttttcttattttaaatatttaatttgataatattataaattcaaatagtaaaaattatgttrgtcacttatttcacaggattttttctctttatttggatattaataatcaaattcatccatccatgaatttaatgaattttaatatagttcttatctcactatgcctttccccattcttgggaccctaatcttgattcctttcataatgatctagtaagcatattaatttttagaaaggggatcagtgttataaaagagagacaacttctcttaaatatagcartctttccccctcaagtcattggaaatattcctccattgtcttgagaagtttgatgctgtaaagaagttgctatagtttgaatatgtcyccccaaaagcatatgttcaaaacttaatccccagtataacaatgttgggaggcaagacctactggaggtgcttgggtcatgagggctccaccctgatgaatggatcaatgccaataataaaaggacttgaagctgtgagtttgttctcttgctcttatgctctcttgccctttgctttctgccatgggatgacacagcaagaaggcccttgccagatgctggccccttgatctggaacttcccagcctccagaactgtgagccaaataaacttctgttgtttataaatgactcagtctgttgtagcagcacaaaacagactcagaagttgaggacaactgttttttagcctgaatggtttttgttccccatttctgaaatttacaactttcacaataagataactgggtatagacttcctttcaaaaatttttgcctgggatatggtaaaccctcttgatttccaaatttaggacttatttaggagcaagaaagatttcttctgtcacaactttgattaatgctgctgttttgtttgtttgtttttttcttcttcagggacctatttggatctcttatctctaaattgcctgcctgtggcctgcctgcctgcctccttccctctttctttctctttccctctctttcttctttctttcttttcttttttctttctttctctctctytttctttctccttccttctttattcctttcattttcttcatttatttttcattgcattctgagactattttcctaagaatttcctctatatcactgattcaattttccttaactatctcccatataaactttcattcagttacagtgtttttggcttccatgaaatcttttattttagcttgtttatggcaacatcctcttgtacagagttcaaaaaaacaaacgatttccatctattcctgcttcatatctattttagaggcaagcttttccttcattgttctttctattttcttgcaaaatttatttaatctaaggccttatccttgaaagaaaagagattccttttgtatgtatgtatggatgaatgtgtttttcaccttatcctaaaaagtatttaaggatgtattaggggagatttatcccagtctaacgttgatatggatggaatgcatagtctgcccatggctcccttaggttctgttcaggtcttggaaaaatgcaatcaccaaatgctagatccccatctaagtatgagaagacatctaaatcctccaggcagaaaagttcactcagacccaggaaagaaggcaaaagtctcgccatgtacagtagtcatgttccagaagatagagtgactagggctgtcagagttctgtcaatatggttgtccagaggcataaaggcattcaggaaggagcctttgctccttccccactgagagcaaacctctgttgaattagggagtgagctcctgttccactgcttagcagttttcctcagcctttttttggatatcatttctaagatctctttagacttgtggtagcatatggctgctagtgtggctgtttctgtgaagaacattccacgcagaggaaccaacatgtacaaagtcctgaggagaaattaagtgtttaagaaacaacaaagaatccagtgtggttggagtggagaaagcaaggaggtgagagctgagaggtaggtttggcctaaayagaatgtctagcatcctgcaggccactgtatagcctttggcttttayttatagagcaatgggaaaccactgtgagtgttgagcacaggagtgactttatccaattcacgttttaataggatcactctggctgcattgtagagaacagacataaagggatataagcagagagactagtcgggagactactgcagtaatacaggtaaaagatgatggtgtccatttccaggtagtagcagtggacacggtgaaaagtgattggatttgggatctaatagagccaataaaatctcctagttggatttagatgggaaacaagagaggaggaaacttgactccaaggttttgggccttccaagaaactagaaggatggagttgccttgagatgagaagactgtaggaggaatagttttgagtgggaagatcaggatctcggttttgggtgtgttaatgttccgatgcctatttgacatgggtctttcaaatagagcagatggatatacaaatttggagtttggggaagaagactggacttgagatacaaatttaggtcatcagatggtgtttaaactgagtgagacaggatttaaatccaatgagactgggtaagtgagtgtaactagaaaaaaaaaaaaacgacaatgctctaaggactgagccggatgctccaactttaaaggttggggataggaagagaaaccgtccaagaagattgagagagagagagagagtgagtgagtgagtgtgtgtgtgtgtgtgtgtgtgtgtgttggagtgggggaaggaggataaactaggtaggtgagtatggtgtcctgggagccatcggagaaaagtgtttcaactgggtctaactgggtctaatgctgctcatgggtaaaataagatgaaactgagaattgaccctggcatttggcacagtgaatgttgaaagttgttagtaaagatttcacaggtagaggaagtcttttagggatggaaatatttacagagaggtgtgtaacttcctggtgctgatgtccatccagactgcagacattttctgtgaaagaaaagccagaggcctttcagggccaggaagtatggtctttttcaattgtgtttttctcaaaaagcttgctctaagattcacattgtgaagacagcccaaactccaggcccctacctactgttactcttcccagaactgccttatggcttcagagagcagatctgtttgcaaaactaatggaggattagggctggggaggagtagaagatcacatttcaaatgtggtgtaggtatctatgcatttggcattttaaaaagactcagtggattttagtgctagaagagacttaaatatcctcaaatctcttaattaaaatgaaatcaattgcatttgctgttttaattacaaaaataatacaagtttataacaaaatttaaaatatataaagaataaataagaaaataaaaatttgtgtaagtttactactcataactctgtcatatgactttttagtctttctcttgttccctctctttggcttactttttattgttttttagtatttattttctacaaatttggatccatgttatgcataccaattgtaatcctcaattttactttacagtttgtcgtgacaattgaatggcttttaccatatgatcttttaatggctgcatataatattccatcatttgaacatgtaccatatgtctatttaaccatttccttttgggaaacatttgagaaacttccagttactttccaaattatttttcaaaaacatttgcaagttattttccaaatatataattatattataacttctgtggattaatctcatttcacatctttgacagtttctttaggatcaattcctaaaagtagaatttccaaatttctttccaaatttcagcagtgtatgagtgatagaaacattgaagtcctgaggtgggaaggaatgtgctcatgttgcacaactggttggtggctgagtgtgcccagttcccttgcctttttgaaagagcccctctccttttcttcctaccatgctttctatagcatttcagcctccttttagtgatgtcccgtatgactccttggaccttgatgacatttaaccttttcctgaaaactcttggctcccacttatcccaaactagtcccccagtgtatctctgggcatgaactctgaacaattagagatgtcctttttcatgagagaagatgtacacttctcagatacattttctctttaggggtacaaatgttttcccattagtcaagaactgccacccattagatattccttcatgtatccgaaggcttcctggagttttcctgacttctttttagctttactgatcatatattttctctctaaaatcttactcactgtagtacagacatactttaaagttattgcaagttttgttccagaccgctacaaaggaagtaacrtgattaaaagagtagtatgaatttttggtttcccagtgcatataaaagttatgtttacactatactgtatctattaagtgtacaatagcattatgtttaaaaaaatgcaccttaattaaaaatactttattgctaaaaaaatgctaacagtcatctgaaccttcagtgagtggtactctttttgttggtggagagtcttgccttgatgtttatgttgctgacttatcaggagttggttgctgaaggttggagtggctgtggcaatttattaaaagaagacaacaatgatgtttaccacattgaatgactcttcctttcgtgacagatttctctgtagcatgtggtgctgtttgataacattttactaacagtagaacttctttcaaaattggagtcaatcctcctccagcactcctgctgtttcattgagcaagtttacataatattctaaatcctttgctgtcatttcaacaatgttcacagtatcttccccaagagtagatkccatctcaagaaaccactttctctgttcatccataagaagcaactccacagctgttcaagtttcatcatgagattgcagccattcattcacatcttcaggctccactactaattctagttctcctgctgtttccatcacttctgtagtcactttctccactgaagtcttgagcccctccaagtcattcatgagggttggagtcaacttcttccaaactcctgttaatattggtattttgacctcctcccatgaatcatgaatgttcttaatggcacctagaatggtaatttttgtccagaaggctttcaatttactttgcccaggtccaacagaaaaatcattatgtatgatagctatagccttattaaatgtatttcttaaatgagacttgaaagtcaaaattactttgttttgtgttgctataaaggaataccagagacagggaaatttataaagaaagaaagtttatttggctcacaattctgatggcttgaaagctcaagattgggcatctggcgagggtttcaggctgcttccactcttggaggaaggtgaaggggagccagagtgtgcagagatcacatggtgggagaggaagcaaagtatagagaggccggtgctagcctctttttaacaaccgctctcatgggaacgaatagagtaagagttcactcacccccaaagaaggtcattgatctatgcatgagggatctgcccccatgaccaaacacctcccatttggccccacctctaacactggggataaaatttcagtatgaggcttggaggagacaaatatccaaaccgtagcactccttgatccatagactgcagaatggatgttgtattagcaggcatgaaaacatttatcttcttgtatatcttcatcagagctcttggatgactaggtgcattgtcaatggacagtaatattttggaaggaattttttttttctgagaagcagacatcaacagtgggcttaaaatattcagtaaaccttactgtaaacagatttatggtcatccagccttttttgttccatttatagagcacaggcagagcagatttaacataattcttaaaggccctaggattttcagaatggtcaattaataatggcttaaacttaaagtcactagcttcattatcctttaacaagagagtcatcctgtcctttgaagctttgaagccatccttttttatggctgcatagtattccrtggtgtatatgtgccacattttcttaatccggtctatcactgatgaacatttgggttggttccaagtctttgctattgtgaatagtgctgcaataaacatacatgtgcatgtgtctttacagtagcatgatttataatcctttgggtagatacccagtaatgggattgctgggtcaaatggtatttctagttctaggtccttgaggagttgccacactgtcttccacaatggttgaactagtttacactcccaccaacagtgtaaaagcgttcctatttctccacatcctctccagcgtctgttgtttcctgactttttaatgattgccattctaactggtgtgagatggtatctcattgtggttttgatttgcatttctctgatgaccagtgatgatgagcattttttaatgtgtctgttggctgcatagatgtcttcttttgagaagtgtctgttcatatcctttgcccacttttcgatggagttgtttttttcttgtaaatttgtttaagttctttgtagattctggatattagccctttgtcaaataggtagattgcaaaaattttctcccattctgtaggttgtctgttcactctgatggtagtttctttagctgtgcagaagctctttagtttaattagatcccatttgtctattttggcttttgttgccattgcttttggtgttttagtcatgaagtctttgcccatacctatgtcctgaatggcattgcctaggttttcttctagggttttcctggttttaggtctaacatttaagtctttaatccttcttgaattaatttttgtataaggtgtaaggaagggatccagtttcagctttctacatatgcctagccagttttcccaggaccatttattaaatagggaatcatttccccatttcttgtttttatcaggtttgtcaaagatcagatggttgtagatgtgtggtgttatttctgaggcctctgttgtgttccactggtctatctctctgttttggtaccagtaccatgctgttttggttactgtagccttgtagtatagtttgaagtcaggtagtgtgatgcttccagctttgttctttttgcttaggattgtcttggcaatgtgggctcttttttggttccataggaactttaaagtagttttttccaattctgtgaagaaagtcattggtagcttgatggagatggcattgaatctacaaattaccttgggcagtatggccattttcatgatattgattcttcctatccatgagcatggaatgttcttccatttgtttgtgtccttttttatttcgttgagcagtggtttgtagttctcctttaaggggtcctttacatcccttgtgagttggattcctaggtattttattctctttgaagcaattctgaatgggagttcactcatcatttggctttctgtttgttattggtgtataagaatgcttgtgattttcgcatattaattttgtatcctgagactttgctgaagttgcttatcagcttaaggagattttgggctgagacaatggggttttctaaatatacaatcaggtcatctgcaaacagggacaatttgacttcctcttttcctaattgaataccctttatttctttctcttgcctgattgccctggccagaacttccaacactatgttgaataggagtggtgagagagagggcatctctgtcttgtgccagttttcaaagggaatgcttccagtttttgcccattcagtatgatattggctgtgggtttgtcataaatagctcttattattttgagatatgttccatcaatacctagtttattgagaatttttagcatgaagggctgttgaattttgtcaaagaccttttctgcctctattgagataatcatgtggtttttgtctttggtatattctgttgatttgggtggagagttctgtagatgtctattaggtttgcttggtgcagagctgagttcaagtactggatatccttgttaaccttctgtctcattgatctgtctaatattgacagtggggtgttaaaatctcccattattattgtgtgggagtctaagtctctttgtaggtctctaaggactcgctttatgaatctgggtgctcctgtattgggtgcatatatatttaggatagttagctcttcttgttgaattgatccctttaccattatgtaatggccttctttgtctcttttgatctttgttggtttaaagtctgttttatcagagactaggattgcaacccctacttttttttgctttccatttgcttgttagatcttcctccatccatttattttgagcctatgtgcgttccttgcacatgagatgggtctcctgaatacagcagactgatgggtcttgactatatccaatttgccagtctgtgtcttttaattggagcatttagcccatttacatttaaggttcatattgttatgtgtgaatttgatcctgtcattatgatgttagctggttattttacccattagtttatgcagtttcttcctagcatcgacagtctttacgatttggcatgtttttgcagtggttgctaccggttgttcctttccatgtttagtgcttccttcaggagctcttgtaaggcaggcctggtggtgacaaaatctctcagcatttgcttgtctgtaaaggattttatttctccttcacttatgaagcttagtttggctggatatgaaattatgggttgaaaattcttttctttaagaatgttgaatattggcccccactctcttctggcttgtagagtttctgccgagagatccactgtgagtctgatgggcttccctttgtgggtaacccgacctttctctctggttgcccttaacattttttccttcaccttggtgaatctgacaattatgtgtcttggggttgctcttctcaaggagtatctttatggtgttctctgtgtttccggaatttgaatattggcctgccttgctaggttgaggaagttctcgtggataacatcctgaagagtgttttccaacttggtcctattctccccatcacttttaggtacaccaatcaaatgtagatttggtcttttcacatagtcccatatttcttggaggctttgttcatttctttttactcttttttctctaaatttctcttctcacttcatttcattcatttgatcttccatcactgataccctttcttccatttgatcgaattggctaatgaagcttgtgcatgggtcacatagttctcatgccatggttttcagcttggtcatttaaggtgttctctacactgtttattctagttagccatttatctaatcgttkttcaaggtttttagcttccttgcgatgggttcgaacatcctcctttagcttggaggaatttgtcattaccaaccttctgaagcctacttctgtcagctcgtcaaagtcattctccatccagctttgtttctttgctggcgaggagctgtgatcctttggaggaaaagaggccctctggtttttagaattttctgcttttctgctctggtttctccccatctttgtggttttaatctacctttggtctttgatgttggtgacctacagatggggttttagtgtggatgtcctttttgttgatgttgatgctattcctttctgtttgttagttttccttctaacagtcaggtcccttaactgcaggtctgttggagtttgctggaggtccactccagaccctgtttttctgggtatcaccagcagaggctgcagaacagcaaatattgcagaacwgcaaatattgctgcctgatccttcctctggaagcttcgtcctagaggggtgcccgcctgtatgaagagtcagctggcccctactgggaggtgtctcccagttaggctacatgggggtcagagacccacttgagtaggcagtctgtctgttctctgagctcaaacaccatgctgggagaaccactgctctcttcagagctgttagacagggacgtttacatctgcagaagttgtctgctgccttttgttcagctatgccctgcccccagaggtggagactacagaggcagtaggccttgctgagctgcggtgggctctgcccagttcgatcttccaggacactttgtttacctactcaaacctcrgcaatggcggatgcccctccgcctgcctcgcaggttgatctcagactgctgcactagaagtgagcaaggctttgtgggcatgggatccgctgaaccatgtgtgggatataatctcctggtgtgccatttgctgaaactgttggaaaagcacagtattagggcaggagtgtcctgtttttccaggtaccatctgtcatggcttcccttggctaggaaagggaaatcccctgatcccttgcgctttccaggtgaggtgatgtcccgccctgcttcagctcgtcctccatgggctgcacccactgtccaaccagtcccaatgagatgaaccaggtacctcagttggaaatgcaaaaatcacctgtcttctttgtcagtcatgctgggagctgcagactggagctgttcccattcagccatcttggaaccaagatgtttctaatgacagacagggaaaagaaaactgacaagacccaggcagttgacttgactcttgttagagctcaacaggtggtttgtagttgaggaagtgtcaatggctaaaagatatgagaaaatatccaacttcactggtaggcaaacaaagtaaactaaaacagtgaggtactatttttcacatacctaaaagatttttttcttaatatccagtgttgttgaaaatgtggggaaactaatattccctaactgttggctagaatgcaatggataaaatttgacattttgctctactttttaggatatgtcctcaaccttatcttttaacctttttgttaaaatttcttattttggttattactgtttaaatttctaaaatcttgtttttattttctgatagtttatttaaataaaattgtacacttttttggtatcatggatgcaatattttctcctctctctgatgatagtaattaatgttttcttctttgtttcctctgtttttttaactgtgtttttaacttttcatttatgtctttcatgttgaagaccttttcacatattatcttacttaatcttcactcagttctatcaggttaatattattatccttgttttatagttaatgagtcttagagagtgtatcattgttttatttctcttaccatgggcagctgaaaaaattgttggtcatagaccaaaagtactggtcacagaccagccaaatccacagtccagcttcttaatctagctggattctctgttgaatccttaaaatctctcctcaccacctccctaaccccaacacttgtctcattatattagacaactttgttagaattttttccaagttgaattaaagtctttctccttccctttacctttccactgtcattagaactagttctgccctgtagaccatagagatcctctcccatttctacatctccttccataggagatagtccctcaaatatttgaaatgatactgtcatgattcctccacatctgccattccccagcctgaagaggcctggttctgcctactttattctgcacctttgtgaaattctgcttggctaacatttttggaacgctttggaccatgttctctcaaagtctcactttaagkgtgtgtctataacttaacatagggtccagatatgctctgaaagacttaacctcaaatgggatactgtcattttattaatgtatgctggagttggcttagtttcaatttgaggaatttcatgtgctgcaacttcttttcctagaaagtaatacttttgatgtttctcacaaattataatttctaggactctgagctgcctacttctacttactcctttttagttagggttgtgtgtgtgtgttgtccttactggttactgcttttacctcctagggtctttttttcaaggccattttcacttaaccttagctattaagcccaagtggaggtgctaaggtgatttgaaaaatggaaatatcttaatttaaattgcacaaacaaacactatcgtgcatatttgagaagtaaaatacaatgtaaatgggggcttttcaggcaccatgttaagcacttggtatatattatttcatttggcttttataacagcattatgaggtgagaactgctgttattctcaatttagatgtgaggaggtgtggctagttcgatacaactaggagggccagaggtgtattgcagacctaaacataccagactcaagactaatactgctgttacccacagaaatgaagctcacatattgtattttatgccaattatagctgatgttgttggaaggaattatataatctgctgaggtgtattgcatacttctcatctttaacagaacataccaaacataaaaacttttatttgataggttgaggtgatgatattgaacatctgtcctcccatgttcattgtagcactattcacaatagctaagatttggaagcaacctaagtgtccgtcaaacattaatttttgtggccctttaagtaagaataaatatgtggccctataaatatgaatcttatgtatatttgtatagacagtgccaagcatattgtaggcaactatgattcaaatcactgcacacatgcgtattgaatgagtacatgaatgaatcaatgaagttataaaacagcaatgacctcaaggtctattaaagtttttagaactatttgccactacactaaatcttttataaactgttttgctttatgagtctatgtgtctgctttttgtaatttttttcccttctccctgtcattgtaaatagaatatctatggacatgaaatgtgcctgaagttctttgcaaatggaagactaaaaggaagttgccccaggcaattcagatcattgtgtccaagagaggaacaaactcatgtttgatccaggtcatgactgtattcaagggctttgatcctaggtgtggggtccagctgtaggggcatcagggaagtacattcttggtctgtgtccaagtccttggtcagggaagtctgtcttagcaccatggagacaggggaaactgaattcagaccttatgtgacaggagtggactaaaaccagtgcatgcatatgatccagcaattccatggctaggtatacacccaaaagaaagaaaatctgtatatagaagagatatctgccctcccatgttcgttgcagcattattcacaatagctaagatttggaagcaacctaagtgtccatcgacagatgaatggataaaatgtggtacatatacacaatggactgctattcagccataaacataataaaatcctgttatttgcaataacatggatagaactggaagtcattatgttaagtgaaataagtcaggcacagaaagacaaacttcacttgttctcactgatttgtgggagctaaaaattaaaataattgaactgagagagagtagaaggatggttactagaggctgggaagggtagtgggggctgggtagaatggaaaaagggatgggtagtgagtacaaaaaatagttagaaagaatgaataagacctagtatttgatagcgcaacagggtgctatcaaacctattgccttggtttgcaatagggtgactatagacaataataatttaattgaacatttaaaaataactaaaagagtataaytggattgtaacacaaaagataaatgcttgaggtgatggatacctcatttatcctgatgtgattattacgcattgcatgcctgtaacaaaatatctcaagtaccccataaatatagatacctactgtgtacccataaaaattaaaaataaaaaaataaaaataaaatcagcatagggagccagtctcctactaatttggtcaacagtttatgtcaggttgtagtcttaagggtggaaacgaaaagagggccaggaccttggtagccagaccaaagttcacgactgtgttatatactctgaaatggatttagccaaggaggtttgcccagattctcccataggtgatgttaaattccttccaggacacttgaccccaggcatgggattgatggtgggttttcaggtgctctcccactaaagcaaaaatgtccataatatattccaggaattaggtgagacagagcctcaggaaacaagcctgttatgccttcaccaaggcagggcagagctggataagggtgaacagaaagggacaaattattgatgagagttctgtgagtagaaactcctttctcttctttagaatttctgcctccagtttgttaatgccacttccaaaatacactgctctgagctgaagataatactgcatgcagatagagtgccatgaaggcattggtttgcagtgatctataaaggactaatgtgccaggctctgtgttaagtgcttgactttcaccaccttgtttacccctacaacaacaatttttaaattgccctattaagatatagagcattctatcattctaaaatgtttcctgtgattcagtrtatatttatttactttttggttgatttattgagtgaagaactgaaaatcactttatgggtagtatatttccttttttgtatcacatctgaagtgagacattgtcaaactgggtaggtatgtccagaatgaggaaggatgcagagactatgtcatataaggaacatgtgtcaaaggaggtagtaaaaatgaatatgactggggctagtagttccaagaaaaaattggaaacatgctcctggctaatcagaaggtttagctaaaatattttcagagcctatcacgtgaacctggtaaaaacaacccagtattgggcaaaagagttagggcaatttgaggaagtcctggcgcctaggctaggtggtgatgaacagggaagatgtgaaggaaaaaggaagagagaattttcccccttgccktattgatttcatcctgcattagttcatctcagctcttcctgttgttcccccaaccccaacagtttttctattcttttatctatttttgaattgattctctaaaagttctaaggctgcgttttcagctcctggtcatctggataactactggtttcaggattcttggggataatgggatggaggcatgggaggagaatgtctgggttaaaaagatactgagctagaagtagaaggcttggttgaattttacactcagcaacatacaggttgggcaagttgctttgctctttagcttcagcttttgcacacctataaaatggaagcggtgtgtgtgtgtgtttgtgtgtgtstgtgtagtgtatgtatccgttgtctcctagggagtttctttgaggatcaaaaaagagagtggacaaaaatgaattttgtaaactgtttttgagagcatctaaatgtagttttatgagtagcattgttaccattgtcgctgttctatttgctgaatcttgtttaatttggaagctccctaattcacagtgatttgtatagtggggtcatcactctgtaggagctctaaatggagactttgtccatgatttccaaaaggtcatccaccccagagtcacatgagactggaaagcaaatctttttcattaattggcttcaagtactttcagcttcaaatggaggtctctaagggtccttggctggcacatcaagggggcatttcaaagaaagtggcaaaatcttgactaaacttcagagcaaacacgcactcttttctttgctactctctttctaaaaagaaaaacaaattatactggtctgggttgtgtgagcatgtgtgtatcagcttgttctaattctcttttcccaaccccttctttgcttgtcccattttcaagataggataacacccaggtttttatattaccttctgtgttaggactttcttaggattcctaaaaattttggctaagtagcattaggcctgctctatttcacaggtaggcataaaaaaaaaaaaaacagtgtccacttcttcaagacagtatccaattcttcctggcattttgatggtaggaaaaatatttgaatttatttttagggcaagtcacgtggcaaaaagaataacaagtatttatggttgcctggggaactcagcttctagttactactgattatgggaaagaggaacaaattttaagatgaggcaaaattggtgaccaagaactagaatagcaggtggcctgggaagaggtgggggtgaaagcgggtagaaaatctatgcaaaaatataggttcctagtcattttttttcttttgtctctttcgattactatatcctgccttcctgcaggaggaatgtagtaagatgctttgtataatcaggtgctttgcttgttcttttttttttttttttgattgtagaaaagatcagtgtagcaatttgaccatttgccaaattacccataagatagggtaggcattaaaaacccagggacactgaagtcaggaaatccagcttcttgtatcctggatctttcttggaacagcctgtcacatatgacatctaatgatgtagcaccagctgctcacaaatacaagttccttagagtatatagacattatggggccactaaaaatgtcttatatggcttgctgccagcattttcagcactgtctctcaccagcagccactctctaactgtttgccctagccaagctcagagacatggggactcctatgagctccattgtcttgtgtagagaatggggctaactgtagagtgtgaaggcctggggagaaaaactcaggctgtgtttcctagtcaccccaagaccttgtggacccaggaagtagcagttccagagaccaattgctatatggctttctgcatgcccactgcctttgtcttgctgttgtcgcaggaaacatctggtgtacatccagtgcacccagagccttttggaaaacacctatcggcctcagtactcttttccctcaggctggcagacaatgaggaaggaggagagagagctacccattggaggaggaartaaagctggaggctggggtagtggcaagatatgagcattcaggtctacaaagcttcaagtctctcattacttcactccatcaggccaggacaatcatgggggtttggcaggagtggcgttgcagggagtttaggcctaagggagtgtatgtgtgaggcacaaagtaataaggactggactttgttacctgaggtgatgagggtgacaggcccacatggataaattaggaaacaggcaacaggttctatagctgcatatcagagactcacagagtggaaatcactttgatgagggcagagcagcagcccaaatgaccggatacccactgtggaagtcatcccctcatcactttttcattcccaagactcagctcttctctgactctgttactttgttggcaactcccgttgcagtgtctgggcaatttctctcagttgttacaacttgcattcaagggcatctcttgttccaggccaactctattgatctctgaaaaaatgggaggtagaacagtgttcaagcattcagataaacctaccttccaatcatagttctgcttcttactagctgtcccaccttaggcaggtaagttaacttatctgaatgtcagttttcccgcttgtaaaatgcagttggtattagtacttaatttaaagctttgttatgaggattaaatgagataatgcaagtccagcctatagttgactttggcttaagcagcagttgttggaacaatctgttgtggccaagatcataaggtctcaggacacaaggttggccacaaaaccaacccagcaacttatgaagcagaaaccatctgtggtaacttttctcagaaggtggctatgtaaactggcctcatttggctgaaggaagttgggaggtggataggtgggggaaataaaagaaaagagaagagttaaatgagtgtcaatgtctcctaataattaaragcttagaatccctggagtcagacaggcttgtcctcaaattccagctctgtgcttaccatttgtgtgaccacgaatatgttatcaaacttttggaccccagttttctcaagtgcaaaataggctaatgatatctatggtgttgtgataatttgatgaacaatgagtataaagtgcttagcacagtgcctgctacccagtaagaacataacaaatggggaagaggatgattgtgaggatggcaagcgtttttcttggcctagcatccagtggtgctgctcttgttatctaaggaggcaggaaggagacaagagtgggcacttggtaaaactggatgcaggtgaaagagaggtgtttatctgagggcctcatatctgagcctcacttctacctcctgaccccttatgtcctcccaccctgctacccagtgcttgggtgctgcttaaagcactttgttccaaactccctagggatggtttgcccctccccttcccataatgactcaaaacttctgttcattctgttcagctttgccacagccaggttttggtgagaaggaccacacagcttcctttgactttaaggccaccagaggtatttctttttaactccaccaaattggaaattagtggagcaataagcaatggaggatggagggtactttgagcacagagacttccatattgccctgaaaaggagcctgaaagacaaggttgaaggagacgcaggttcagtaggggagggagaaggaatgcatatccctagcttccgtattgcactaccgtcctttgcctgagaaagcgaaccctggtgttagaatctgagactaatgttgttccccaaggaggaaggcagctcaggactggttcccaccaagccaagtgcagtcctagattctggctccctgtgcccactgtcagcagagaaagcaccaaatctagtgagaaaaagtttcagcatatsttaaaatgacagaaaccaccttatccaacctagacttttctgccatgggaaaaagatgaaacctggaaatctgggaaacttaaaattttcaacaccatttataaatataaaaagcctctggttacttgagtgttgcacatttagatatttgattttgtatgttgattacaaatggagttgtggccttgcaaaccatcacartcatcattataatcattgaatttatggttcatatggcagtttcttatacattattcaatttactttaatcctcttaactctgtcaagtaggtattaccattaatcctcattttacagctgaggaaacaaggtagaaaaggtgacttactcaagatcccagagctagtaacctcgaggttttgttttgctctttggttttgttttcaatttaggtaatgagctaccaacattagaatgatgcatagaaaggtgctgggccatggtctttgcatcttccaataaagcataataagatatattaatttccaggaaaagagttgagggagaaaaaagggggaatatgatttattgatacaacttttagggaaatttgatcagcgtagtattccaagctttattttgatcattttcaaaccaaagtttaatctgttaaaatagacatgcttcttttactctgtgtaaacatgaagctccacatattacaagagggcttggaaggatgggcctactaattggtacagagcaacaaagtctattttttatttaaagatataggtgttttaggaaggagaggggatgttaaagatagtatttggctgtatgaaaatatagaagtatgagactggcagctctgtagagggctttgggtgagagaatacaaaggagagaaaatgagaaagacattgttgtatgaatataagataaaccaccccagttaagtgcaggctctggatgaagtatttctattacaaatgacagagctgggacagaagcaatgtagactgttgatgcagtatctcraggggagtttgcacactggatatgtaaattattattgtttaaagatattcttccatcttggggaagttgcttaacctatattatttgcatttttcttatttgcaaaatgggactaaaacagtacagttcttaccatatgtaatctttgagagtattaacaaaaaaaagtatgtgaagtgcctactacagtgcttgtcataaagaaggctgcagtggatatggcaacactttcctccatcaacccccacccccaaattcctttcagttatgaaaattctgaaacactgtaactttacctatatatttattggatatctacttttcgaaaagtagaacatgtgaagaattcttgatttttccttggagatacctttgcaagttagaggaagatattagtgcctgtcttccttggtttaattttaattcaaaagaaagatatgattgagaaggtaggagaaatgactgactagttcatctaggcattaatagtcctaaaagagggaactgtaaggcaaccagacacatggcctcaattttttaagaaggcagatttaaaaataaatacatgcataaataaaattttaaaacaaaaccagaaaaaatggtagacgaattctcatgatcaaatttactaaaaagaatatggctttaaaagatgagtctaggccaggcatagtggctcacgcctgtaatcccagcactttgggaggctgagttggggaatcatttgaggtcaggagttcgagaccagcctggccaacatggtgaaaccccatctctactaaaaatacaaacattagctgggcgtggtggtgggtgcctgtaatcccagatacgttggaggctgaggcaggagaatcacttgaacatgggaggtggaggttgcagtgagctgagattgcaccactgcactgcagcctgggcgacaaagtgagactctgtccaaaaaaaaagaaaaaaaagaaaaaagcgagtctaaaaaagaaataactaaatgagaaacctgattatacaataataaataatcataatggatgagaaaagcgaaaagcagttaaaacacttatttgatctgaggaactttacgaggaggcgagaaagtatgggtgagtttaattttcttatatattattttctctattttctaaaaatctctatggtaactatggcttttataaaataaacagttttcccccgaggatttgtacaatagagaaatggatgcaagtaattgagaagaatggttagaagctaggagaattcttttaaaagtagcatcacttggactaaatatctgttggcgatgaggcatggaggaaaaaatgctaaagataacaaaagttattttggttacagttcagtggaagaacatgaacaggaagaggratgcatagtgatcatggatgatgcaaaggaattggaacctctgaacttctattttgcttccatctagaaaaatggagttcaatcagtacaaagtaaaacatacacaattaagaagtaattgaaatggatgagaatttattgagagcccttgacttttctaaatgagtttaaagaattttagagagatatgctctttaaattattggaattggtaatctaaatagtaaaagatgaaagagaatggatccaggaaactcagtatgagttgatacgtggcaaagtcttaaatatggaagatttgttaacacctaaaaaagaaagctccagtcacttgaaactggcatgcatttattgaatcaacttatatcaaattactcttatttgtaaaatatttagaagggctctagggttaaaaaattttggcagtctctcaaattcatagaaacagtgtacatttgacccttgcacaacacaggtttgaattatatgggtccactttgcaacaattggaaaaactcaaagatgaaccatatagcctagaaatactgaaaaaaattaggtaaaargtatgtcatgaatgcataaaatatatgtagatattaatctatcattactaccatgaaatatacacaaatctattataaaaagttaacatttatcaaagcttacacaattacagaccatgcatgacaccacttacagttgatagaaatttaaacaaatataaagatgcagtattaagtcataactgcataaaattaactgcattacatactatactactgtaataattttgtagccacctcctcttgctattacagtgagctcaggtgttgcatgtatctgcctagaatgccataaattgcatattgcagtaaaaagtgatctctaatggttctcaagtattttgagtatttttcattgtgtttagtacaacactgtaaactttgaataacaacatgggacccattcaaagtaccacgagtgatattggaagtgctctcaagaagcagagaaaagtcatgactcatgacattacaagaaaaagttgaattgcttcatatgaactgtaggttgatgtctgcagcggtggttgcccaccacttcagatagatgattcatctcatagatggggatcttgcaaacttaccatatcgataaatacagtacagggttataaatgtattttcacttctttttgattttcttaataacattttcttttatgtagcttactttattgtaagaatacaccatataatacatgtaaaatagaaaatatgtgtaaattgactatgtgtgttattggtcaacagactattagttaagtttttggggagtcaaaagttacatgcagattttcaactccgtggaggtcagtacccccaacttccatgttgttcaagggctaactgaagtttatttcatcaagagtttaaaatgttttttagttgtagaaaatttcaaacaaatacaagatgaagagagtaatataataaaccactgtatacttattacccatcattacaaactatcaatattctgagttttttttgtttcatctatcactttcctcccaaccatacctttttgctgtttttggaatattttaagcaaatctcaaatattatatcattttacttgtaagtacttcagtatgaaaaaaatgtatagcagagtctttcatgatatgcccaaagatgagttggagaaatagagattggataagaatgaactaaaaggattggtactaacataaaccatggccaaatcatgttgataaatagtttgaaatctaccttgaagaaaggtggtagggaaatatactacaagattctgtccttgttgttgtcttatgtggcacgatttatcaatgatatggccaaaaatttagaaagcatgcttagcagatttgctaacaatacrtagcttttagtgagactgcaatgtattacataaaaggatcaagtatcatcaggctggaaaaatgagctgaaaccataggttgacatttaattgatacacacaaggtgagattcctgacttggaggtagttcatgggaagatctgtaggttttactagacccgtagccctcagtatgagtatctaaaatgatgagtcatatttaaacagtgttaatgtttagtttccaggtgaagggctataataacttcactgtatctgctatattcagttcagagcaatgtattttgagaaggacattacaaactgaagggcatctagtggagggtaattagggtgacataaaatctgaaaatcgtgatatgtaaagaatggtaaatggaactggagctatttagcctggagaataggggacttgaggatggggtttatatactggcaacccatgaggacttgaaaaacaaatttttaatgaagtaaacaaattctaatttgctttgtagcttcgagctgggatcagagagtggaagttagaatgaaacagaacttaggtcaagatagattgctaacagttagacatgtctggcaatggcttagactacctggatatgcacttctgtcccatcagtggagaattttactgcagagggtaaatacccatcttttaaacaggattaccacttggaaggagttggactaagttagaggttcacaagggagaactttggctgtacattagaatcacccggctgggggtrgaggtgttaaaagtgaacagtgcctgggccccatgctagaaattctgatgtaattgtcccaggtgagactacagaaagtccccagggaactctggagtgtgtgaactctaaggatcctttcaactttgagatttttttttggtttgaaaaagagaaatcatgttcatggggggtattttagaagtcagcatggtggaaaacctgaagatgacagtgaagtcaggcacaaaactgaactcaggggagtaaagagaattgcttaagagagactaaaagtgccagagtttaccaggagacagagaagcttagaggagagggtgccttgcatagttaaaaaaaaacatcaaaagaagtgagagtgggaatggtattaggagaagagagcgtggctgaagaagatgggagtgtccatcagacaacccaccctgctttgcctgggactgagaggtttcttgggatacagcactttcagtgttaaaaccaggacaatcccaggcaaactgggatggttggtcacccgagtgccccataagaccctgtcaaaagacaaaattacaacaaatttagtttaaagatctcaataggctttattgcaattttagaattaggcaacacttcattccataaaacagagtaagtgttccaatgagttgaccagaggcagcaggctttctagacagagaaagggctgaagaaagcagaaacaaagaacaaaaagtagattggacatttcaaagttactttcattgtgggcatagggagatagaaagatggaaagataactgattggttaacatcgggttactctgttgtaagaattaaaacagagggaactgcwtgattgccagttgaagactgaaactggcctgttgggaaattaggctgttgcctctctctcctgatttcatggaagaccagataacaaactcaaggtttggagaagcagaaccttagataagggactctattttggtttttaggctggtctgttggggcctagtgcaggggtttagtccaaaacagtggcctcctataatttttgttgaacacccataaatgaaggcagcacgggaaagcatttgttatcctagtcactcttcctgcagagtaaagatgtgctctgcattcatctgaattcatggctttggtgtgcgtaactgcaaaagctgaaatgtcatgttcactctggccacgtattccactcatagtaccatacttgtgtgtccagcatcttgccagggtgctggtcttgggcttactatgctttctttggggtgccttgggattccttacgtcattgcttcctcccaacaccagctgaaacctcctgaagtgattttgaagcttgtttctttgaatagcttcttagcaatttcctcactgctatttcagttcccctcccaccattgtgtgaaacagtgccaaagaatttcattaaactggctgacttcaaggatggtgaactaggactgcktctaaaaagcaggctgatagtaactgagggaattgcctaataaggaatagacgggaggcatgctgcccctacataatctcttccttataaagagagaagtatggatgggatatgttgagttgtttataaaaaataatgaagggaaaatccccctaaaattatggggaaaaggcccctggttgggctttaagtatagagaataacttgggtagtcttcacccactgtatccctaaaaggcctcacaattgctcttcagtctctttctccccttctcatccgccattaattaggaggttacttatgtgtgttatgaattaaagcagtggttctcaaagtgtagtccctggacctgcagcagagcatcacctagcaacttgttagaaatgcatatgccctggcctcacctcagacttactgaatcagaaactctgaggatggggtcaagcagttgtaataagccttccaggtgattctgatgcaggtttatggttaagaattggattagagaaactatgtttttagaaggttctttaaaggagaagtccagggcctaccctctgacatggggctgaacaggaaagcagcaagcagaagaaaccagaactaaccactgagccacggtgggtggtggtttgacatttatgtgacaagacagttaatgtgacaggaaagaaaaatgaacagagaattgtgaaatcaaataggatcagaatgatgtcacagtggtcaatccaattaattcatatcattacaaaattagaaagtcactaatgactaatttctaatatatatctgcataaaagggcattgtatgatatgaattggatttttaagtatacagtattttgtttcattttggagacatagcttttagtaaaaacatgtccaataggttctagtcaatccttaattgaagctctatgttgacaggaaaatagaaactcattgaattttaaaaagatgatttggctactacagttttattattattattttttagagttctgtagcaaagaatcacagaggccaaaaatgtgaaaaaaaaagtcatatggcttaatgatctttgtaatcataaccctatcaaccataacaaaaacaacaatcataagtacagttgccatttatcgagtgcctactctgtgcagacactgctgagtgctcagcacgggggatgaagtcatggataagcagcagacatggtccttgccctcctacccagtgattcccaaccctggctgcacttggcaccagggagccattaaaaaatgtcagtgccaggaccccagcccccgagggattctgatttaattgctttgagatgggaccccagagttggcatttttacaaaggtctccagtgaacctaatgtatatatccggaattgaggactgctctggtgaaagacttacatatgtaaacaattcattrtaatagccttaagtgctatgaagaaaaagctcagagtgttgtgaagggtaccagttagtgtggggttcagggtagggttttctgaggcatccttgaggaagtgactttctgttgggatctgaagggtaaataggaaatagctaagcaaagaggatgggaagggaatgttctaggcagagtacataaattgtgctagggctctgggcgaggacagcatagtgaaatgggggctgaaagggggcaaacagtgaaggaaatactgtgattagagaagtggagacccagggaggggccagaacatacaggacatacgggctagataaaggattgtgttctttcttgtaagtaatgggaagctgtggagtattctaagtaactagtggatgatgtgattatatagaccctttgagaagattactctggccgtagttggaaagcagattgatgataggtaagagtggatgcagaggaatcagttaggagtcttctgtgggagggcatgatgatgggactaagaagacattagagtgatggagagggttacatggcattgaatttttgggagattccaagacttggtacaaggcctcagggacatttgctgagttagtgagttgcttggatataaagggtgagggtggggaaggaatacaggatgatgctgctgttcttggtgtcagtaactggatgagtggtgatgttcactgagctgtgaatattgagttatagaaagctacaggagaaacagttttgcagaggaaaggagagcatgaattctgtttgggcacaataggtttaaggtgcctgtgagatatccaagttaaaaggtgaaggaggcagctgaaagttcaataatacatatgtctggaccaaatatatagtatttcccacgtatggacagtaactaagaccatggggtccggtgagatcactctaatcattttttcatacagagctcactgcgtcttcatgtcaacttacctaaataagttacgtctttaaaattttatctagaacatgaaaatttagacaggttaaataacttccccaggtcatgcagctagtaagaggcagggttgagatcccatttcataggagatgcatcagtacctagtcatactgcatttccttaatcagaatgactgattctcagatacaatggagagttaaccatgtttgctaaggaacgaccaatgaccagctgagtgtatattttcttccattataaacatggcatttgagtctactattcttggaaagtcagtgaaaaaatatcccatggagtttatgattaagctctgagatccagattttgggtttactgcccaaacatctgtccccttgcttcctagaaaacatggaaactgaagttgaggttgcctggaagcttactaaaaatagtgagaaccatggaattgagaagttaaaacatgtttgaagtagtcaaatatatacctccacttttttgatggaaaacgttgtgtactaaaagtctaaatccatttcactcattcaactgacatatgtaacactgctataggccaaaccctttgctgggctctggagaggcactccttgttcttaaggtgctctgtctcataggggagactgacacaagttaaaggctattatagcattgtgagaagggtgctatgagaggattgcaaaggagggtatttcgtccatcattagagaaggggaaagcctttctcagaaagacttcctggaagtgataacacataaactaacaatttgagcctcaatttcttcataaggtagagttagttagataaataagagaggaaagaatactgtttcaggtacaagaaagaaacaggaacattttactataaggcaggaggataggaaaaaaagaccccatttagagaccaacaccttaatacacatgggttgtgtggttagatggttagcatggccttaaaattgttgctggagtttggcttttgagggacataaaggcataactgaagaacttcatactagttagggccacatactgaggtttgcatttttaggatgactatgttagcttttaagtagatgatgtgttggaaggrgaagtacctagaggtggggaggactctacagaagttattgtaggagtccagggaagaaatacagagagaaatggcctgggcatggtggctcatactggtaatcccaattatttgggaggctatggaaggagggtcacttgaggccaggagtttgagaccagcctgggcaacatattgagaccctgtctctacaaaaaaattagccaggtgcggtggtgcacgcccgtagtccctagctactcaggaggctgagacaggagaatcacttgagtccaggagttcaaggctgtagtgagctataattatgccactgcactccagcctgggttacagagcaagactctatctgaaaaaaacacaaaaacaaaataaggagataaacaaatagatttgagaggtatttagtgggtggaatcaacaaaacttggagattagagggagaagtgggaatatagggggacttagagggaaagtggtgatctttacttagccaattatgcgaaaagattaatttagagtgggtaaaaagttaaattttagacatggtgagtttggccatagaacatccaagcagatatgtccagtaggtgactagcattataaattttgagctcaagagaaaggcctgggctggaaatacagatcagggaatcacggccataaagactggggacttgtcatcatagagattaggaagttatcctcatagagactagggcattgtgttagtctgtttgcattctttaaaggaatgcctgagactgggtaatttataaagaaaagaggtttatttgtcttatggtcctgcaggttcagcctgtaacatggtgcttgtacacaagcagtatagtgccaacatctgcttctggtgagggcctcaggaagcttacaattgtggcagaaggcaatgggcatatcacatggtgatggagcaagagagaaaggaggaggtgccaggctcttttaaacaaccagctcttgtgtgaactaacagaacgagaactcgctcattactatggagaggacaccatgccattcatgagggatccacccctgtgacgcaaaaacttgccactaggcccaccttcaacattgaaggtcacattttaacatgagatttggaggaggaaaacatccagactgtgcatcatcgccatagagagtaggatgtcattcctatagaggttggggagttatcctcatagagattaaggacttgccatcctcatagtgagtagggagttatcaccattcagttggcatatgtagataaaatgagatgaaccaacatcccaagatggaacgctgtggatcattcatatttaaagggtatggtgtaaaagagaagctggcaaagtaggggaagtaggatggttattggaaaaacctggtgtcatgggagccaggaaaggagagtgcttatgtactaagatgtcaaatgtcagattgcacaagaaatgtagatactgagatgtgtccactggatttggcactatgaggttgttggtgatatttgtgtgaacagctttagtggaatgggatcaggagccagatacagtgggttcagcaagtagggaggtggagtttagaaaggcacttattgccaggagaattttaaaaaaaagcaagttagagaaagtcaagtaataagaactagtgtggcatggatcagctctctgggaatgctggagggagagaactgaaggggagagaagtggaataaacactataaaaagctctgagaagagaggatgtggcttcaccccacccaatcctgagagaatgggtggagggtaggcctaatattgtcttgttatccaaatattgtctttaccagctatcctttccctaaagatgggacaagccattcccagaggtcagttccaggcaacatgaccttcccagaaggtggggtaaaattttcctcattaactcatgtgttccccagagtctttgggtttttaggaatttctacaaagaatttcaaatattttacaagtcatttccaagtaccataatatattcttccttcagtttggtatctcaagcttttgttaaggtagagacacattttccttcactcagaacattgttgtaactctgaaggagaaaaggcatgtggaattactattgtctgcattggccttccttctgtggctgcaccactcctacttctgtgaatctgagcaaataagaaaacagaccacctgcatgtgagcaagaagcacacagattttgctgaatatgtggcttcagtggtcttcacgttgcttctgtgttctataggtagcccggttttatacagacagacaatctatttcacctgatggaatgaaaaggataagaatcatgtgaaaccaaacacataagagatggatgtgtaaggcataatacccatttagggattaacaatatcagctcattttttaaacttttaagctcaggggtacatgtgcaggtctgttatataggcaaacttgtgtcatgggagtttattgtacagattatttcatcacccaggtattaagcctagctcccattggttatttttccttatcctctctctcctcccaccttccaccctccaataggccctagtgtgtgttatgccactttatatatccatgtattctcatcatttggctctcacttataagtgagaatatgtggcatttggttttttgttcctgcattaatttactaaggataatggcctccagctccatgcctgttcctgcaaaggacatgatctcattcttttttatggctgtatagtattctgtggtgtatatgtaccacattttctttatctggtctatgattgatgggcatttaagttgattccgtgtctctgctattgtgaatagtgctgcagtgaacatatgtgtctttatgatagaatgatttatattcctttgggtatatatccagtaatgggatttctgggtcaaatgttatttctgtttttaggtctttgaggaatcactgcactgtcttccaaaatggttaaactaatttacactaccaccaattgtgtataagcgttsttttttctccacaaccttgccagcatccgttatttttttactttttaatgatagccattctgactggtgtgagatggtatcttattgtggttttgcattcctctaatgatcagtgatgttgagctttttttatatgattgttggccacatgtatgctttattctgaagagtgtctgttcatgtcctttgcccactttttaatggggttgttttttcttgtacatttgtttaaatttcttatggatgtcagatattagatctttgttggatgcataagttgcaaaaattttctcccattctgtaggttgtctgcttactctgttgatagtttattttgctgtgtatcgggggaaccagcccccaatatttcaacatacgttctttctattttccctaagtgttggccggtctgagaaataaagagaaagagtacaaagagagaaattttacagctggtcttccggggatgtcatcacgtattggtaggactgtgatgacgaccctgagccgcaaaaccagcaagtttttattagggattttgaaaggggagggggtgtatgaacagggagtaagtcacaaagatcacatgcttcaaagagcaataaaggtcacaaggcaaggcaaaattagaattactgatgagggcctatgtcccactgtgcatgcattgtcttgataaacatcttaacaggaaacagggtttgagagcagacaaccagtatgactagaatttaccaggctggaatttcccaatcctagtaagcctgagggtactgcaggagaccagggcgtatttcagtccttatctcaactgcataagacagacattcccagagtggctgtctatagacctatccccaggaatgcattccttccccagggttactccttgctgggaaaagaattcagcgatatttctcctactcacacatctatctataggctttctgcaagaagaaaaatatggctgtattctgcccgaccccacaggcagtcagaccttatggttatctttcctcgttccctgaaaatagctgttattctgttatttttcagggtgcactgattttatattgtttaaacacacatgttttacaaacaatttgtacagttaacacaatcatcacagggtcctgaggtgacatacatcctcagcttaagaagatgacaggattaagagattaaagacaggcataagaaattataagagtattgattggggaagtggtaaatgtccatgaaatcttcacaatttatgttcagagattgcagtaaagacaggcataagaaattataaaagtattaattttgggaactgataaatgtccatgaaatcttcacaatttattttcttctgccttggctccagctggtccctctgtttggggtccctgacttcctgcaacagctgtgccgaagctttttagttccattagataccatttgtcaatttttgcttttgttgctattgcttttggtgtcttcctcatgaaatctttgcccattcctatgtctggaatggtattgtctaggttgtcttccaggatttttatggttttgggttttacatttaggtctttaatccatcctgagttaacttttgtatatggtataaggaaggagtccagcttcagtcttatgcatatgtctagccagttatcccagcaccatttattgaatagggaatcctttccccattgtttgtttttgtcaggtttatccaagatcaggtggttgtagatgtgtggccttatttctgggtcctctattctttttatttttatttattttttatttttatttatttatttttgaggcagagatttgcttttgttgcccaggctggagtgcaatggcgtgatctctgcttattgtaacctctgcctctgggttctctattctgttccattggtctatgtgtctgattttgtaccagaaccaagctgttttggttactgtaaccctgtagtatagtttgaggtcagatagcgtgatgcctccagctttgttctttttgcttaggattgccttggttatttgggctctttcttggttccatatgaattttaaaatagtttgttctagttctgtgaagaatctcaatggtagtttaataggaatagcattgaatctataaattgctttgggcggtatggccattttaatgatatggattcttcctatccatgagcatagaatgtttttccatttgtttgtgtcatctctgactttttagatttattctgatccaaatgtgagtgaccatggcctgtcagccctcgggaggtcctgagaacatgtgcccaaggtgatcggggtacagcttggttttatatattttagagaggcatgagacatyaatcaaatacatttaagaaatacattggtttgtttcagaaaggtaggagaactcmaagtgagggctaccaggctataggtaaatttaaatgttttctgtttgacaattgcttgagtttgtcaaaagacctgagatctataaaaaggaatgttcaggttaaagataaatgattgtggagaccaagttttattttgcagaggaagctctcagatagcacacctcagagagagagagcaggttgtaaaatgtttcttttcttttcttttttcagggtaattagcatatccatgaattttttttttctgttttgaatgatttatttcccaccttctttttttaaaattatgcgttaagttctagggtacatgtgcagaacatgcaggtttgatacataggtatacatgtgccatgttggtttgctgcacccatcaactcatcattcacattaggtatttctcctaatgctatccctctccaaaccccccacaccatgacaggccccggtgtgtgatgttccccgccctgtgtccaagtgatctcattgttcaattcccacctatgagtgagaacatgtggtgtttggttttttgtccttgtgatagtttgctgaggatgatggtttccatcttcatccatgtctccgcaaaggacatgaactcatccttttttatggctgcatagtattccatggtgtatatgtgccacatttttttaatccatcactgatggacatttgggttggttccaagtctttgctattgtgaatagtgccgcaataaacatacgtatgcatacgtctttatagtagcatgctttataatcctttgggtattgctggtatagtttgaggtcagatagcatgatgcctccagctttgttctttttgcttaggattgccttggttatctgggctctttcttggttccatatgaattttaaaatagtttgttctagttctgtgaagaatctcaatggtagcttaataggaatagcattgaatctataaattgctttgggcggtatggccattttaacgatatggaatcttcctrtccatgagcatggaatgtttttccatttgtttgtgtcatctttggctttttagattgctgggtcaaatrgtatttctagttctagatccttggatcaccacactgtcttccacaatggttgagctagtttacactcccaccaacagtgtaaaagcattcctgtttctccacagcctcgtcagcatctgtcgtttcctgactttttaataattgccattctaactgatgtgaggtgatatctcattgtggttttgatttgcatttctctgatgaccagtgatgatgagcattttttaatgtgtctgttggctgcatagatgtcctcttttgagaagtgtctgttcatatcctttgcccactttttgatggggttgtttttttcttgtaaatttgtttaagttctttgtagattctgaatattagctctttgtcagatgggtagatcgcaaaaatttyctcccattctgtaggttgcctgttcactctgatggtagtttcttttgctgtgcaaactttttagtttaattagatcccatttgtccattttggcttttgttgccattgcttttggtgttttagtcatgaagtccttgcccatacctatgtcctgaatggcattgcctaggttttcttctagggtttttaaggttttaggtctaacatttaagtctttaatccttcttgaattaatttttgtataaggtgtaaggaagggatccagtttcagctttctacatatggctagccagttttcccaggaccattcattaaatagggaatcctttcctcatttcttgtttttgtcaggtttgtcaaagatcaggtgattgtagatgtgtggtgttatttctgaggccactgttctgttccattggtctgtctctctgttttggtaccagtaccatgctgttttggttactgtagccttgtagtatagtttgaagtcaggtagcgtgatgcctccagctttgttcttcttgcttaggattgtcttggcaatgtgggctctcttttggttccataggagctttaaagtagttttcttccaattctgtgaagaaagtcattggtagcttggtggggatggctttgaatctacaaattaccttgggcagyattgattcttcctatccatgagcatggaatgctcttccatttgtttgtgtcctcttttatttcattgagcagtggattgtagttctcttgaagaggtccttcacatcccttgtaagttggattcctaggtattttattctctttgaagcaattgtgaataggagttcactcatgatttggctctctgtttgtctgttactggtgtataagaatgcttatgatttttgcacattaaatttgtttcctgtgactttgctgaagttgcttatcagcttaaggagattttgggctgagacaatggggttttctaaatatacaatcatgtcatctgcaaacagggacaatttgactttgtcttttcctaattgatacttctttctctggcctgattgccctgtccagaacttccaacactatgttgaataggagtggtgagagagggcatccctgtcttgtgccagttttcaaagggaatgcttccagtttttgcacattcagtatgatattggctgtgggtttgtcataaatagctcttattattttgagatatgttccatcaatacctagtttattgagagttttcagcatgaaggtctgttgaattttgtcaaaggctttttctgcatctattgagataatcgtgtggtttttgtctttggtatagtctgttgatttgggatggagagttctgtagatgtctattaggtctgcttggtgcagagctgagttcaagtcctggatatccttgttaaccttctgtctcgttgatctgtctaatattgacagtggggtgtaaaagtctcccattatcattgtgtgggagtctaagtctctttgtaggtctctaaggacttgctttatgaatctgggtgctcctgtattgggtgcatatatacttaggatagttagctcttcttgttgaattgatccctttatcattatgtaatggccttctttgtctcttttgatctttgttggtttaaagtctgttttacaagagactaggattgcaacccctccttttttttgctttccatttgcttgttagatcttcctccatccatttattttgagcctatgtgcattcgtttcacatgagatgggtctcctgaatatagcacactgatgggtcttgactctttatccaatttgccagtctatgtcttttaattgggacatttagcccatttatttttaaggttaatattgttatgtgtgaatttgatcctgtcattatgatgttagctggttattttgcccgctagctgatgcagtttctttctcgtatcgatggtctttacaatttggcatgtttttgcagtggctggtactggttgttcctttccatgtttagtgcttccttcaggagctcttgtaaggcaagccttgtggtgacaaaatctctcagtgtttgcttgtctgtaaaggattttatttctccttcacttatgaagcttagtttggctggataggaaattctaggtcgaaaattcttttctttaagaatgttgaatattggcccccattctcttctggcttgtagagtttctgcccagagatccgctgtaagactgatgggcttccctttgtgggtaacccgaactttctctctggctgcccttaacattttttccttcatttcaaccttggtgaatctgacaattatgtatcttggggttgctcttctcgaggaatatctttgtggtgttctctgtatttcctgaatttraatgttggcctgccttgctaggttggggaagttctcctggataatatcctgaagagtgttttccaacttggttccattctccctgtcactttcaggtacaccaatcagacatagatttggtcttttcacatagtcccacatttcttggaggctttgttcatttctttttactcttttttctttaaacttctcttctcactttatttcattaatttgatcttcaatcattgataccctttcttccacttgatcgaatcggctaatgaaggttgtgcatgtgtcacatagttcttgtgccatggttttcagctccatcaggtcatttaaggtcttttctacactgtttattctagttagccatttatctaacctaaggtttttagctttcttgtgatgggtttgaacatgctcctttagttcagagaagtttgttattactaaccttctgaagcctacttctgtcaactcgtcaaagtcattctccatccagctttgttccattgctggcaaggagctgcaatcctttggaggagaagasgtgctctggtttttagaattttcagctttcctgctctggtttcaccccatctttgtggttttatctacttttggtctttgatattggtgacctacagatggggttctggtgtaggtgtcctttttgttgatgttgatgctatttccttctgtttgttagttttccttctaacagtcaggcccctctgctgcaggtctgttggagtttgctggaggtccactccagaccctgtttgtctgggtatcaccagcggaggctgcagaacagcaaatattgcacmacagcaaatattgctgcctgatccttcctctggaagcttcgtcccaaaaggggacccgcctatatgaggtgtctgctggcccctactgggaggtgtctcccagttaggctacatgggggtcagggacccacttgagggggcaatctgtccgttttcagagctcaaacaccatgctgggagaaccactgctctcttcagagctgtcagacagggatgtttaagtctgccgaagttgtctgctgccttttgttcagctaagtcctgcccacagagatggagtgtagaggyagtagggcttgctgagctgcggtgggctctgcccagttcgcacttccaggccactttgtttacctactcaagcctcagcaatagtggatgcccctcccccagccaggcttccaccttgcggttcaatctcagactgctgcactttcagtgaacaaggctccgtgggtgtgtgacccgccaagccaggcacgggagagaatctccttgtctsccagttgccaagaccttgagaaaagcacagtatttgggtgggagtgtcccgttttccaggtgtaatatgtcacagcttcccttggctaggaaagggaaatcccccaaccccttgtgcttcccaggtgaggcgatgccccgccctgcttcagctcaccctctgtgggctgcacccgttgtccaaccagttccaatgagttgaaccaggtacctcaattggaaatgcagaaatcacccatcttctgggtcaatcacactgggagctgcagactggagctgttcctattcagccatcttggaatggatccttctctgacttttttgagcagtgttttgtagttctccttggagagctcttcctgctttggctctcagcttgactgatgttggtgtatggagtgttagggagctttgcacattgattttgtattctgagactttgttgaagttgttaatcagcttaaggagctttggggctgagaccatggggttttctaggtataggatcatgttgtctgcaaacagggatagtttgacttcttctcttcctatttggatgccctttatttccttctcttgcctgattgccctaaccaggacatccaatactatgttaaataggagtggtgacagaggacatccttgccttgtgccagttttcaaggggaatgcttccaggtcttgccatttagtatgatgttggctgtgggtttgtcatagatggctcttattattttgagggatgttccctcaatacctaatttacagggagtttttaacatgaagaggcgttgaattttatagaaatccttttctgtgtctattgagataaccatgtggtttttgtctttaattctgtttgcaggatgaatcacatttattgatttgcttatgttgaaccaaccttacatcgcagggataaaggctacttgattgtggtggataagctttttgatgtgctcctggatttggtttgccagtattttgttgaggatatttgcatccatgtttatcaaggatattggcctgaagttttcattttttgttgcatctctgccaggttttggtatcaggatgatgctcatatgcctcgtagaatgagttagggtgaagtccctcttccctattctgggaatagtttcagcaggaatgataccaggtcttcattttttaccttgtagaaaaattgacatggcaagacagcttggtagacatgaaatcagaagtgggggagttagtttgattatcttagaggaggcattcttcatcactgtaggggaaaaaactttcaaggaaatggtgtacttgagtccacatgccaaggcaccttctttccccagaccatgctagagatactttgacagattattttagttgctttttttttttttaataattttgttgatcattcttgggtgtttctcggagagggggatgtggcagggtaataggacaatagtggagagaaggtcagcagataaacacgtgaacaaaggtctctggttttcctaggcagaggaccctgcagccttccgcagtgtttgtgtccttgggtacttgagattagggagtggtgatgactcttaactagcatgctgccttcaagcatctgtttaacaaagcacatcttgcaccacccttaatccatttaaccctgagttgacacagcacatgtttcagagagcacggggttgggggtaaggttatagattaacagcatcccaaggcagaagaatttttcttagtacagaacaaaatggagtctcctatgcctacttctttctrcacagacacagtaacaatctgatctctctttcttttccccacatttcccccttttcttttcgacaaaaccrccatcgtcatcatggcccgttctcaatgagttattgggtacacctcccagacagggtggcagccgggcagaggcaccccccacatcccagacagggtggccaggcagaggcgccccccacatcccagatggggtggccgggcagaggcgccccccacccccaagacggggcggccgggcagaggcgccccccaccccccagacggggaggccgggcagaggcgtcccccacctcccagacggggcggccgggcagaggcgccccccacctcccagacggggcggccgggcagaggcaccccccacctcccagacggggcagatgctgggcagaggcgccccccacctcccagatggggcggatgctgggcagaggcgcccccccacctcccagacggggcggatgccrggcagaggygctccccacctcccagacggggcggatgccgggcagaggtgctccccacctcccagacggggtggccgccgggcagaggcgctccccaccccccagacggggtggccgccgggcagaggcgctccccacctcccagatggggcggctgggcagaggcactccccacctcccagacggggcggcggggcagaagtgctccccacttcccagacggggcagcggccgggctgagatgctcctcacttcccagatggggcagtggccaggcagaggtgctcctcacttcccagacggggcagctgccgggcagaggtgctcctcacttctcagacggggcggccgggcagaggcgctcctcacctcccagaaagggcggccgggcagaggcgcttctcacttcccagacagggtcgcagtcgggcagaggcactcctcacttcccagacagggtcgcggtcgggcagaggcactcctcacctcccggacagggcggccgggcagaggcgctcctcacctcccggacggggcggccgggcagaggcgctcctcacctcccggacgggttggccgggcagaggcgctcctcacatcccagacggggtggtggccaggcagaggcactcctsacctcccagacggggtggcggccaggcagagacgctcctcacctcccagatggggcggtggctgggcagaggtgctcctcagttcccagatggggcggctgggcagaggcactcctcacctcccagacagggcggccgggcagaggtgctcctcacttcctggacagggcggctgggcagaggcgctcctcacttcccggatagggcrgccgggcagaggcgctcctcacttcccggacagggcggccaggcagagacgctcctcacatcccagatggggtggtggccgggcagaggcgctcctcacttcccagacrgggtttagttgccttttttattctatgtagatgaccccatccccaccatattcacataytccttcttcactcaggtacaaaattcagtaggacacsactttctgagtcatatgctggatttgaggagatactgaagccacaagactgaaataacttttaaactgtgggtgatttggctaaaagctactctcatctattatatattcatcttactagttttgctctcagaggaagttcctgtttccaaggtaaaggaacctttctctaactccacctaccttcctcctcactaaatgggtacagaaaatatgcttagaaaaaaacgcagaggaccctgatattgtcattctgaaatatcagtagtatctgtcacattttgacaggaactagatactaatcaatttataagattgagttttcatgtttctaaagtgcagatactctgtgttgatggttaaagagaaagccagctggttaggtgtcagatgatctctgacagtgttaccatagacatttaattgcatgaccatatcttatccagatggcatttctcgcttacacagatacataaccccagaggggcagagggagagatgtcaaatttccctcaaaatagaactttgagtccacccaaagtctaccaagtgagactttacaattctgcccaaagagtacagaaattacattgatctggcaagaaagaatgaatgggaacccaaaggtagctgcttgagttaatcaggttggtgagtggctgacagggtgctagagtgggcaaagtcaacattaaaccaccagcgcacaacttcctatgtacccaatgttcaccttcccagctcctatcatctttgccactttactctgaactggaaaccctctgtacattttttcctctttaactcaaagcctttagaactctcgagctcaagcagtcccctcctgcctcagcctcctgagtagctgggaccacaagcacacgccaccatacctggataatttttaaattttttgtagagatagggtctctccctatgttgcccagattagtctcgaactcctgggctcaagtgattattctgcctcggcctcccaaagcactggggttatgacccaccacgcctggccccacatcttgtttttcacataatgaaatgttttgaagacagtttgtgtcaacattcatagatctagctcagtctttttcatgtctgcatagaattatgtattatgaatgtggtagaatttatatatccagacatcagttgatggacttttagtcatttttagtcttttgccattacaaacaatgctgcactgaatgtcgctgtctatgcaccattttttcacatattcataagtatatcagcaggttaaatttctagaattagaattcttcagtcaaaggatatatgtgctttaccctttgatagatgttactcaattgcctccccatcaaagaggttctacaaatttttactcctacaaacatacaagaagtatctgttttcccacatctttgtcaacatatataatttctttactgaatttacagtaaaattcactttttaaggtgtaaagttctatgaattttgacaaacatataaagtcatttaaccaccatcacaatcaaaatctagaatatttctattatttccaaaagctcctttgtggccctttgtagtcaatcctctgtgcccatcctgagcctttgcctactgatctaatttctgttcttagttttgccttttccaaaatatcatatcaatgaaagcacaaagtaaatagcctgtttgagtctggtttcttttacttagcataatgcttttgagattcatacatattgttacatttatcagtagtttattccttttccttattgctgagtagaatttcattgtatgattgttcccaatttgtatacatttgccagttgctagcatttggattgttttgaggttttggcaattatgaataaagcagttggaaatatctaggtacatgtctttgtgtggacataggtctttgcttttctcaggtaaatacctcagtgtgggattgctcaattttatggtgagtttttatttaactttataagaaactgccaaacactttctcaaagtggctttgttatttcccatccctagcagcaaggcacaagtgtttcagttgctctgcattcttaccaacatttcatattgtcaatatttaaaaaattttggccattctaataagtgtatagtgaatattatgtatttatcaaactttaaaaatgttgctattctgaaaattatttttttcatttacatttctttaattaagggtagttagaatacatttaatatgttgataacacatatttctttttctttgaattgcctattcatcttctttgccatttttctattaggtgagctgatcattttcttaatgattttaaaatgacgcttatatattagtgaatccaactatttcataattgttgcaaacttttgtcattttttactttgatttgttaacttacagaaatacaatttacaaattttgaagagaagaggagactttatttcttataaaaggttacagcctgcaggatggccattttgacaggttgggaagtatagcctccagtcagaagccagaaacatatctggagggaggggcaaagggaacaggaatttacacagagctggtggccaaatatacatattcaataagctatagaaggagtcatgaatatttatgaagggagaaccatctgcatgtgtaattgagccttctgcttctccatgttcaaaaaatggtggtgaccttaggtggagtttttggccctctgacatcaaaacatgaagcagaggatgtgaaaacactagctgcctattcttcatagactggccagaaccaccccatagttagtggtctcttatcaggcagaaaagatggggcagcatcagggagtcggttgatatcagtggtggagccttttgaaagggctggtttctgttaggcccttgagaaggaaagcctactcctggttagcaagggagagggtctgagcccctcccaccctccattccatcttggccgagaacgcagttttcaaggtttctctggggtccccttggccaaaagatggtctggtcagttggggggcttagaattttattttgtatagcttatagcacatttttctatagtaatatttgtatgtaacctctaaattttgtacctcattggtgcaaaaataaggcggtataaatgagagagtttataaaggcaaggtatacaagacaagactataaggctaggcaccctggttgagtcagttcaccctgcttccactattatccagcactagagatgcatggccaatacagattttcttgcttattctcaccatctgcaaataaccaaggcttgttgacaaatgcagctgctttgagaaagggtagagtccccagggcacaatttttcaatttcagatgtggaagaagactcgtttagtggaagcaatgcgcttattgctgaggccatcaatataccagattgttacgccttttggctgggacacagggaattcctgtctgcagagtcagtgacatcactttgccggaaacagccttcctccctgccaaccctacacttaaacatgggattccacactgaccacaaaggcctattattctcaatgcaatctatgggcaaaagaatttgagggaggctagaaggggtgggggcaagagagaatggatggtttggttggaggaagtgagaagaatcagggaagaggactcttttgcttcctcatttcccatacatagagcctctgtcascatttgatttttgcgatcattaacatttttagagtcaggtataaccaagtgcaaaccagttatgttagttacatgctgctaatctgagaagagtgtgttgcccaagaactgtgggtggggagcctcaggttggctgaatctgatttgcaggaagagcttgttctgcacccccacccacatctacactatctggatgtcaccaaataggctctccccacccaaagctgagtctcaaggggtccactcagtatcagccaggctacgttgttaagataaatgcaattgttttctaactaagaagctgtgaaccgagaataattggctaattaaaagttcaaagagtggaaataaaatagcattaaaaagagccagkwacttcctctgacgtctgtggttcaagagatcagtggaacaggacatgggttatttactcaattaccttgtctttctacctttcttttcattctcacccccaccccttcccttccttcttatttcctggctctattytcttacctgtgtctcccaacccaatgtccatctyatttttcctccttcttttttgccttttgccctttaactaactggttatcattgagatctttaggatcaaagtttgtctttagcagttgtgtttctattgatgtttgtgctgacttctttaagtaaaatataggcaggaaaaaacccgctaaattaaactgctttatccttgaatgtgactctggattggttaattggagaaatatggggttggggtagaataagacctttccatttagatagaattttggactagtgcttttgcattgggtcagctgagaaagaataaaactgaaaaatttctacgcatctctaatgcaggacaatgatttaaggcattgaagtggaactgagacacttggatcaaatccctgttctgccacgtgcaaggtgcatgacttgggcaagtcccttaagcttcctgagaaacacagtctcagccttttgtcacttaactgtaagcttctgactgtcagggatgagattcatgatttcaaaaggtaggacattggtatcctcagtgagaacagtccagacaacccttccagccaaatcctcaatgttggtcactttttatttctggataatgagattggctaccacataacagtactggtagcacagcccagacactgtatgagcctcagtcatgtattgtagggtagggtgctggttaaaagcctggaccttgaagccagaatgcccgtgtttaattcctggccctgttaccggtggcagctatctgagttactggcagtgtatccatacgggtctgcagtaacctcaattcttgcctcatcagaagaaagaatgtgagggatataaagtagaaaaagagactgagtcaagtttcagagcaggactggaagtttattgaaaaggctttagaayaggaaagaaaggagagaacccttggaagagatccaagtgggcaacttggagaacaaacaacgtgtttagctgtgatcctaggactttataggcggccatcttgagcccttttcccgtgattcttcccttagggtgggctgcctgcacgcacagtgccctccttacctccttgagcacacagtgtgtttaggaagttgtgtgcatgctcatctgaggctttctttccttttccggtggagtgctcccggcaagtcatcttccaccttttgtctcttaatgtgcatgcccaggaagttgcttctccctggtgcttgaattcaattaacactttaatgttacagctgtggatcagcagattttctctccctggctccagctgccaaattatcatttttagagaggcaatgtgataactgtcaaaccatcacctgatatttctagttggtgggggagaagagccctttcctgccatgtctgtctaactacatgtaacagcgcaacatttacatcagtgtaactttgggaagttacttaatctctctgtgactcagtttcctcatctgtaaactaacaataatgataattataatagtgactgtgagtgtgactttatttggaaatatagtagggtgttcagagatgtaattaagctaaggatcttgagatgaaatcatcttgaatttagggtgggccctaaatctgatgactggtgtccttatgagagaaaggagaaggaaacgtgacacaaagagcaacagggggaaaggccatgtgaagacagaggtggagattggagtgatgcagccacaagccaaggaatgctaagaagctgaaaaagacaagaaagacatctcctccagaaccttcaaagggagcatgcccctgctgataccttaacttttggacttctggcctccagatttatgaaagaatacatttctgtttgaagccagcaagttcatggtaacttgttgtggcagccctaaaaaactaatacagattttatagagaagatgatagtattacgtgcaccttataggattgtagtgaaggctaaattgatggctgcatttaaagtgctaagagtagaatctggaatatagtaagaactctttagtataggctattacgtgttgttagctcattgaaccttacatagcaaccctatgaagcagatactattgtgactcccattctgcccatgaggaaatggaggcttacagagactaagcaaaggtaagcttatctgaactctgctctagcttgaaccatcccccagaagtctgtggagtttgactaactgctgatggatcctgatgattgttggctcggtgacccttcctgatgatggtctctcagaaaagactctccagtgctgagccatcaagaagtctagaaggcattgagaaggctgtcwcatgtgattatgtttactcctcctggatgcgtctgcccagacctggttttggcacaagctctgctctgatggagccaggctctgtccacacttggctgtgtggcctgacctcatttgagtagcctcagcacatcattaccacaagaggcagggatgtgccaccctaaaaggccacaccctctctctccagtgacttcaacagcccccaatggttccttgttcacccctaagttgctaagcatagattatatgaatgactttagaagtaagtcacatcactcagaataaggcaaagccctcactagtgccctcaaggccttatgagcaggggaccccattgatcctctgaccagttcctactactctcccctcagggcctttctgtgtacagttccagatgctgtaaagctcttgcctcagaggtatgcaggctttctccctgtgatagaaatcaccttctcaggccagtcctaatcactgcatccttcctttttaccttccttgctttttcttcctcctcagcacttaaaattatgtaatacactgtaaattttgtttatcttgcttattgtatttttctcccaactagaatataagcaccatgaggatagggacatttctcactttgggttattgctgtagctcagagcctagggcaggtctagttcatagtaataatgtgttcaataagtaattattgagtgaccaactgaaaaaatgaatgaggcatagtcccctctccaacaactwtagaactcccaaactgaaatggttcaagctatatctagaggtagcacatgaagagaggactactgacataactgagctttgtagagtatagggggagcatagcttccaactgagcttgattttgaaggagacaaaaagacttggagaatgaggggaatggaattacaaatgaaggcgtcccacactgagaaaagttcagagaatccaaaattcattcattcattcattcattcatacaacatgggatataccaatgaacaagccagaaaaaagtccctgccctaaggagcttacattctagtagtcataatgtcaggaattctcatcttggacccaaacagatctgttggttggaatggtaaaatgggaagggctgaaatttctgaagggcttggaggtctaggtagaccagtgtagctttcatctggcacacagcaggacataggttcttgataaggtagagtcttaggaacgtcaaytgtggaagatttctatagccacatgaaggagggattctgatagagaagataattaggaagtgtgggagtcaccagaaagggccattgtagaagatcagatatgaggtaagggtgactggaatcaggggatgtggatatcactatagaagaaggtgggtctaaggggcttgggatgaaataactgagagaggatcttcaagcccctgagtgtgagaacaacctacatatgtgtcctcaagaagagttccctgatggagaagaaggaaggtagcaggggtggtgtggagactttgactctgtgagttggaggaacgacaacgccagattaggaccagtcttctgagcttcagtgattgttccatcattaggctatgtaaacacaggaaggaccacaacattccttgaatgtttgctcaccaatgcttgtccacatttgctgttttgttctctatatgacaagaaaagtttagtccagatgtgactcataacaaattggaaacaatttgaatctagtcagtcacattggatctgcaaagcaaaacttttttttgcctgaaatccaccacatctgtcaacaccccaaatctgtttattaatggagtaaaattttaagctgttatatttttgttatcacagagtagcaatgctgggatttctctatacaacagaattttgactatggacaaaattaaataatttgtttgtttgttttggagacagggtctcactctgttgcccaggctagagtgcagtggtgtgatcttggctcactacaacctcggtgtcctgggctcaagcgatcctctcacctcagcctcccaaatagctgggactacaggcatatgccaccacgcctggctaatttttgtattttttttgtagagacagattttcaccatgttaccccccagtctcaaactcctggactcaagtgatccgcccacctttgcctcccaaagtgctgagattacaggtgtgagccactgcaccctgccragattaaataattttgattttcaccttagtatgattataactggacatcatgatggctgtttctataagaatcaaaagaacctttgcttcctttgattcttataaaagtcttgaaggtatttttcctctgacacagctaattggcttgaaatcagcctgtgttttttcaaagcttgggtttccttcagttttatctctctgtcaggtgaagagttgaagttaatattaccttgctctctcactttaagctgaaaattcccctcccttgtcacatcacatgaaaagaaaaaaatgcaaaggaagtggccgtcttaaattctccagtacagtaagccaattcaaagggaaaacaatgacaacactttgccattggatattttggtaaaatcatttgttgaaattctgtttcgaaataccatttcacattgtatgacagaaaccacatttctgttatccacaaggcaaattaagggcttttcagggggaagacaatcaatgtgaattttccataatagagcttgactgtggcagtcatgggatctgaaagcactctgggggtctaagaagaaggggcagttacctaagtaattctctttttatgaacacatccaagatatgtcaacctgcaccccacctctagcacctcttctttggcaccacttctgagatgactctcctgcttcctggatgtgatcagggcttttgaaaactggctgacatatagtccatggaagatagcattttaattactgctctctgggtaatgtagtcagttacatgaaaaacaaacttaaccattgtgggttcttttggtaataaaaacatttgaaaaatcatgtatgaaaaattcctaaattttctctctgacctaaaaatctttttcttattatatctttaataagaaataagagtaggatgaaaggcttgcatatattctggtaacctggatatcattgcaaaagctgggaaaatgtggaaaagtgtacatctaactcctcaatgacaagaagaagttagtaaattttctcgttaggaaaaggaagaaataattatagtcacatcaagttggttcccacctctgggttcttgcagtttctgttccttcttcctcttatgttcttactccctctccaggctggtgttttctcctcaaatgtcaccttcaaggtctcggctcaaatgtcatcttctgagagaggctttcttgaccctcaatctgatacctttcccttcattcccaattctaccgcaagtcactctatcaagttccttggtttgaatttcttcttagcacatattgtgacctgaaatcacctatttatgtgcttcttttctggtttatctgtcttgctaactagattgtaaattccaaagagcaggggccttatcagtttttctttttttattgtagtaacttggatgctaagaatagtgcctgaaatggccatggaaggaaaatgagattgcaagattgtcatatttacaaaaacaaaagaagttaacaagtagaccttgttgaatagcttgagggagtaaaacattcaaaattttattatggtagaaacattgctacagtttgtttgttgttatatttataattggttgttttatttataattgcttatctaaaggacatgctgcttagggctgtgtttgtcaacatcacaacgttgggaaccaaagtggggtgcccttagagggttcttttccagattccagaacrctggcatcaaagaggacatctctcccataccagttttatccagatgttttagcttcaagtagttaaaatcctgactctaattgggtcaaagcataagttttatggaaggatgggctcagcatttgttgatttagcagcttaaaatgccatcaaggactcacgttctctacatctctctgctctgccatcattgaatgccatcccttccaggcaggacaatgtttgaggatgaagagagaatgttttcttttttccctagacttgccccagaagacttcctccacggtcacatgggccataattaggtggcatacccattattaaaccagtcactggtgagggaatgaaattacacagacaagtccatccctgagcttgggggaaaggcaagcatctgaacaaaatggagtttcttttgggaagggagaagcagggaagtgctgtgtatttcayctgctcttccttgtttggaagcaatagataatgatgttgctaaaactttttctcctaaattttgtattgtttggtctgatgggtaaagactgcctcaagattctggggattgaggtggattggagacccataccttaatccaagcttagacttggattaagttcaagcttctgctcaagagcttcagagagagctcccatttcagtgcccagccagcttctacgtttgggaatagtttggggagttgagagaggaggaggttgagttgtcaaaatggagggaatggtgcaaccatttcatttcctgttcacttcctctatgcaatctgtttacatctgaccaaagtagcttttgccttttttttttttttttttttttgagagggagtttcactctgtctccaggctagagcacagtggtgcaatcttggctcacagcaacctctgcctcctgggttcaagtgattctcctgcctcagcctcctgagtagctgggatggcaggtgcacgccaccatgcccatctaatttttgtattttcagtagagacggggtttcaccatgttggccaggatagtcttgatctgttgacctcgtgatccacctgcctcagcctcccaaagtgctgggattacaagcgtgagccacggcacccgtttttggttattatttttttgagatggagtcttgttctgtcgcccagcctggagtgcagtggtgcgatcttggctcaccgaaacctctgcctccggggttcaagcgattctcctgcctcagcctcccgagtagctgggattacaggtgcccaccaccatgcctggctaatttttgtatttttagtagagatggggtttcaccatattgacctggctggtcttgaactgctggccttgagatccacctgcctcagcctcccaaagtgctgggactacaggtgtgagctgccgtgtccggccacttttgccttttatataattctactattggagcttttctaatgtcccatgacagaatgagactaaagacaaaataaataagataatatgaattatgatccaaaatgttcaagactcctcagcctctatgccattaccaattgcttactatgtaagggtggtttaaatgcaaggggtatgtatgtcaagccaggaaatgtcatggaatagtgggatttgttgtttgatgatacattcttaatactttttaacatcataaacattttgtggtagatttcaaaaatgaggaggggtattcttgttttttgttatttgttacttctaccttgatagatctgtgtgaactgttaaacagccaatttggggctcttctcactcctcattccatatctgatcactgacctagttttgtccttgccacagccactaactcagtcttggcctttgtcaaagtacaaacaaatccttttgttcttgaattatttcccaattactctgtaagtacctcattgataaaaaagattggcttttaatctgtctctgatgtctccaggtagccattacaagaccagacagaaaggggaggaaaatcagtgtttttgatttcttgttggtatttttttcttctgcttttggttttagagtctaacgtgaagacattttgctccaagaatatcctagccatccttggcttctcctctatcatagctgtgatagctttgcttgctgtggggttgacccagaacaaagcattgccagaaaacgttaaggtaagtcaaatatatctgtgtgtttgtgtgtatgtaagaggagatctgggtgggacagggggaggagggataaggtatgtagagcataggggacgagttgaggttctaacagcccaggaacaagtcaatttccactggattaggggagtaaaatggaaataggtgctcattctagaagagtaaatgccttgaatcattagtggtgggaagttaactgcctttatgattgtttagtaaactcattaaattgatactctagcagagatgaatgctttattcaccttatccagatctgtgtaatactatgccaagattctatattctagtatatttccacttcttcatcatgggtgaatcacaatactgcactctgttctttttacttcattattatcactatcaccaaaacaataacgtttattatacaactctgtataaagtactttggaagtcagagattgaggagaagacatgtttcttatctccagatatagtaaagaatcaaaatcaataaaagcaaatcagaaaacatatacgtgtatcaggtatagtcatttgaaatgaattcatggataggcagatttcttgtgacatttctacatttgaacaactagttaatatcattaaagatcattaggatcattaactttaatgtatttatgttttctttccagttcatcaaagtaaaatttcagacatgaatatctcacaagtactttgtaatatggtcattatattttttaatctgttaattaaaaagcatgtggtaaataaaaatttatactataaatacaccattttaaactttcactgaaattatagtaaacaaatatataagggcccagatgataccaatatgctaatatgcatgtatgtacacatgggcagtaatatatctagaagttaacttgaccatggaggcstgggaatacatgtgtasaagtatattctcttgtatttgaagatgttgaactgggagcctggaaggatggttgtgtatgccaggcctctgaaacttttgccatccacccaaatcactgtatagcagaggcgtgggtgtcacactggcatctttttgtcaagttcaacccagtggtgctgtgtacagcagtccctttgtcaagacagaaggctgatactatctcattgttaagggtcgcttgccttttaatgttgactgatgttgtttccttggcaaaacttcactcacagttgaagcctcatgacatcttggttccattatttgtttaccagctccaaaaatacatggttgccttcttaatttgacctttttacatgttcagtattgcatcattggagagggggatgcctaggaggcaaaatccatgacaaacttgagttatgttcccaagaatatgtgtggtcatggacgaccttccctcattcacagtggtctcctttaagtctcttgtgcttctgcattgttatatgggcctggcaaaatggaacaaggtctttggcattctttaaataaaaggtaggagtattgaagagcagtcattggcatctgaagtgaatctttttaataacatcactgatttattttatacaaagatagttttatatatgcaaactagccatttgttgaggttatataataattttagtaagattcctggcatatattgggggcaaaatatttcaggaacttgtattctggtgatggctttaaaccagatgtgctgtccaatttgatagccactagccacatgcagctctttaagcttgtcaattaaaattaaataaaattaaaaattctgtccctctgttgcactagccacatttcaagtgctcaatagccayacatggctggtggctactgtattggacaacacagatatagaatattgccttgctgtagaaagttctatkggacattgccactttaaagcatactcttgaatgataactctgaagtcattcaaaactaagtttaatgaatagggtgtatgataaaacattttataaaatctagaataagaaacaaaaaaactttttttcttgcatggtttgtaaactagtaccaggatcatcccaaatatcatgggctactaaactggtttgagtagtttattgaaataaatgtatttgcttccaaaaatgaccatttaaaagataacacttatttggatatttgtactgatacatgttttttgtttgtttgtttgttttttgtttctttgtttggggtttttgtttgtttctttttcaagatggagtctcgctctgtcgcccaggctggagtgcagtggcacgatctcggctcactgaaagctccacctcctgggttcacgtcgttctcctgcctcagcctcccaagtagctgggactacaggtgcccgccatcacgcccggctaatttttttgtatttttagtagagacggggtttcaccatgttagccaggatggtcttgatctcctgaccttgtgatctgcctgcctcagcctcccaaaatgctgggattacaggcgtgagccaccgtgcccggctgatacatgtgttttgagagcacacaatgacatgactttatgaccatacttcattcagcagttcttcattcattttttataaatttatgcatcgacaattatttattacactccagtctggctgacagagtaagactctgtctcaaaaaaagtaaaataaaaaatattcattgtctgtgttaggcactgggctacacaatagggaaggcagtatatagatatgactgagcttaccatctggggaagcaaacatatttaataacacaaattattaattgtaattatgataaattgccaccaaatgaaagttttggggccaggcaagtcttccctgaaaaaatgatactaaaataatatctgaagaatgattggaagttagctgggaaagacataggtaaagggtagtccaggcagggccgagcacggtggctcatgcctgtaatcsmagcagtttgggaggccgaggtgggcagattgcctgagctcaggagcttgagaccaccctgggcaacatggtgaaacccaatctctactaaaatacaaaaaattagcttggtatggtggcgcgtacttgtaatcctagctactcaggaagctgaggtgcgagaatcacttgggccccagaggcggaggttgcagtgagccaagatctgccactgcactctagcttgggctacagagtgagacgccaactcaaaaaaaaaaaaaaaaaaaaattccaggcagaaggaaagcaggtgcaagagtcctgaaacaagaaggagttggatatctcctaggaactagttggagagcaggagtgggccacgtgttatataaagatggggaggtacgtggtgcaggccctgcaagacaggttgaggatttcagttttaatcctaagagtagtgggaagctagtggtatgatcagatttgtttttgcaaagatcactctgatttcaatgaattagaggaggatgagatataggaggataccaggaagaggctacaagaaaaatgtggaaggagggggagcctttgggttcaatttttgaagaattgttttgagtgttggaaagccaatgggaaatgtcaagaaagcagttggataatcagatttggacctttcttttctaagcagatatctactgctgtgctcaataaaaatataaaacaagccaaattttaaattttcaaagagctacattttagaaagtagaagaaaagaggtgaaattaattttaataatatawtttatgtggcccaatgcatccaaaatattacctcaacatttcatcaaaataaataattgttggctgggcgcggtggctcacacttgtaatcccagcactttgggaggctgaggtgggtggatcacgaggtcaggagttcaagaccagcctggccaacatagtgaaatcccgtctctactaaaaatacaaaaaaaattagccgggcgtggtggtaggcacctatagtcccaactacttgggaggctgaggcaggagaatcccttgaacctgggaggtgaaggttgcagtgagccaagatcacgccactacactctagcctgggtgacagagcaagactctgtctcaaaaaaaaaaaaatttcgtttttgttttgttttgttttgtttgttttttgagacggagtttcgctctgtagcacaggctggagtgcagtggtgcgatctcagctcactacaacctctgcctctcgggttcaagcaattctcctgcctcagcctcctgagtagctgggactacaggcacgtgccaccatgcccagctaatttttgtatttagtagagacggggtttcaccttgttggccaggatggtctccatctcttgacctcatgatctgcccaccttggcctcccaagtgttgggattacaggcatgagccaccaccatgcccggccaaaaaaaaattgttaatgagatatgttacattcttttttcatactatcttcaaattttaacttatggcatatctcaattccaactagtcacatttcaagtgctcaattgccagctatttgttaccctggttaaatagcacaggcctagattaaagctatgtctctgatggcattgattgactgaagccttagaaatggatgaggtcatctaggatggggttataaaatgagaagagagtcaaggtccaagtcctgagaagctctatcatttaaagcaggggtccccaacccccaggccatggaccagtacagcaggaggtgaggaacacgcgagcgagcaaagcttcatctgtatttacagttgctccccatcgcccacattactgcctgagctccatctcctgtcagatcagtggcagcattagattcttataggaccgcgaaccctattgtgaactgcacatatgtaggatcgggattgcgtgctccttgtgagaatctaatgccggatgatctgtcactgtctcccgttacccccgtatgggactgtctagttgcaggaaaacaagctcaggcctcctattgattctacattatggtgagttgtgtaattatttcattatgtattacaatgtaataaaaatagaaataaggtagttcacaataagtgtaatgcacttgaatcatcccaaaaccatttccccctcctcaccacctctgggtctgtggaaaaattgtcctccaagaaactggtccctggtgtcaaaaaggttggagaccactgatttaaagggtgaatagggaaagaattcctcctaaggcataatgataacattatttagtgctttgcagttataaatcatttccacatgcatttccattttttcttcccgtgaatactgtgaagaatagaaggttatccccattttttttttttttttttgagacggagttttgctcttgttgcccaggctggagcgcagtggcatgatctcggctcaccgcaatctctgcctcccaggttcaagcaattctcctgcctcagcctgctgagtagctaggattataggcacacgccaccacacccggctaatttttgtatttttactagagacggggtttctccatgttggtcaggctggtcttgaactcccgacctcagttgatcygcccgcctcggcctcccaaagtgctgggattacaggcatgagccatcgcacctggccatgcccattttatagataacaaaatcaaagccttagatgttctctcacccaaggcagagggggagctaaaactagaatccagttttctgatccaaagactaatgttctttccatttgtcttagtgagtttttccaaacagcacatcctattaacagaaattgcatgcaggatgtttattttgggaagtgattccaaggaaacaaggaagaagggaaagagagagttaggagcaaattaccacattgggccactgaggcttgatcctcccagggaccctctcaagagctgtggagagtgaactttagaattgtctgccctggggatttatcccctggttctcattatctgttggtcaagggttgctcccatctggtgttaagtccctgtcacttccaggtttgcacgtgtgtcagaggggtcatgtgggtaccacaggtgacaacttaggcagcaggagagaagctgctgggcagaaatagagagataaggagatactgctggggctggartaaaaagttggccaagatgtaaaatggtcacaagaggtatctgaagtatcattgcacctcctgatttttgtggaggtgagggttcttcgtacaaataatttcaatataatagagatatattcatgcagagacagtgctatggaagcccagagaaagaagctgctaattgtgcctgtttacatggaggcttcacagagaaggtagccttggagctgagtcttaagtgctatggcttgaatgtttgatccctccaaaactcatgttgaaacttaatccccagtataatagtattaagaggcagggcctttaagaggtggtgggtcatgagggctctgacctcatgaatggattaatccattcatggataaatggattgagttatcacagggtgggttagttattattagagtaggtctgtattaaaagctagtttggctctcagtatgccccctttgccatgtgatgccctgtgccacctcgggactctgcagagagtccccaccagcaagaaggccctcctgagatgttgcctcttgaccttggacttcatagcttctagaactgtaagaaatacatttattttttaaataaattacccagtatcaagtattcagtgatagcaacagagaatggactaagacaaatggtaaggagttttctagaaagtgggataggacatgttccagacaaagattatatcatgtgttgaagagtgacagcttgaaatcatatgcaatccctggggaatcagcagctcagtatggttagattgttgaatatgggggcaggaaggagaggtggaagaggaggtccaagtctgagcttagtatttttggcttaaaagtgggcatctcatccattaaactgcagtggtgttcaagcttggatccatgttagaagcacctgaggagcttttcaaaaatatggctgggccccatctcaggtcaattaaatcatctttggaggttacagttaaataaaaatggttcaaaatattgtagatcaccgggcgtggtggctcactcctgtaatcccagcattttgggaggctgaggccggcagatcacttgaggtcaggagttcgacaccagcctggccaacatggtgaactgtctctactaaaaatacaaaaattagctgggcatgttgtcaggtacctgtaatcccagctactcgggaggctgaggcaggagaattgcttgaacccaggaggcagaggttgcagtgagctgagatcacgccactgtactccagcctgggcaacagagcgagactctgtctcaaaaaaaagaaaaaaaagcccagggactgatacgttctaaaatcttccatgtgattctaatgagtagttttgattgaagaccactgctttgaagggtttcatacaaggaagtgatgcccagatttgtgttcccaagattccttttggctggagagcagattagaggagagaccagttagcatgctcctgccatggtctaggcaaggcaggcgaggccagaattaaggcattgtctgtggggtaaggggaggggataatgtgaaagayacttgggttgaccagatctttgtgacaaaattcctttgaggaccttttaagattaagatggaacaggtaccttgggacggttaatgctgagagaaaactccgaatgcttctgtttaaagagggtggtggccacaagcctctgttggtgcaacttcatacatggaaagactttcagctgtcctgtactcacttcctctgatttgtcatccctgtcctcttgcagggatcattattctgcctgcctagagtacaacacaacatgggccatggactcacattgccttgggtttgaatcttcgctgtgctcttagggtcacaggagttaacctctctaagccttagtttctccacttgtatgatggaactgatgcttcttctcttgtaagattactgtgagaattcagtgggataaagtacatgcaaatatgagtccagagcagaaggcctggcccactgcagacactcagtgaytgataactcatgtcttatcatttttgcagcttacctgccttagtgacaaattgacagttatctttattttattcccactgttccccatctgacttgcccttgtctagcccatttcaggtcagcccacccatgctgatgatccagtcttgtcatcttcctgcctgacctagtttgggttcagccctgctggggagatagtgccctcatgcctgggccacatgtggcataacacagcaagaactctttattgttctgaaatgtttacttgcccagctacctaaaaggttataagcacattgaggacagggaatggatttcatttgtctttgtttgcattttatttattcattgactccattcattcatttaacaaatagccattgaatatcaactctattgtaggccctggcatatattagtgagcaagatgggcaaatttattatacccttgttttgaacttatagtataatgagggagataatcattaatcaaataatcataaaataaatgttaaattacagccagcacaacatctgatttgggtagttgctccagagaagtttgctgactctgaatagagaaagcaccttgaacagataaaaccgttccctccttgtatgtgaagaacccaggaccaacctggtagccaggcagtgtcagtgagggaagcagacctctgcctcagagttctctagagatcctagttccccactcttaccctcagagccttctcagtttgaacctccagagtgcagggcctcagaagctacatgtgttagcaggcatcctggggtgttctcatgccactgaagtctgtgaaccactgcctgtgagacacaatgagaacttaaaaaaaawtagccttaatgaactgaagagtcattagctgtacccaagactccccctgggaaagtacctttgttctggtggacctaggtggggcggtagctttgacgtctgcttggttccccacttccttgtctactcrtaactgaacastggcagttagtggttgtcagatattcttttagcacaaacattccacattttggcacacactgagtctctgtcacacaagcaccagactgacccaatgccaaacaactagccttcattaaacgctgcctcttctgtgaatgcaggctcagggaccagaccactttgattttaatcccagatatgctactttctagccgagactttgggcaagaaattctctctatgcctccccttatatgtaaaatcaagatagtaacagtacctacttagaatatggttgtgagaattaaatggaataatacaagtgacttaattgtcagagcgatgagcacatcagaggtcctcaatggagactacctgctttaatgaagatatgtcctatggaaggcccttagctattagtgtattatggtcactgaaccagtactctgcaggatttccagcttctgttaaagggtaatgacctttcctcatgcatctgctttttcaaaatgaacaaaagtgctgttcttagataagcatttgtgattttatctttttatggagactttggaaagatttgctctgatttccaacctcgaatactcttggaaaatatctgtattatttttactctattggattttaatgtgtgttttagaaaacaacatctgcagatagatggtgttgcacaacaatgtgaatatccttaataccacaaaactgcacttaaaaatggttacaatggtaacttttatgttatgtgtgttttacagcaattaaaaaataagacaataacagaactgtggtttgtattaaagatctagtaactctaattaaagaaaaaggaaaggaagaaaatggtctctaaatgtttataggccctactagcatctctgtagctaatctggtttgtttatagagtactagagtcttactcaaaattataagctttgtttataaacccaagctcactgagacagactgatgaggctgctgaagttaccattaaagctacaggaacttttaagaaagtttttgaagacacactgtgtctgaagggaccatgaaaagttartgatcatacttgcctgtgttaccagatgtcttagtctgttttgtgtggctgtaacagaatgtgacaaacttggtaatttataatataaagaacagaaattacttttctcacagttctggaggccaagaagcccaagatcaaggtgctggcaggcttggtgtctggtaagggcctggtctctgcttccaagatgatgccttgaactctgcatcctctggagggaggaatgctgttcctcacaatggcaaaagagtaggagatagcaaactcactccccaaaccccatttaattgtggcattaatccatttaagagggcagagtacttgaatacctaaatacctcccactagggctcacctcctgatgctgatgcattggtgatgaagttttcaacacatgagttttggaggggaaaacagtcaaaccacagcatctgtcttatgagctttttggggatggtgtaggacaactccagtggtactactttatattagacaatgaatattaacctcttttagggctggaaggaatttaggaaccatccagttccaaccccctcatttatccatttgattcaataatgatctgttgaattctttctctgtgcctaatgtatagtaggatataccatcgtggatgctgtatatactgtggtaaacaaagtagacctgccctcatgtagcttacaatctaataataaagatagatattaatcaaatagctgcataaatatgtaattacaccatgtggccagtaccgtctttagagggaaaatacaggcattctgatcaggagggtaggatctaaactcaggaggtcagagaaggctgagatgtcaagtgaagggctttctcggtaaaggccctggagcagaaaccatgagacctatgggcaactgcaagcaggccagttccaccagaggtgttttctgaatgagaagagggtgaaatattctacttctgtggagccaggaagcaggctgtctgatgctctagtttctctttctttctgcttctaaatagacttacccagaagcctggtactatgacatttgtgtaggtagaattgtttccatcctaaggagatatctgccccatatctatacggcctccagtctcagtgagcttagggtctgttgcgcctacatttccaggtcttcaccaaggcccctgcattggtgtttccatgaaccaagcaaggtcacttctactgttcctctttctggaccagcacttctatccatgcaacctagctcatgaagatcggttatgatcttcatgtgatcactgcactccagcctgggtgacagagcgagactccgtctcaaaaaaaaaaaaatttaaaaatttaatttatttttagactcatggggcacatgtgcatatttgtttcatgggtatattgcatgatgctgaggtttgggcttctaatgatcctgtcacccaagtagtgaacatagaacctgacaggtagtttttcaacctttgacctcctccccacctcccctcttttggaatccctagtgtttattgttcccgtctttgtgttcatgtgtacccaacgtttagcttccacttataagaatatgcagtatttggttttctgttcctgtgttaattcgcttagggtagtggcctccagctgcattcatgttgctgcaaaggacatgatttcattcttttttatggctkcatagtattccatggtgcatatgtaccacattttctttatacaattcatcattgatggacacctgggttgattctatgtctttgctattatgaatagtgctgtgataaatatacaagtgcaggtgtctttttggtggaataatttgttttcctttgggtatatacctagtaatgggattgctgggtcaaatggcaattctatttttagttctttgagaaatctctaaccttcttttcacagggctgaataaatttgcattcccaccaacagtgtgtaagcattctcttgtatgcacaatcttgccagcatctgttattttctgacttcttaatagccattctgactggtataagatggtatctcattgtggttttaacattcatctctctgatgaccagtgatgatgagcattttttcaaaagtgtattggccacttgtatgtcttctcttgagaagtgtctatttatgtctttgacccactttttgtgtgtttactctgtcactggttttttttgctgtgcagaagctctttagtttaattaggtcccaattgtcactttttgttttaactgcatttgcttttgaggacttagtcataaattctttcctgaggccaatgtctggaagggtatttcctaggtttcttttatgacttttatagtttgagggtcttacagttatgtgtttattctaccttgagttaatttttgtatattgtgagaggtaggggtgtagtttcatacttctacatatggttagccagttttccaaccaccatttattaaataggaagtccttttcccattgtttatttttgtcagctttgtcaaagatcagttggctgtaagtgtatggctttatttcagggtctctattctgttccattgatctatgtatctatttctgtaccagtaccatgctgttttagttatcatagctttgtggtttaaagttaggttatgtgatgcctctggctttatcctttttgcttaggattgccttgtctatttgggctcttttttggtctgtatgaattttagagtagatttttttctaattctttgatttctttgggcaatacgaygcattcaaaaaagacttggaaggaaataaataaaaataaaagtgatatctaattagtagaatcttaaacatctttttttacttcattttataagtgatatttaagaaacttttagtactcttaaaatagaaaataatattgaaataatcccgagggagtgtcagatctcttccttaccacctaaatcttactgctttctttaaaggatatactcatagggacttttggaaatatttaaatataagctacagagaaatgttgggtttctccactgccagactttgaggcattcactagctaatggacttttgagcccaggaggcagagagaacatgaacattctccagacttctgggaagctttatttactgaagcccctgtaggcctcgtactctctggaacatgcattggaaaatgctggtgtggtggaaagagaacaaaacgttgtggctacctgggctctgatggatgttgtaacaaagaaaggcaagctccccaaatgctcaaattgaactttcagtcaagctttatctgtctctcaagcagcaaacaatgccagttttttattctgcaagccattttagaagacaaaatgtttggcacagttgcacaggttagcatgctagtgtactgtgtacacaagatgaaatgtcttcaatttgtgttaaaatatgctttacccccttctcaaacacttgtcaaatgaaacgtagtaaaagtttttgtttctcaactacctcactgtgtaagtaaggccttagagaaaacaagctgacagaagcaagcctggttctttggctctatgggaagaatgactttcgtatcaacaatgttagaataaaatctgatcccagataaatgctgcttgctgcttctacctcaccagtttctgtcgtatgctgctgtggttggaacattttctggcaggaagaaatcaggggctctgttaggaaacaacagaattttctgccatgtgtaattcctgagcctctttctccactctgggaggtttctcaagggtccagtggccccagaccttagtcagtgttcctctctgcccacaatggccaccacctaagccatttcttggattcctttcactgcaagcctagctgcagaggagtctgtccagcttgcttccttgctgtgcccaaagccagcatacaggcccttttctttctaaaggcataatgctaattactggagggaatccccactgtgtgtaactaggaagagaacactgtggaggttatggcaggtcaagggtccttgcaaggtctgcacggtggtactccctggtctagtgaaatggagtagagtttgacactcaataggctctacttttagcttttcmtagtggtccagggaggtctcttaaatcctatttcttgtcttcttttctccctggagtctcttagattcatagcagatgatatatatacccattgccacctacattttcaggtcttcactggggcccctacattggtgtctccatgaaccaaacaaggtcatttctactgttcctctttccagaccactgcttctgttcatgcaacctagcttatatatgtagggagattcacacacacacacacacacacacacaccacacacccacacacacccacacacacagctaaattaagcatttttaaagtggcagaccatactttgaggtctgcagcttaaataagcagccacgtgacaagcgtctccttcttctcttcctttcgcttccccatttacttccctctatgtttcttctctaaggaagatttaaaagcacatgtgccatcatgctcttctcccaagttcatatcagatgtcattaatcaatcatggaattttttaatcctgagtaagcccagagatataaccaaagatgactatcagttgatcaaaatgggcattgagcagtttactcctggatagatacccccaaagaaatgagagcttatttcaacaaaatgaaatgcatatgaatgtttctggcagctatatttccagtagccccaaactggaaataacccgaatgtccatcaacagttgaatggataaaaatatagtatmtccatataatgaaatactttgcagtgatggaaaaagatgaactactgatacacacagtttgagttcatcttacatagtgtaaagtgaaagaagttagacataaaggaggcatactatgtgagttcatacattgcagttcaaaaacaggcagaactcatacatggtggtagaagttaagacagtggtaactgactgagaggggcactgggaagccttatgagggctagaatgtgttctgtatcttgatctgggtggtggttatatggatgtgcacatatgcaaaaatttattgaggtgtatgcctagtatttgcacactttactgtagctacccctcatttaatgtccttaaaagggggcaccaatttgaaaattattgcccagcccttgcttctatgtttctgtgtatagtttctgtttctagttctttctcctgctgtcatctgtccttcttctcctctgctgactttctttcctcctttttttcttcttttcatctccccctactcgtaaagctaaaaacatgaagtttaagtacatatattgtaaaatatattaaatacaattttacagttatattcataatttaaaagtgagtgtatttagtgtttttacacctctccttaaaacaaactctgcatttattgaactaaaattagatgaacatatttattacgtcttactggcattcaatggagtaactcagtggttcccaaacttatctgcacattagaatcatgtgggaccttataaaaattccaaagcccaggacacaataccacatcaattagatcacaatacctgggtctaggacacaagcatcagtagccattgaagctttccaggtgattcccgtatgattccaatgtgtagacaagtttggggactatagattaatggctttctattccttccatagtgtctcagctacttcagcatgtggttctgaatcttggctgcacattagaatcacctaagaagcttctaaacaatactgcttcttgggccctgttctgcataaggtctgaatatttctaacatgcaaacagcatgaagagccccgttctagcagggttgttgtcctggtagatcttgtgatcggagtgactccagtgccatcccctcaatgttcctctcaaatactttctcctcatgtttttgaaaattccagtcctttcttttgcaagcctaatatggagatgagtgatgtgatactgataagtttttggtctgtgttgctttcagtatgggattgtgctggatgcgggttcttctcacacaagtttatacatctataagtggccagcagaaaaggagaatgacacaggcgtggtscatcaagtagaagaatgcagggttaaaggtaagatgaagaccaagggaaggggaggccaacagtggggcatgagaacatgagaggtgtatgaccagtagaacacaagagaaaaaggagtcccacgcataggaagccaagtgaagaaaacagtgcagctgctgttgttatgttatcgttacagaaaacatattgaaatcagtcgttaatgatcaaaacctaagaataaacacacataaatataattaatagtagctcccatcaacagaacacttctgcatgctatgtacttagtactgaacatgtgttacttcagtataccctcataatctccctttgaggtatgcattattatactaattttttaaaaatgagggcactgaggttgagagaggttataccacttgtttgttactcaagctagtaagtgatggagctgcggttcaaaccaagttctgcccracttcaagtctgcatcttagccagtgcttctcaaacttgcatgagcttgttaaaaacacagatgatgggtcccatcccctagagtttctgagtcagcagatctggaatgaagcctgataatctgtatttctaagaagttcctaggtgatgctaatctgtctggttcagagatttattgctctcttaatctttgtaccctgatctacagcttggaagacatttttcaaagctttcagcttctgtgtaggcaggaaagaccaaattataggctcttagggctgggaaaaggaacttacagatcgtttaaattttgtttcacagagaaggaaacaaaaacctggaggattagtgccttgaaagtagcaacagaatagagacaagaatctaggtctcctaattacactctaggtttcctgctactctgagctgctgcattatatatcaataatttttttcttttaaggtcataatatgttagagtggttgacattcagctttcaatccctttacccagtaccctaccatgcaccattataccacartctctctgacttttatctctcttagccttttgagctgggaacccactgtttatttttagtcagactgatagcctagatcctagaagataattgattttcagtttgacagcctgtggaatccactaattttcacaggtcgtcaagaaagtagtagagaggagatatttccaagagagcaagtcattctacccagtagccccatcaatactgacactttggccccatctgagacagtacttctggcctttcttaaagcccaaatccctcattttattggcttttatttgacacactgccttccatttttaaaagttattttaatggccaagcacggtggctcatgcctgtaatcccagcactttgggaggctgaggtgggcrgatcacaaggtcaggagatggagaccatcctggctaacacggtgaaaccctgtatctactaaaaatacaaaaaaattagctaggcatggtggtgcgtgcctgtagtcccagctactagggtggctgaggcaggagaatcacttgaacccgggaggyggaggttgcagttagccgagatcgcgccactacactccagcctgggcgacagagcaagactccgtctcaaaaaaaaaaatctagcagatgtccttcttctgagacttatcccatgagcgtttggcctaacaatgaaggattcttccctctcaaaagagagagttctctagttaatcaaatatttaacaccaaattttctgaatcaaaacaattagctggtaacttagagctgattttctcatggttattaggctgtttgaaaacctgtgaatgatctggataacttatttgaataattatccttaaagcaattactctgctatgaagcactgatagtgtagatatttatcttaatgtgagatgaaagtgttgttataacttcaaaaagcttaaggaatcttggctctaatcctccatagcaacagtcggttttgctctaaaactggaaaaacagttttgctagggaggcaggatatcggagtggaaaagtcactgaagagacatagattctgttcctctttcttgtaacaggaagcaactccacctcagaaactttaaggtgctggccaggatcagataactagttagtggcagcttccatctttttagtaaaagccaatttgtctgmcgcttaatttttattccaagtgttatctttaggtcttttaggaactagtgtcattaattacagtgttctggaggaaatatcaaaaagcagctaacagagtagctatctataatatccccattaaagtctgagaatgttatgcaattgaatatgaaattgcgccatccagtggcagaattattgaacactgracagacccaacttaaagtctggaaattaaatcctctcaaggctaggtccagtgaattaccctctaagtacaataacctaatgtatagtacatcaggaaattgttttcttgtatttttttcaaaacaccatattttgatctactattgtcaaggtaygttttataatttttttttaaaagattgttatcttctacatyttttcctaggtcctggaatctcaaaatttgttcagaaagtaaatgaaataggcatttacctgactgattgcatggaaagagctagggaagtgattccaaggtcccagcaccaagagacacccgtttacctgggagccacggcaggcatgcggttgctcaggtatagcagcatgtagggaccaagagtatctgggagttaggcttggcagtgaaagagcctctgaagttatgggaaagggccacactccctaataccccaagttctacacacccaagtccatacttaagaaaggatattttagtaagtgaataaaatgttcaaactcttagtatatataggggtaggattttatgtatgttaaaaaaaaaagcccccttgtgcatctccctatgggggattcaaaggggaaggggcacagggagagaaagactgggcccgtatactctggggtttggggctacagatttaactattcaatatctgggaggaagaggataagaggagactcatagacatcccaggtcataaatattcacaactagcacatctttatatcacttgatacctgtgtgaattatttgttcacttgttcattcattcagcatatagtgcctgctctatccagaatatgaaaactcaaccctcaaggaaatcagtttcaatgcagggtgatcagtgttttaatagaggagtgctcagagctgctatgggagcacatttggccctgcccagggtgagaggaggtcaggaagacttagaggaagggatgcctgaactgaatcatgaaaaatgagttggaggatcggggaacagctttatcagcagaacagacagcatgcattcagtaactgatgtttattcagcacctattatatgtcaggcactgttctaagtactgaggatacaacagtgaacaggacaaagtctctgacttcatggagcttgtgttctaccggatgtgcaaaggtagggaagtgtgagaggcatattcagaggactgtaagtagttctgcatagatagaagataggtaagtagtgtaaaataataatgataataatagtagcagctcrtatttattgagcccktcctatgttcttagcactacgctaagcacttaattgcactgtcataacaactctatgaaattaacaattattaacaagataaggaagctgtggcttacaaatgttaagtaactcacccaaggtcacacacctgggaagtggtggagccaggattctgagtgggattctgaaaaggaagggtccaggtcacaaagtgccctatggggccatgctaggaagtttggagtttatcttagagatagtaggaarccattaaaggatgcyacacaactggtgacactggtagagaagatggattggaggggagaaaagctggggataaaaggaaggcagttagtaggtgtggacrccatttagatgagagatgacaggggcctaatgccagctggaaggtagcatcctctcgctcagagactcccagtgttgggtagcctagatcttggaagcaattgcatcccatcttcattaagacaaccctggaagattccttctttaggtctcaaggtctcaaacagacccaagaactgagctgtaatatgaggaakatttttcccagtctggcagcagaggagattggatatctattccaggtcatttgccacctggtttctactagaaccctaattaaaaacctggagcagagtctggccaygtaaccagctaggagccacccacagtggttaatatagcacacatcagcttcaggtatggtcatcaaaccatacccagctatcaccaccacagtaattttaagagcctttgataactttttgagccagggaacttcagaacaaaagtggtattttaaggaaaaccaacctatgaaaggattggaaggatgtggatttggagagagatgaacaaaatattaattctgcctcatccaaaaaaggggtttcttggacagctatgtgcgaagatccccatctcttcatttattccagggcattatggttcacttcttagtagcactgtgtggatgctgtagctgaaatgggtaatgtaatataattattaaaacaaaaatgataacctcagctcttcctttgtacaggatggaaagtgaagagttggcagacagggttctggatgtggtggagaggagcctcagcaactacccctttgacttccagggtgccaggatcattactggccaagaggaaggtgcctatggctggattactatcaactatctgctgggcaaattcagtcaggtgaatatctcacrgcatccatggaggtggctctctggaggccaatgccattgctatctcaggcagtacttgggtcgctagccagaatgaatgaatgaatgatagatggatggatggatggatgactggatgaatgaatttactctcacatttgtaagggtcaccagaggtataattctcttacaagaccttctactattgggagaataaggacatgtctttaccttagggaggcataaaggaaattaaaaatttatcwttaaaaattagaatagctaacatttgccttctgctatgtgtctcccgctgtgctcagcacttttcatgttttctctgattttatccttagaacaacactatgaggtactacatcatccccattttagagccccatatcgatgcctagagagggtaattagtctgcccatggctgtacagctaacaagcgactgagtgagaatttgaacttgaatgtgtctggcctcagacctcttgtttttaaacaccagttacactgcttctatgtccggcagtctgagctatgtcttygaagcccctcttttcttgctgataatctgttgtagatcaggagcctctagtgagctttgcctcacctttatgcccctgtttctttgccttaggaaatccctgactccaatagatactatgaaaagcagggtgtccagagacttctagcactggtaactgtactgtctttcagaaaacaaggtggttcagcatagtcccatatgaaaccaataatcaggaaacctttggagctttggaccttgggggagcctctacacaagtcacttttgtaccccaaaaccagactatcgagtccccagataatgctctgcaatttcgcctctatggcaaggactacaatgtctacacacatagcttcttgtgctatgggaaggatcaggcactctggcagaaactggccaaggacattcaggcaagtataactcaatccagacctgccccyttcacatctgcacctccagcccccacatcctgttgttttctgtttcaaattcagtagtttgtctgaacttggttattgtactttccaaacctttttaggcaggatattgaactacatctggttgacccctataaattgtttcagtcagacatcccctcccatgtttgtttactgcgttatctccacagacacaactgagatcttctctcaggaaataatttctccccctcgtggggttgataatgaaaattatgtggtagaatattgtttgttggagggggaattgcaatttataagctcttttagaccactttttaaagctccctttcctacaaactacaaaaaaacagagttgttagaaatgacctggagaggagaaggaaaaaaaaaaaaacacttcaggagaaacacaaaatgtatcaattgacacttcaaatcttgtcatcttgtccccagatgccttctgcattttgaagacaagaaaagttaaacacactttgggaggctgaggtgggtggatcacttgaggtcaggagttggagaccagcctggccaacatggtgaaaccccatctctactaaaaatacaaaaaaagaaaaaaaattagctgggcatggtggcacatacctgtaatcccagctacttgggaggctgagaaaggagaatcacttgaactgggaggtggaggttgcagtgagccgagattgtgccactacactccagcctgggccacagagcgagactccatctcaaaaagaaaaaaaagaaaagaaaaagaaaaagaaaacaaaagttaaacatactcaacatcatgtgagtaccaggcacaccctgacaagcaaacacaaagccaggatgtcatatccagctgttccctgtctccactgaaaggataacaagttctctgctctcctccaaagcattctctctggttttcaaaaccactaccaataagatggtcctgggagtagggggcgctgagagacatccactgagcctcaaagctccactaaccttcttatccacagcagcctcctttcttccctagtaggttgtgggttagaaattacttttttttgggccaggcgtggtggctcacacctgtaatcccagcactttgggaggccgaggcgggtggatcacttgaggtccggagttcgagaccagcctgaccaacatggcgacaccccgtctctactaaaaatacaaaaaattagccgggtgtggtggcacacacctgtaattccagctactaaggagtctgaggcaggagaatcgcttgaacctgggaggctgaggttgcagtgagctgagattgcgccattttactccagcctgggcgacagagcaagactccatctcaaaaaaaaaaattatttttcttggataggagaatgcttgaagaagaaaaaaaatttttttaataatttttaaattatgtaggctcctggagaactactcccaggcccaaatttttgacaaccttgagagtttccttgtgaatttgctcctgacctagatgattaggactaagcactcagggacatttcaaactaatggcatttctgggcccagttttaactacatcagcattctttgactagccaaatacatttatatctgataccacttctggtgcctgttacacaaatccatttttcatatttattcctaagggtaaaaaggcagggyaggacatattgattccaataccaagtggtgggatgttgtacagtgcctacatattgattaagtcagactgtaccttttgtatccaaagcrttcacacatgatgctttcaagtgatttttccattcaggttgcaagtaatgaaattctcagggacccatgctttcatcctggatataagaaggtagtgaacrtaagtgacctttacaagaccccctgcaccaagagatttgagatgactcttccattccagcagtttgaaatccagggtattggaaactatcaacaatgccatcaaagcatcctggagctcttcaacaccagttactgcccttactcccagtgtgccttcaatgggattttcttgccaccactccagggggattttggggtaagtttgtgaaatgatgaggtataggatgtcttgtttacaagttatagaatatgtgcctacaaaagatttaaataataggatgcatttttctcttacataatgtcttgaggtagatgattaggggttggttcttcagctcaactatgtcagaacttgggatcagttttttccactatcgttgtgatctttttgtgctaaggtatgttactgctccaagcaccatatcactaggtcactgcctcctttttggctctaggcagcaccttaagcccaggttcatctcctttctagtcaacaataagagtactgcctttccggaatgggggaggtcccaaagaggttagccccagcagtgtgggaaaactgactagggggttgtgcccaggggaccttgtgggacagacctcctacagccatagaacagccactctgatttggcatctcctttggccaagtgacagagcagacttcccagggctggggatgctaaatctgcctcttccttgtctctgcctgtccccagggatatctcccttcaggatgtcacgatgcttactgtgggttaagacaaagacaggtttcctgctagggaacccaggatgatggggaagctgattgtccaccttgatctcactttttccagtgtasaaattgtgagtttgggggaaattttccacaagcttggtgtcaggcagaatcgggggagaggtgacatggatgtggaagtttgattatcttcccgtctgcttggagttttttcacttctttgtggccccaggaactgtctcatcttcatatttgatttctgggatattgctggtgataatctcagtgctgtacatttgtttctggttgtctgtggttggggggcatgaagccagcttgcttccatgccgccattttggaatcagacatccaagcatcatattttctttcacatgcaaagccaaagcagraaagatgtttaaggttttccttgcacacatctcttgcacacacattttgcagaagtgccaactgacatcttttcagatcctgctggccagaacttggtgaaatatatactctaaaccaatctgtgataaagagaaatggattaatatagttagtttagactaattattgtttatcacctgaggagtcgtttttgaggatattgctttcctctacttgggtaaaatcaggacttcataagcgaggaagaagggggctagctatggggtatgtgcctgttagagtttgccataggtggcttctcaaatgttagaaggaggaggagcagcagttagatgacacagctgagggttttcctctataaagacatttaggaagtagaaactcaggaaatcccaaagaaacattgaagataacatcattgtcattatgttttgaagagttgggggattatttgaatcctagctccaaattccttattttcttaataactccagaataagataaaatatttgagcagaggcagaagagatggctcttaattgactcagtcttcaaatttcttattttggtcccagaggctgagcattattataatcatagtttagtagcatattgaaaaattagctaccatctgtcaaatgccaattattgactatgcactayatgtatattatctcatttattcattcaagatattcaaagaaacaaggcttttgcctgccttcatgctttctcccttttcagaaaacagatcagcatgtaagaagggaggttcagctcctcccctccaggaccccagcaagagagtttctcctaaggtcacctggcttggcccaagacaaagctctagaagagaacataggcactgtcgtaatcagatctgattctacttctggcttcttatgaactgtatgagctcttcattttcttggtctctgagaaaacaataggtaatgccatagatccagacttaccttaaccatggtccaaaccacagtctaccctcccctcaaggttcctgagggaaatacatgacaagacaatgactggcagagtaatatttggttattagttggctgcaaacccaaattcagaagaaactgaacctcacttgaatgccctgtggctgagctggcactggctcttcaccttggacttttttttgggccagggcccttgccttagattgaactccttgaagaggaaggagggtgccaccttggccaagggcctttttcattccagtcactgcgaggatgtaaatctaaagtcaatgaacatacccttgtgtcttgagtttgtaacttctcagaaagtttcacttcctgggaaacatggccaattcctgccttcaagcttgagcaaacctttcctccttaggggactgaaatttcttgcctttgaatgtgattcatccaaccaaagcagggagagataggggctggaaaagggtggaggagtcttgaactccccctggaggcttttctatttgatcccttagttcctcattgagattgttctcccagccttctgaacctcagtttggcagttcctgagactatcgcattgcctgcctctatgtaggatctttctcctctagatacagccctcagggtcaggactgtcctgtcccgatttctgcattggcagtttcattctgcttcagatttttgatgttttttgttttgttttgttttatgccctctgtaatgtatccctaagacctaaagtttttttgtctgtttcctcatctgtacaatggggacagtaatatctacctcattgatagttgtgagtcagacaagcagtgatggtctgggaaatgtccaacaaccaactctcggggaatggggagctgatttgtagcacttaccagtttccatggtgtaagtagttctaccacagcctatttcaagctatatcaacatatcaactggctcacaaaaatctggaaattttaagaatcagctcttgtgagtacataagaaagagtcagctccagcacaccactgtaaatagcaaaaagcgggcataccccagcaccacccttaaaaaggttaggtctttatcctagcagtcttcattctatgctgtccttcctgcagggagttcctgttatcgagtcctgcctcttgaagcatagctatgtgcaacacagaaatccagtttcattcccattctttccagaactagttagcctgggtgttctcaagccacagagaatttgttggggagggagtttttgccacagttgcattcagcactgatgatctgattcttagttggtaaatatggtattaaaaattgtcattgctttagtcagtctggctacactgtagccttggttgctaaacagaatccaatgttgtgggcaaattagaaacactaacaagaaagagggaacatctgtagggaattacttatgaggtaatttagaaattatttttaaagatcacattgtgctgtttatataaataagaaagggaagaaacaagttcaataggaaactggaattaaagaacattaaaaacacatttgtttacatatgtatacataaatgtgtgtatatttatatttatatttatttatatttatatttttgttggtacaaaagtaattgtggtttcagaccatgaattttatttttttaattttttttgaaaagtactaaatatataaatattcacaagttcaacaaaggagagaaaataacaccaataaaatccccaaaaacttaacaatacattaatctaggttggatgatcttttttttttaattatactttaagttctagggtacatgtacacaacatgcaggtttgttagatatgtatacatacgccatgttggtgtgctgcacccattaactcgtcatttacattaggtatatctcctaatgctatccctcccccctccccccaccccacgacagtccccggtgtgtgatgttccccttcctgtgtccatgtgttctcattgttcaattcccacctatgagtgagaacatgcagtgtttgtttttttgtccctgcgatagtttgctgagaatgatggtttccagctccatccatgtccctgcaaaggacatgaactcatcattttttatggctgcatagtattccatggtgtatatgtgccacattttcttaatccagtctatcattgattgacatttgggttggttccaagtctttgctattgtgaatagtgccgcagtaaacatacgtgtgcatgtgtctttatagcagcatgatttataatcctttgggtatatacccagtaatgggatggctgggtcaaatggtatttctagttctagatccttgaggaatcgccacactgtcttccataatggttgaactagtttacagtcccaccaacagtgtaaaagtgttcctatttctccacatcctctccagcacctgtcgtttcctgactttttaatgattgccattctaactggtgtgagatggtatctcattgtggttttgatttgcatttctctgatggccagtgatgatgagcattttttcatgtatctgttggctgcaaaaatgtcttcttttgagaagtgtctattcaggtccttcgcccactttgtgatggggttgtttgtttttttcttgtaaatttgtttgagttcattttagattctggatattagccctttgtcagatgattaggttgcaaaaattttctcccattctgtaggttgcctgttcactctgatggtagtttcttttgctgtgcagaagctctttagtttaattagatcccatttgtcaattttggcttttgttgccattgcttttggtgtattagacatgaagtctttgcccatgcccatgtcctgaatagtattgcctaggttttcttctagggtttttatggttttgggtctaacatgtaagtctttaatccatcttgaattaatttttgtctaaggtgtaaggaagggatccagtttcagctttctacgtatggctagccagttttcccagcaccatttattaaatagggaatcctttccccattgtttgtttttgtcaggtttgtcaaagatcggatagttgtagatatgtggcattatttctgagggctctgttctgttccattggtctgtatctctgttttggtaccagtatcatgctgttttggttactgtagccttgtagtatagtttgaagtcaggtagcgtgatgccttcagctttgttcttttggcttaggattgacttggcaatgcaggctcttttttggttccatatgaactttaaagtatttttttccaattctgtgaagaaagttattggtagcttgatggggatggcattgaatctataaattaccttgggcagtatggccattttcatgacattgattcttcctacccatgagcatgaaatgttcttccatttgtttgtatcctcttttatttcattgagcagtggtttgtagttctccttgaagaggtccttcacatcccttgtaagttggactcccaggtattttattctctttgaagcaattgtgaatgggagttcactcataatttggctctctgtttgtctgttattggtgtataagaacgcttgtggtttttgcacattgattttgtatcctgagactttgctgaagttgtttatcagcttaaggagattttgggctgagatgatggggttttctagacatacaatcatgtcatctgcaaacagggacaatttgacttcctcttttcctaattgaatgccctttatttccttctcctgcctgattgccctggccagaacttccaacactatgttgaataggagtggtgagagagggtagccctgtcttgtgccagttttcaaagggaatgcttccagtttttgcccattcagtatgatattggctgtgggtttgtcatagatagctcttattattttgagatatgtcccatcattacctaatttattgagagtttttagcatgaagagttgttgaattttgtcaaaggccttttctgcatctattgagataatcatgtggcttttgtctttggttctgtttatatgctggattacgtttattgattttcgtatgttgatccagccttccatcccagggatgaagcccacttcatcatggtggataagctttttgatgtgctgctggattcggtttgccagtattttattraggatttttgcatcaatgttcatcaaggatattggtctaaaattctctttttttgttgtgtctctgccaagctttggtatcaggatgatgctggcctcataaaatgagttagggcagattccctctttttctrttgattggaatagtttcagaaggaatggtaccagcttctccttgtatctctggtagaattcggctgtgaatccatctggtcctggactttttttggttggtaagctattaattattgcctcaatttcagagcctgttattggtctattcagagattcaacttcttcctcgtttagtcttgggagggtgtgtgtgtcgaggaatttatctatttcttctagattttctagtttatttgcatagaggtgtttatagtattctctgatggtagtttgtatttctgtgggatcggtggtgatatcccctttaccattttttattgcatctgtttgattcttccctgttttcttctttattagtcttgctagcagtctatcaattttgttgatcttttcaaaaaaccagctcctggattcactgatttgttgaagggctttttgtgtctctatttccttcagttctgctgtgatcttagttatttcttgccttctgctagcttttgaatatgtttgctcttgcttctctagttcttttaattgtgatgttaggttgtcaattttagatctttcctgctttctcttgtgggcatttagtgccataaatttccctctacatactgctttgaatgtgtcccagagattctggtatgttgtgtctttgttctcgttggtttcaaagaacatctttatttctgccttcatttcgttacgtacccagtagtcattcaggagcaggttgttcagtttccatgtagttgagcagttttgtgtgagtttcttaatcctgagttctagtttgattgcactgtggtctgagagacagtttgttataatttctgttcttttacatttgctgaggagtgctttacttccaactatgtggtcaattttggaataagtgtggtgtggcgctgaaaagaatgtatattctgttgattaggggtggagagttctgtagatgtctatctattaggtccacttggtgcagagctgagttcaattcctggatatccttgttaactttctgtctcattgatctgtctaatgttgacagtggggtgttaaagtctcccattattattgtgtgggagtctaagtctctttgtgggtcactaaggacttgctttatgaatttgggtgctcctgtattgggtgcatatatatttaggatagttagctcttcttgttgaattgatccctttaccattatgtaatggccttctttgtctcttttgatctttgttggtttaaagtctgttttatctgagactaggattgcaacccctgcctttttttgttttctatttgcttgatagatcttcctccatccctttatttaagcctatgtgtgtctctgcacacgagatgggtttcctgaatacagcacactgatgggtcttgactctttatccaatttgccagtctgtgtcttttaattggagcatttagcccatttacatttaaggttaatattgttatgtgtgaatttgatcctgtcattatgatgttagctggttattttgctcgttagttgatgctgtttcttcctagccttgatggtctttacaatttggcatgtttttgcagtggctggtaccagttgttcctttccatgtttagtgcttccttcaggagctcttttagggcaggcctggtggtgacagaatctctcagtgtttgcttgtctgtaaagtattttatttctccttcacttatgaagcttaggttggctggacatgaaattctgggttgaaaattcttttctttaagaatgttgaatattggctaccactctcttctggcttatagagtttctgccaaaaggtctgctgttagtctgatgggcttccctttgtgggtaacccgacctttctctctggctgcccttaacattttttccttcatttcaactttggtgaatctgataattatgtgtcttggagttgctcttctcgaggagtatctttgtggcgttctctgtatttccttaatttgaatgttggcttgccttgctagattggggaagttctcctggataatatcccgcagagtgttttccaacttggttccattctccccgtcactttcaggtacaccaatcagacgtagatttggtcttttcacataatcccatatttctgggaggctttgtccgtttctctttattcttttttctctaaacttcccttctcacttcaattcattcatttcgctagaccattcttaaaagaagatatacaaatggccaacaaacatgaaaaaatgctcaacatcactaattatcagggaaatgcaaattaaaaccacagtgagacactaccttactctcctgcaagaatggtcataatttaaaaatcaaaaaataatagatgttggcatggatgtggtgtaaagggaacacttttgcactgctggtgggaatgtaaaccagtacaaccactatggaaaacagtatagagactccttaaggaactaaaagtagaactactgtttgatccagcaatcccactactggatatctacccagaggaaaataagtcattgtatgaaaaagacacttgcacacacatgttcacagcaacacaattcgcagttgcaaaaatatggaaccagtccaaatgcccatcaatcaacaagtggacaaagaaaatgtggtaaatatatatatgkatgcatatatatatatatatatatacacacacataaatgtatatacacacactatggaatactactcagccataaaaaggaatgaaatcatggcatttgcagcaaggacacatgatgtattaagtaaaacaaagcagtattataaaaaatttgtctagtatcatcatatttaggttatatatatacatatacacatatataattatataaatatgtattcactattttctattacatatctatttgctatagatattaaacagtaaattgttaaaaagtgtacatctctagaggatggttagattaaggagggacttccatttttaacttgtattatttaaattctatataataaacgtgtttttttttaataagccagcattttaaagacatttctattttgaaggaaaagaaatgaatagggaaacttcatgttttgagaaataaataagagcaagattctgagatgccagagggaggcttctgaaggtcatgggaaatttttcaagagccgatggcatgtagtgtcttggggggttggaggtggcatggaccaggaggccctgctgacttgatcgctatgtatcctactgaaggctcaatatgttgctaaatctacctcatagaaatttgttgtttgttgatctgttttttataatttgtacttactttataaagcaaatgtcactacttagcaaaagcaagagagtttctagatgcttacctcattgagacttttgctaatagaataagctctaggattaatttcagaaagtcttttgaaatgtaacaatttaaggaaatatttattagtgctttattacatgctcattataaaaaaactgtacaaaaagcttaaagtaaagactaaaaggtctyttctccctctcaccccaccatcagttcactagaggaaaaatgaggaatagttgtaataaacaggaagaacttttccaggcattagctatgcgaatccaagcatatataaatttatccagatttaacagagattgttgtgccttaggaactagagagagagcagttttctgccacttatttacggagcactcacatatgccaagtgccatgttagtgagggcagattcaaccaagaacaagggaaattccgcgcctgccatcacagagttggcattctagaaagcaggcagacatgagaccagaaacacaaacaaaggcaaatccgactgctgcaaatcaaaaggaactgctggggcaggtcgcggtggcttacgcctgtaatcccagcactttgggaggccgacgcgggcggatcacgaggttaggagattgagaccatcctggctaatgcggtgaaaccccgtctctactaaaaatacaaattagccgggcgtggtggcaggcgcctgtaatcccagctactcgggaggctgaggcaggagaatggcgtgaacccggacgcagagcttgcagtgagccgagatcgcgccactgcactccagcctgggcgacagagcaagactccatctcaaaaaaaaaaaaaaaagtaactgctgggaggaaagagacagtcctgtgaaagcagataacagagggtcctagagacccctctaaggaggggaagtggaagtccagggaattccagcagagggaatagcaagtgtacaggttctaggggaggaaaggcttggcggggattgaaagccagggtgctgggtatggtgggcatgggggcagggctagaacatgcctggttttcagcgaccttgtaggatttgatttttattctaagtataattaggagccaccaaagrttttaagcaggggagtgatatgatcagatttgtttttaaaagattcctgtgactgctgtttgtaggatgggttggactagaaccagaaagctaatgtggagactaattaagaggccattgcagtatccacacgagatgatagtggcttgggttaagagggcagaaataggaccataccacgatctttttctgcacctgggatacaatgataatggaagtgctggaattcctgagttcagggcatatggaggctctccagtttctgcagagctcgacttcctagaggaatgagcataccagttcagaggctaaatgtatttataccattgctcataggggaaattgctggaaatcaggagaatatctaccagtagagagttgtygaataaattaagatacatctacaccgtagactcttatgtggccattagagtggccccagctgacttggagggatttctataaaggattgttaagaaaagcaagatgaagaatctgtttaaaatttcatttctaaaacaaaccctttatatgtgtgtgtttgtatatgattataggagcatgggaaaaatggaaggcttcatattaagttgttagtatgaactcctgttgggactgaaagtggaagaaaaaaatcaagccaaaaaaaggaaaatttattaaaaaggactaatatgctcacacttatgttattagatatatatgtataagaatattgaaaaatgcaacttttaagaagctggcactgggtttatgtcaattggaactgaggcatacggcctgtttgcagcaggaaattgcctggtggaggatatttttcctcatctctgagtcacagtgagcccccaatgggatctctgctacctcctgtttctttgcctaccaaaactctgtttctttgcctatgcgaattacactttgggaatcacatttgctttctacattcacttctagttaagtaattttacagaaggcaaattataatccccaatctaaccgtgtttgccacagggaaaactttatgcccccctcaaataatctcagtaaactatgactcagcacagtgtctagcaaacagagctcagtgtgtttgctgaatgaacaaatgatgtgctcctttaatatccaacatgatttccccctaaaaactggcacctttttgggtaggaaagaggaaaagcactggagttggggtttgaattgcctcatctagcaagctctgctcaattattttttcccctttaaattatgctctattaaaagagtaaaaaggcagttatagggtggtatgaagtataataaacattttatatgtatcatagaatgagaaagatgctagaagcctatatactatattgaatagcagttgtcactaagtagtagaatttagaggtcattttaatagaatttttttttgttttactgatttgaacttttaactttttttatagttcttatgtttgatgatgataatgatttttaaaaaatttcagttgtgtctaaaatagtacctagcccatagtagacctgtaataaatatttgttgaataaagatggattttttaaaggaaagcagtacatattcattatagaaaataggcaaaaaataagcacaaggggaaaaaaccaatttcgctactcagagataactcaatagtgttgtatagaattttccagttgtttatatttattaaacattcatatgtagtacatagtatttttaaatgggatttttgcaacccctttctctctcttttcttattctctttccccatttttctttctccctgactcttctattacaattatggagaaaagtaactgccaggtggcttagaaatgtgtgtcagcagcaaagtggctcctcttccaggaaggaaacagctcttgggcctgcaatatcactttgtgtgttaatttactcagcagaactttccaggcacctgcacaagggatgcggcctttaggagagcaagttggcatccctctgtgtggaacacagcctaaaactgcgattttctcttgtaggcattttcagctttttactttgtgatgaagtttttaaacttgacatcagagaaagtctctcaggaaaaggtgactgagatgatgaaaaagttctgtgctcagccttgggaggaggtaagtgactaggcacagcagctctaacagcatgagtgccctgtgtcgttgctgatgcagaggatgtgagtctgctctgaaactcctgctggtttgaccaagatccagcaaatgtgttagagaagaccagatggtggactcaggaatgaatttatcagcattccttgataacttgacatccagtggcttaaataagatcttatttttttctcacctaatacaaagtctggcagtaggcagctgctggcatggggtcagcagctctgctctatctcagccattgcttcttcagctctgctgttgtgcctgtttcttcatggacacaagatggtggctgtggcttcaggcatcacagccatgttcagaaaggtcagaaaaggggtcgaaccagatacatctgttcctttttacaggaaagcaaaagctatcccagactcagcagtcttccccttatatctcaatggccaggattgactgggaaaaccaggtgcagaattttgtgaccagcttagagcttagacctataatgagccactgcctcgagctgggcacattgtggcccactctcctccttcagtccccaaatcagagttctgttagcaagaaagcaggcaatttgcagagtctgacacagacacaattgtggtaaaatcctctccatttcccaggtccaagatatctcctacttattcataaacttgaagcacaatttttttcttatcagaggcactgagccattcaacatccagtgccacaagatgaaaatccagggatgagaggtatggaatccactccgattataaaagacatagctcaaaacagcagctgtacttaagttgacagttgcaaaagtgaatggtgttttcattcttaagaaatactattaattaaaaatagatgcttatccctgactgcactgacaagggrgaagaaaggctgagcaagagcctggaagcttgccattctctccaggtattttgtctagaacatgaaagaaatgtggtcagggccttcatcaagagttgctcaaatatgtctcagcattttacaaaatgcttagcggtggttttttgcatctggcggtgatctgtggaggaagataagcatgttagagtggaggcaatttgagaccaggcctacatgtggctgctgaggaagcagatttaggctgctctttgaaaaaaaattacttctggtttagattaaaagttctcatcctggctaacatggtgaaaccccgtctctactaaaaatacaaaaaaaattagccgggcatggtggtgggcacctgtagtcccagctacttgggaggctgaagcaggagaatggcatgaacccaggaggcggagcttgcagtgagctgagattgtgccactgcactccagcctgggtgacagagcaggactccatctcaaaaattaaaaaaaaaaaaaaagttctgtcaggtttcctctcttatccacatctcatgttttacttcataagactatgttaggctgggaatgcttatatttagacctgtagttctgctcaggtaagtcatgtggggagttgttcagaggccctggaagtaagctaagaagggcctgcatttgggagaattcctgaagcatttggggaaggggttgcagggttagacccctgtcttcacccagagcctacagcattgaggtggatgttatgacccagggttcactttcccaagctgcatcgtccacccaggtagaaagcatagttttgtcaagtacattgttagaaggtgactctttcttctttccctcctaacttcatcatggactgctactccagtatggcttgtgtttgggaatgttcctcctaaacacctttggtagagagataattaacaatgtttaagcatgtactatgtgttgacagtggtggacatttgcttgctgtgctttatgcatatcctatcatgctgccttcccctgctttggcaagggaaataaaatgcaaaccacacctgctgacactcagtcaggtacctgaagccattgggtctctgaagtggagggaccaggagagtgagtggaagggagactccatggttgtcttctggcagcttcattagagggctagtagaatctttcagcagccagaacacagccaattttctactctgaaaatctggtcatccaagatctggtcagcccaagtgaacaatgtgatcagattctatgtgtactgatgaccagttatatttcagtgtactctggatcctcacattcagcctcatgaatatttagcctttctagggaaaggcatcccattcttgaagatccatcaatgcccctttatgtggagggcagaaagaggatatccatgaagrgaaaagaacctcatcatgttccactgccctgggaatagaaaggagagaagagagaggggaaggtgggagagagaggagagaggagagtagacttcccctcccaatttggagagcacatagtgatccacccacaggcatgagcatgatcaattctggattgatgaagaaggtggatgcctttttggcttctatatttttggctactatcataaccttcaggaggccagactgcatagccaatgtacagatttccagaaggaggaggggaataggagtattaaagaattcagggaaattaggccaaaatggcatctcccagccccccacaagggataggccagccttcaaggacctacaggggctcagcactttcaagttggacctaagtagattcttgggattttgtgtcccataggcatccttcaattgacaggcccaagactacttcaataggggaggaggtcttttcacaaagggaaagcagaatgcagtgactgaaaggaaggggtaggaacctggacaggcaatgccaactgatgtccacaccaaggtctcaagaggatgtcrcatgcagaggaatcaatcaaaggataatttccagaactgtgctgaaaaracaagctccaagctgggtcattctgagaatttcatcagagcaagacaaggcagtctagttatggacttatycttccagaaactggggacaggcaagaaccaagtgagaaacagaccccagccagcggttaggatttgcatatgggttaggacccacggaagggagagaaatctgggaaaagaggggtgtggtttaggcatcaaggagatactacatataaaacatctggcatagttccagatggtacatgatgcatgcataacaaatgttctctctctgccgagggtatccaggagggaatgcctatctgaagggctgaggaatggggcagcagacagaagtccaggctgaactagagaggtcctggcctgttgtcctcaaattgagggcaggagagttgcagagcaggctgtgggtatctgggtgtatattcacaacagctaggctaggtaagggcaagggatggcaagcagctcttaatatttttagtagggagtaggatgagtaaacataggaaggactcaaggaaacaaccactttgcatgactcagatgcaaaaaaagacattaagacagaagatagaaggtgagatgttggcagtgctagcagtcctcagcaaaatgctgcctaaactgtgtccacagctgtgtttctcaaactttactgtgcacgtgaatcacctgggaatcatattgggatgcmgattctgaattggtagttttaaggtgaggactaaccagctcccaagtgatgctgatgctgccagtccagggactaaagtgagtggtaaggctttttatggctgtgggccaaaggctctggtcaagagcatatagaaaactcagattaaacaaagtctagggcatgaacagaggtactgaaatttagtgtttcagaacctrctagaccacaggaactacttttttcctggaggacctgttattatctcatagaagcctgtgcaggaaaagcttccttaagagaccctaaactataaaaccctgctcccactgaaggagtgcagcaccacccccaaaaccctctggaagaggccaaccttcaggtgcactggagctggggctttcccctctcttcatcagggctagtagagaaaaagagggccacagagaggtgcctatcatacgagtatgatctccccctcacttcacttctagataaaaacatcttacgctggagtaaaggagaagtacctgagtgaatactgcttttctggtacctacattctctccctccttctgcaaggctatcatttcacagctgattcctgggagcacatccatttcattggcaaggtaatttgggggcctgttgggctggggggaggttggggttcggtggtagtgactgaagcagtttggggcttgaaaaaggggggagtcagcmtggtgtagctttggcttgatgtcctgttctgccattctgcttcaaaccctggcattctgtgtcaagccctcctgggtctgttggcccactgtgagcatcctcgctaaggacagctacttgcattttcagtygcaccttcccacataacagtgactaattccttacaaaacaaaacacaaaacgagatatattaaagtaacagcatttcagcagctacagtgactctgtgtgctgacttcagcagccctctgaaaggccccttccataagctgggaaagtatgatcatggtttcatcatccttgttggttattacttcaaggttgaccaatctgaaagctctgtgtgaagaaggggactgagtggctgtgaatgatgagaccgttgtttaraagccaggcttagcctgagtccggaagaagcaacctcaatgctgtgctttaccatagcaccacctgcaggtatccaggaatagagaacccagctgagcgactcatgcttgaccaaaaatacccagagcagtgtgtctctacctttttaagcccatgctcactagtggggaaaacattttaccccctgtattaaatatggtgatttcaagcaaaacaaagcattgagacagagggctgtagcaggcctgaggataacagtgtccttacactcttgtcagtgctgatcttgctaattcaaacttaaatcttttccttgttataatattccagacttcctttaattccagcagtttattttgtttgaaagattatacctatgtcaaatttaggactgacacacgaggtagtcatgatgtatgtgtgtgtatatactttttttttaagagacatggtctcacgctgtcacccaggctggagtgcagtggtatgatcacagctcactgaagcctcaaactcctgggattaaatgatcctccccacccaggctcccaaatagctgagactacagacatgttccaccgtgcccagctaattttattttttagagagacagggtctcactatgttgcccaggctagtctcaaactcctggcctcaagtgatcctccctccttggcctcccaaagtgctgagattacaggcatgagccactgtgcccagccagtgatttatattgtttgaactcttccaatgcatgatccaataattctaagccctaggtgataactcttctaactcctccaaccacaaacagactttccccactgtttgcagatccagggcagcgacgccggctggactttgggctacatgctgaacctgaccaacatgatcccagctgagcaaccattgtccacacctctctcccactccacctatgtcttcctcatggttctattctccctggtccttttcacagtggccatcataggcttgcttatctttcacaagccttcatatttctggaaagatatggtatagcaaaagcagctgaaatatgctggctggagtgaggaaaaaaatcgtccagggagcattttcctccatcgcagtgttcaaggccatccttccctgtctgccagggccagtcttgacgagtgtgaagcttccttggcttttactgaagcctttcttttggaggtattcaatatcctttgcctcaaggacttcggcagatactgtctctttcatgagtttttcccagctacacctttctcctttgtactttgtgcttgtataggttttaaagacctgacacctttcataatctttgctttataaaagaacaatattgactttgtctagaagaactgagagtcttgagtcctgtgataggaggctgagctggctgaaagaagaatctcaggaactggttcagttgtactctttaagaacccctttctctctcctgtttgccatccattaagaaagccatatgatgcctttggagaaggcagacacacattccattcccagcctgctctgtgggtaggagaattttctacagtaggcaaatatgtgctaaagccaaagagttttataaggaaatatatgtgctcatgcagtcaatacagttctcaatcccacccaaagcaggtatgtcaataaatcacatattcctaggtgatacccaaatgctacagagtggaacactcagacctgagatttgcaaaaagcagatgtaaatatatgcattcaaacatcagggcttactatgaggtaggtggtatatacatgtcacaaataaaaatacagttacaactcagggtcacaaaaaatgcatcttccaatgcatatttttattatggtaaaatatacataaatataattcaccattttaacatttaattcatattaaatacgtacaaatcagtgacatttagtacattcacagtgttgtgccaccatcaccactatttagttccagaacatttgcatcatcaatacattgtctagagacaagactatcctgggtaggcagaaaccatagatcttttgtgtttacagctatggaaaccaactgtaccataaagatagttcactgagttttaaagccaagccacatsttatttttccaaggtttaatttagtgagagggcagcattagtgtggagtggcatgcttttgccctatcgtggaatttacacatcagaatgtgcaggatccaagtctgaaagtgttgccacccgtcacacaacatgggctttgtttgcttattccatgaagcagcagctatagaccttaccatggaaacatgaagagaccctgcacccctttccttaaggattgctgcaagagttacctgttgagcaggattgactggtgatgtttcattctgaccttgtcccaagctctccatctctagatctggggactgactgttgagctgatggggaaagaaaagctctcacacaaaccggaagccaaatgtcccctatctcttgaatgatcaagtcacttttgacaacatccaggtgaatataaaaacttaataaagctgtggaaaggaactcttaatcttcttttctgctacttaggttaaattcactagatcttgattaggaatcaaaattcgaattgggacatgttcaaattctttcttgtggtagttgcctatactgtcatcgctgctgttggttgagcatttgtggtgtaccacgctgtgtgctcaagggtattacattcatcttctcatttaatcctcacaacaatctgaagaaggtaggtattacaattcccacttcatagaaacagaaactgaggttcagagaggttaagtcatttgcccaaatggctgagccaaagcctaccatgtacctaacctttattttctttcccgaacataccaggctgtctcctcataacttccaagcatgcacttaaaactccacatgaatacaaggttcatgggacttggtattcatagaaagggaggcagaaagctggtctgttcctgataggcttgtaatttaatatcattctgttcatgtgctttggatggaagcacatcyggcatatgatgctaatcagtggttcccatacccctggcttcctaattttaatgtttgctcacagcatagtagattgacatcaaatagtggccgatgatgatgaaaataaaggtcaaataagttgagccaataacagccgcttttttccttctgtctgcgtatacaaagcactgtcatgcacacaatctattctgaccctcacaacaacccataagggtgtaaatagtatttccattttacaaatgaggatcacacaaactactacatggcagagcagatactccaactcatgtcttctggttgaagcctattgctttttcttttctaaacactttccctcagcaagttggaattagacttcacaagtctccttcagagaacacaaatcttttcttattccattcctgtttggttgcctacgtccaatctccccctccccagagatgccaaaaaaaaaatcctttaaggtatttgggagccaaactcaacttgttaaaatctcaaattatggagacaatcagcagacacaacctaaccccaattattttggcaggaaggttggtttagaggcagatccagcaatctgctttgggccactctgggtggggtaggtgaaataagattggtcactgttaactaattttaatattggattggccattggttatcactgattaccattctcccctggattttcacccaggactcaaaacttggttctgctaaccctgttcctttatgaggaaccttttaaagattcctttataaggtgggagttttttttctatgaacctataggggagaaaaaagatcagcagaagtcattacttttttttttttttttttttttttttgagagagagtctcactccattgcccaggctggagtgcagtggtgctatctcggctcactgcaacctccgcctcctgggttcaagcaattctcctgcctcagcctcccgagtagctgggattgcaggtgcccaccaccacacccggctaatttttgtatttttagtaaagacagggtttcaccatgttggccaggctggtctccaactcccaatctcaggtgatcctattgcctcgggctcccaaagtgctgggattacaggagtgagccaccatgcctggccagaagtggttacttctgtagacaaaagaataatgctacttaatcaggctttctgtgtgacaagaaagagaaagaaaataaagaagtttcaattcatccaattcttaataagaaatatgtaaataaaattttttaaaattacacttcattttaatgttgtatcagtcaaggtccctgcaagagatggatggtatggtacactcaaactgggtaacacaggagagttttcagaaagcaactaaatccaaaatactatcaaggaatcaatataaaaattgttaatatttttctcatactaaattttcaaaatattttgtgtctattacatttacagcacatcttaattaggactagctgtgtgttcacctcacatgtggcttgtagctaccatactggacagcacatgtccaaaaaaatacacgtaaagttaaagtttaaaagacacaggaactaagccctcattgtctttcccttgggaggtagtttaaagagctatagatgctgtaacattcttgctattatttattatatatgacattattcctaaaaaagcttttgagatcctaggttgtattcctcaggttttgttgccttcccatgaagatgtgaaggcagggatgcctgttattcagtccaagatgcatgacaagagaccttgggaaagtttcatctggatttaaagattaattcttgatgcttacattccatactcaaaatgtaaatttgaatattaaaataaagatgattttttttttggagctagtcttgctctgttgcccaggctggaatgcagtggcatgatcatggctcactgcagcctcgacctcccaagctcaagcaaggctacaggtgtgcacctaagtagctaggactacaggtgtgcaccaccatgtctagctatttttttttctgtagagacagggttttcctatgttgtccaggctggtctcgaactcctgccctcaagcaatcctcctgccttggcctcccaaagtgttgagattacaggcgtaagccactgcacctggccaagatgaatattttaatagctcacagaacaaagtttgccacataatgataaaattactatgaaaatatattccctttattgtcagtttaaaagatgaactgagtttcacccaaactggtctggcccctctctgattcaaataccaatagttgctctgattcaaattccaactgttagaacatgacagttgctcataactagctttgcttactaaccatgtttctttccatttgtattaggtcctttactttttataacagcctcaaagtttcatgaattgctgcagtaaacattgattttcatgtttgtgagtctgcaagccagctgggcagctctacttcaggtggtaagggtggatcagacctattccatatacctcttgttctccttgtccagtggtttctagggatatgttctcatgatgaaccccgcagaggctcgtgaaagtgagaggaaactaggatgcctcttaaggtcttggtcaggatggggtctcctgtcacttctgtcacaggctattgtaagtcatatgagcaagctcaataaaatataaacaagtcagataaacagtgggaggaatggcaaagtcatatggccaaggccatgagtgattaattttaacacaggaaaaaagtaaagcattaaatgcgattatttaatatacaatgtcttattaactgaaatataaaatgtgtttactgtaaaatataatctgtttatctcaccaaagaaatattatctttaaaaaatgtcattacttctaagacatcatcagtctgcaacttctttccatagccttaatcaggatgctgtggcagctcccacattagcctcgcattctaaactggtagatgtcctaggaaaccatacatctatgtatttttcttattttatacgtttaggacaatgtatagctaattacccaactttttatttgcatacaaatctaatacaactgaacacaatcagttttatcacaggtataatggatttttcaatagtgaggaggtgcctccatgagccttctctttagaaaagtggcattcaagactcttcatttgaagtgaagattgctatgtcttttgcattgctctattttacataaattaagttataaattgacactataatcaactgacaccatgatcagtgatgatgatcaccctcatcagcactagagttgacttgtttttataacccctttgcatgtatgttgaatagcaaagttcatcagagaacatgtattagtcaatggtaagtaagatactctcatctaagaaataacatcacctcttctaatgaagttctaagaagagagggaagaaaaagtcttgggagctagtcagggaatagtgtgtatttgcaattacctaaactgaactctaccattactcctaacccagttcctcctcctgtgttttacatgattaatgccacccctgcctcaatgaaccaagatcagctccatcactgggacctccccattctgcctgtgcaatatttttcttttttatttctccttctaatattactgttattgctccagtaaagagctgtaatatattttacctggactgataccaggaatggtggtgttgcttccaatctgttgctgctagattaatctttgcaaagcacaggcttaatttcattgctgctcaactaaaaccactggtggctttccattgcctacaaaataaagtcaacctccccatcagacattcaaggctttcaatgatccatggccgccagctctctccaggctcatatcccactccactcctctgatgtttcctacactacactacactatactacactacagccaggtagaatgactgttcacccaacaccactcaggttgtcttctcaacttggaatactcttgcaccttcaaagctcatttcaaatgccccttcatttgtgaagccttctccaaatttccaagtcagaatgtctcttccttgtgctaccacaaccctttaactgagcctccattagtgcactgagaccattctgttcagtgtctgggtgaagcttcctggtgaaaaatatgttacctatttctttctgaaaagttggattcagggatattatcacggacctaaggtaatagttctagccaacctccctgtccactgccaggccgactacaaacccttctgttgctggcgagctggtccgcaccactagttctgcttcactctatttatctcttgatgtaaccatcttctttctccaggttttaagaaccagcccaactcctggttccctgatgaagcttttattcccctagccacatggaacttttcctttttggaacatgcctttagtttctgtgtagtttgccatgcagcacttcattgtacacattattaaaacagaattttaaggattagaatgaaccttaaaagatcatgcatctcaaaatttaatgtacatacaaattacccagggattttgttgaaataaaaattatttaattttaattaatataaataattcagtaggtctggggtgaggcctgaggttttacatttccaacaagctgccaggtaaagccaatacatctgtccaggaatcacactttgcgtatcaaaggtctagatgacattatcattccaaagagtttcttttacaggctctcagatcagtgttcatccactacctgactactgtcattcacaggcattctgttccacagcaggccagctaacgtggtatttacaaagctcactcctcttatacaacaatccaagtgtttcttttgtcagttgtctgtgccccaggagatccctctctgccttgccttgccctctgcctttggagaccagcacctcatactcagtgaaggcctggagtgcttaagagggatttcttccagctctcttgccctggtcttcagtgtattagatgtattacctccatgctctcagtagaggcccataggaaagagtaggtaggttatgccagctcacacgcatcctttaaaaatggtttagaagtttagctggtttcttattactcctgtctatggatgtttccttctgtcactctactagggatgaaacagctaatcatgttcaatagttacatttagattggtttttaaaaactatgattgtattagttcgcttccatgctgctgataaagacatatctgagactggaaacaaaaaggg

SEQ ID NO: 95209 - DNA, 18273 bp, Homo sapiens
ctcccggggctctccagagccagaggccacagcctccgccgctgtcgccgccatctccgccgccagggacggcccccaccggaaccggaagctccgcctattccggaccccaaaaaaaaaaaaacaaaaaaaccacacacmcaacggaaaccatagagatgagctgcgagagagagcggtccagagacataaagaacgcggagccgaggcctgagggtgcgcctcctaatggtagtatgcagctctacatcctaggctccactgctgaagaaatggggctagacactagtcccacggaatagggacgacctggtagagcaaaacacaaaaaaagttgccccatgtgcccgagtctacacaagagtcaaagaaggaagcaagttcagttaggcattaaactttacactcatgaatggggagaaaagcaaactcttgacccacctaaagaagtcagaaggaaaagcagtgatcacattggtagatgtagagcaaaggctgactgaaggcttaggcaaaagatatacagcaagttgaattctttcaaaatcaaagacagttttcttttgtttagcatcatttgatttttctgcctatatcaccatgtctcctacttgaatatatgtttgccgtgaatcgaatgttattagaggccaaccatggacatctcacattttcaaacaatctatactgattataaaaggccatattaatacctctattgcttacttggacagttcttatggctggctgtgagaggcccaattctaagatgtatcccaagatttgtaccctacggtgtacacatcctgtatacatttctccccttaaaagaaaacacgactgtgaatatgatagagcatcactcctgtaattaggttagcttatatgacaaggatgtaattaaagtccctaatcaattaactttaaggcagtcaaaaagaggtgatttatcctggtgggcttcatcttatcactctagccctttaaatcagggctagaggtcagagacagaatctaagagatttgaagccacagcacagctgtcctgttcaccttgaaggagcaaactgccatatggcaggaaatggcaggtggactctaggagctgagaaaggctcctgggtgacagccaacaagaaagtgggcaccttaatcctacaaatgcaagtaactgaattctggcaacaaccactgaacttgggaaaggacacacacggagcctcagatgagatcgctaacccagccaacaccttgatttcagcctgataagaccctgagctgaggactcagccaaccagtacctggactcatggaatatgtgagaaaataaattggtgttttgggctgctaaatttacagtaatttgttatgcagtaatagaaatgaatgcactggcttaactatgtaattatgctacatagtaaccatgctacaccaaaccgataatagggctacctctgtggaagtgtttgaggctgcagggggcaatcaaggctttcattttatctgcagtgtttgaattttttttttttttttgagctagggtctcactctgtcacccaggctggagtgcagtgatgcaatcttggttcactgcaacctccacctccccagctcaagcaatcctcctaccatagcctcccaagtagctgggactaaaggcacacaccaccatgccggactaattttttttccttctgtagagaaagggttttgccatgttgctcaggctgaatgtttgaatttttacaagaatgtattaattcataaccttgggaattaaaaataaattaggccaggcatggtggcacatgcctgtaatcccaggacttttcaaggctgaggcaggaggattacttgagcctgggtgttccagatcagcctgggcaacatagcaagacctcatctctacaaaaaattttaaaaattagctcggtgcgttgatgcatgcctgtagtcccagctactagggaggctgaggtaggaggattgtttgagcctgggaggtgcaggctgcaatgagccatgatcatgccactgcactccagcctggatgacagagcaagatcctgtcttactaaaaataaataaattaattaagatcaagaagattaaaagaactaaaatcagtaatgaaacagggatattactgctgactttaccccccaaaaaaagcatataaggacatactgtaaacaattgtatgtcaaaaaattacagaacctagatgaaatggacagattcctagaaaggcacaagctataatagctgattcaagaagaaatggaaaatctgaatagacctgtaacaagagattgaattaggaatcaaaaacatcccataaagaaaagcccagaaactgggcatggtggcttacatctgtaatccctacactttgggaggcagaggcaagcgaatcacttgagcccagaaggtcgcgaccagactgggcaacatggagaaaccccatctctaccaaatccccccagccaaaaaaaaaaaaaaaaaaaaattagcaggcatggtggcacgcctgtagttccagctattcgggaagctgaagtgggaggatcacttgagcccggaatgtggaggttgcagtcaactgagattgcaccactgcactccagccttttgagacagagctaggccttgtctcaaaagaaaagaaaaggctgggcacagtggctcatgcctgtaatctcagaactttgggaggccgaggtcggggggaccacctgaggtcaggagttcgagactagcctggccaacatggtaaaacccccatcgctatcaaaaatacaaaaattagccaggcatggtggtgcacgcctgtagtcccagctacttgggaggctgaggcaggagaatcgcttgaatcccggaggcggaggttgcagtgagctgagatcgtgccactgactccagcctgggcaacagagcaagattccatctcaggaaaaaaaaaaaagaaaaagaaaaagaaaagctcaagaccagatagatttactgatgaatcctaccaaacattttttaaaaaattaacactggtctgggtgcagtggctcatgtctggaatcccagcactttgggaggccacggcgggtgaatcacgaggtcaggagaccgagaccatcctggctaaaacggtaaaaccctgtcgctactaaaaatacaaaaaaattagccgggcatggtggcgggtacctgtagtcccagctactcaggaggctgaggcaggagaatggcgtgaacctgggaggcggagcttgcagtgagccgagattgcaccactgcactccaacctgggcaacagagcgatactccgtctcaaaaaaaaaaaaaaagaaagaaagaaaactatagaccaatatttcttatgaatatagatgcaaaaatcctaacagaatactagcaaactcagtgtaacaccatataaaagaattatatactatgaccaagtgggatttattccaggaatgcaaggtcagttcaacatctcagaatgatcaatataacacaccatgtagtaatcaatattttattgattaatatttataatcaacataatacactatattagtaaaagaaaaaaccctacatgatcatctcaatagacacagaaaaagcttttgacaaaccccaacaccccttcctgataaacacagggttccaaatgatactgtaaaaaagcaaaaaaacctacagagtcagagaaaatatttatgaattgtgtatctgatcagggaattgtatctagaatacataaagaatccttacaactcaacaataaaaagacaaaccaatttaaaaatgaacaaagggtttgaacagatattcctccaaagaaggtataccatggccaataagcacatggaaagatgctcagcattattagtcatcagggtactgcaaatgaaaactgcaatgaagtaccattcacaggcacttgcatggtgatactaaaaagagacaataacaagtgttgataaagatgtggagaaactgaaaccctctcacacactgctaatggggatgtaacatgtcacagctgctttgaaaaacaatttggcagttcttcaaaagttaaaccacagagttaccctatgacccagcaattctactcctaggcatataaccaaaagaatagaaagcatacatccagacaaaaacttatacaagaatgttcacagcagcattattcacaatagccaaacaagcagaaacaactcaaatgtccattaactgataaatgtataaataaaatattgtactgtacattcatataatggaatattatacagcccaaaaaggaatgaagtactgatatgtgctacaacacagacaaactttgaaaacattattctaagtgaaagaaaatggacacaaaaggccacatattgcatgatccatttatataaactgtctgaataggcaaatccatagaaacagaaagtaaattagtggttgccagtgggtagaggtaggggcaacgtgctaatgtgtatgggttttttcggaagcaataaaaatgttttagatagtgatgatgattgcacaactttgtaaatgtactaaaaataactactgtacactttaaaaggtttttttgtttttgtttttgtttgtttgttttttgtttttgagacagtctcaccctgtcacccaggctggagtgcagtggcgtgatctcggctcattgcaacctccatctcctgtgttcaagtgattctcttgcctcagcctcctgagtagctgggattacaagtgtacaccaccatgcccagctatttttgtatttttagtagagatgggtttttgctgtgttggccaggctggtcttgaactcctaacctcaagtaatcttcccacctcagcctcccaaagtgctgggattacaggcgtgagccaccgcacccggcctaaaagggtgaatttatggtatgtgaataatatcttaataaaaataaataaattagatcaactctgtttcttgacctaaattggatcagggtttgctattggttgaatgcagatgttgtgcaattattctgaacatcaactagtgatgtcatttacaagacagcaagttgctgtgtagtccttcccaaaatttatatattaaatagtatatatccatatttgtttactttttataacttaaaaaaaaagagacgaagtctcactatgtcacccaggctggtctcaaactcctggtctccagccattctccaacctaggcctcccaaagtgttgggattacaggtgtgagccacagctcccagcttatatgcatttttattgctctgatatatacttgagaatgtttataataataggttctgctccaaaacagtggtcacctgaaaagtcactggaaatacgtgcatatttataatgtgtaagttattcaaatcccaagtgaaaacattcatatgcaaacataataatgtctccaattcttctgttgagttagtttgttcattatgggccggtttgtaatttgttttatccaagtcctaccaactctgaggctttaagctgtctctggagagctgcctctggtgataagtttaattttacatttgttgggttgaggtgactgagacatgcagatggaaacacggactgaaactaaggagccaattcagggccgaattgtgtgttgcactggcgtctaagtgaagatcaacccatttggagaacagaacaacaagcaagaccaacaggtgaatttgaagaatgatcatgtttggggatggaaggaagtgcccgtgaaggagaggaaagcaagcagccagagaagagagtaagacaggctcatttcactagtacagctcctgggggaggtggttaagctgtctacctgagttgctcaggttccgagttcccatcatccctggatgggtctaagtcagctcagggagaaaaaggacacaacattctgaaatgtcagagacctgcctggttttcccttcttcccgcttatccttcccagcctctatccaacccttggcttcccaactscgtatttaaaccccgcccctgttgaacccttcggcttttcttcactcccggcttcctccgtcacgtttggcccggctcagccgccgtgacaggcctttgcgcatgtgcagaagggaaacgtgaagaaggtgaagatggcggtggccagggccggggtcttgggagtccagtggctgcaaagggcatcccggaacgtgatgccgctgggcgcacggacaggtccgcgagaacgggcgagacctcagtgtgggaagggggtacctgaaatttggtgtatcgggaggggggatygtagatgccgcggcggcagcctccgggtagggagtggaggtggcgttgatatatccagaaaatggggtggaggatcgcactgatcctgcgaagtcccgggctcggacctctgcagcccctgcgacttgaagccttcggagcggctggagagcgggctcgcttctgacctgttctcttctgcgttctagcctcccacatgaccaaggacatgttcccggggccctatcctaggaccccagaagaacgggccgccgccgccaagaagtataatatgcgtgtggaagactacgaaccttacccggatgatggcatggggtgagacagagagggtatgctcgcacccaagtagtgatgggagaaggccggctgggttkggtggcttgactgtgaccctttttcccgaaccttctcgtgacccctcagagtcaatggagtgggtgcttttctctgtggagggaggtggraggggggtgggtgagcagctgcagctgagaggacttcaattttctccttggctcaggctgtttcctcaaatgaggaagccgaggttttaatggctccctcgaggacccccgaatagcaggagccttccttggctctatccagagcgtcgagtttcatttagattgagcatctgctgcgctcaggtgctgtcatccaggcatgtgaccaggctggagctggactcctgtcatgagaatcttatttgtaaacggagtactctatatttgtgtgtatgtctctttaaaaaaaatgtttttctgttagtgctgtggaaawcgtagcaactattaagcagattaaacagccagcccccttacgtactccagttgatgttatcctatcccttccacactcttccgtatccatacccacataacatcccaatggttaattatctgaagtgattatcatcgcctttatttcctgtcctaatgtcactctttcaatcttggtttcagcaacttctattcttcttgttatacactcattttctgtagcatatgtctagttgtcatcatttcctgttttttcttatgttgtggacaagagcagccttgttcgaagccagtgtcagatgaacctggatttgttggggaaaacccagsttagcaagaggtcccatgaggtgtttgagacgcagagatgaatgccaactgggtggtcaagaacacagttattacgagaagagtgcttttctaatctgtaccctttttgtttttattccaattagctgggtgactttggattcagactctaaactttaatttttcattttctatctaatgagggaatcagagtacagtcatatgtcacttaacaacagggatacattctgagaaatgggttgttaggttatctcctcattgtatgaacattaggagtgtacttacagaaacctagatggtatggcctgctacacacctcggctttatggtatggcctgttgctctgaggccacaaacctgtacagcatattgctatacttaatactgtgggaaattgtaacacaatggtatttgtgtatctaaacatagaaaaggtacataaaagtatgctataaaagataaaaaatgggccaggcacagtggctcacgcctgtaatcccagcactttgggaggccaaggcaggcagatcacgaggtcaggagatcaagaccagcctggctaacgtggcgaaaccctgtctctgctaaaaatacaaaaattagctgggcgtgatggcaggtgcctgtaatcccagctacttgggaggctgaggcgggagaattgcttgaacccgggaggtggaggttgcagtaagctgagattgtgccattgccctccagtctgggcaacaagagcaagattccgtctcaaaaaagagaaaaagataaaaaatggtacatatgtatagggcagctttattataaacttatgggacccccttcgtgtatgttgtccgtcattgactgaaatggtatgtggcacatgactgtaattgattgctaaattccctttcatctctaatatcacacgattgtgtgactttttttctttttattgaaagaagtttggggaagctgggtttttttgttttgttttgtttttttcagacagtttcactcttgttgcctaggctggagtgcaatggtgcgatctgggcacactgcaacctccacttcttgggttcaagtgattctcctgcctcagcctcctgagtagctgatattacaggcacctgccaccacacccagctaatttttgtatttttagtaaaggtggggtttcaccatgttgaccagtctggtcttgaattcctgaccttaggtgatctgcccacctcagcctctcaaagtgctgggattataggcatgagccaccacacctggcccagggaaggcttatgtacattaaaatatttcagagtttgccatgaacttttaaatacagtgtggacttctatggttaattctgtgcttagtgactagaacttgagctcttgccttgaggtttagttcctttgtccttaggtgaggcagttatctctgtcactttgtttctcatctataagatgaggagactctgaattgtctgaggctgctcacagccctttccagaagttcttgctgtctttcaggtatggcgactacccgaagctccctgaccgctcacagcatgagagagatccatggtatagctgggaccagccgggcctgaggttgaactggggtgaaccggtaagagaaccatatctcatttgaccttccttctctctttgtcttcttggcgattctttagctcagatggcacttctttgrccaagtaacactaagctttcctgctcaaggaagcaaggtccagtgatgtgagatctgagattgcatgtggcacactgaatgggacgtctgggaatcatgaaactctgtactgtgaaagttgtgcacttccatgatggagctgtccctattcagcagaacctagacagaggccagcatctaatcctgtagggcagtgtgcctcagacctggttctcagcatattgtcccagggcagtagaatgcttctgtctagccttgtatcaggctctaatcactggggacttgcctgcattttgcaggaagagtagtatgtgacagctatttgtctttctgcctcagatgcactggcacctagacatgtacaacaggaaccgtgtggatacatcccccacacctgttycttggcatgtcatgtgtatgcagctcttcggtttcctggctttcatgatattcatgtgctgggtgggggacgtgtaccctgtctaccagcctgtggtgagtatccgagaagtgctcccttaggcacgcttgcttagccccatttcctgagggagtgaagtctctggggtaggaatccagtcaataccaagcttggcttcctggagtcttaggagataggaagataggagggccttgacccattggcctgccacaagtaccacagcacttctccacccctacttcttggaccagtctgggtgagtagatacacttgaagactagatgagcaatgagtgtgtggaaaccagctagtcaccagagttgccatttggggattatatttattaacaatatttcattaagtgatctttcacagtagagttaaggaatcttgagtgaaaatcttatcctttgttggacttgtgaagggcacgtcctgtagtatattggaagcaattaagagtctactacaggcatagacttacattttggagaatgtaaaggacatagaaaatgaattctctagctttaaggaagtttagttaagaaaatttagataagttacatgagcaacatttgaacagatatatgggaattctgtacaatctatgtgtatatatgtgtatagtgaatgtatgtgcttagtggtatgagttactgtcaaggagaagggctacctagatgctaacacacacacacacacacacacacacacacacgtatgtgcttagtggtatgagttactgtcaaggagaagggctacctagatgctaacacacacacacacacacacacacacacacacacacacacacacacacgctttgggtggtgggaagttggagaaaacatttggggcaagagaaaacaatgaaggcggccaggtatggtggtttgcgcctgtaatcccggcacattgggaggctgaggtgggcagattgcttgagctcaggagttcaagaccagcctgggcaacatagtgaaaccccgtctctacaaagtatacaaaaaaattagccaggcatggtggtgcgtgcctgtaatcccagctacttgggaggctggggcacaggaatcctttgaacttgggaggcagaggttgcagtgagctgaaatcacactactgccccccagcctgggcaacagagcaagactctgtctcgaaaaaaaaaaaagaaaacaatgaaggaaaaggagggtgagttagctggagtagaatagaggtatagaatcgttcctaaataaccggctgcattggtttcctggagacttgctaaaaacccagattcccaggccccacttcttggtgctcctaattcagtagcatcacagtagggttccagaagcggtatttttaacaagctcccaggtaattctgatgtgcacctagatttggaaatcactgtgttaaaaaatattgtgaggtaagttggtcagttaggttgggcagcttttatttcattgctaagggatttggacttgatggtgtaataaagcattaattgaacaaatatttatggagcctgtactatgtaccagatgcagactgtgctagcggttggggatacagtgatgacttggtctgcctctaggtggcagggagccattttgggttttcgaacagaaaagtgacataatgaatgctgagttcttaggaagattaatccaggagtagtctccaggatgtactggaaggagagaagctgaaagcagggaggctgctgtgtttgcagttggctgcccagtgctacctctgcagagacaatcaatgtcctgaaggtagctggtatgtctgtgtgcactgacacgagccttcctaccaagccccaggggctccatgctggagaatgcacgtagggctagggtgagcactaacttcacttcaggagagcaaggaacagtgtggctcttccatttttcagttctgtaagcacatcacccttttctcctccccttgagctgtgttctctgacagctgtttgttggtaaagccagcagcccctaaagcacgtcccagccttgtctcctctgtgctttcccccaccactgctgctgcacgcctcatttgctgggccactttagtggtggaaccattagaggctgagtgacttaaaggagattgagtctgtctcgaccccgagagagagtgggatggatggatgcatcgtctcatttagaaagtgttgcctctgactctaacacactcttctctctttctttacctccctccctgtcttcctcccttcccctcctttccctaacccccttccctccccctttctccttctctctcacagtgtaggcaccacttctcttacaatttaggctttctctctgccttgggctgagtgaggaagaggagtgctgttcctgccttcctagcccagctgggtctgaccagaggctactgtgtacccatttaccatgcgtgattgttaactcagagtggggtgtagccaggtattgactgaatgtatgttcttgctgacctgtgtttttttctgtagggaccaaagcagtatccttacaataatctgtacctggaacgaggcggtgatccctccaaagaaccagagcgggtggttcactatgagatctgaggaggcttcgtgggcttttgggtcctctaactaggactccctcattcctagaaatttaaccttaatgaaatccctaataaaactcagtgctgtgtwatttgtgcctcatttccccaggaatagtcactgccttgaggaacctcatccttttccctttttttctgcttgatgtctgctgtcttccctgttttctttttctgaaatttaaaggataagagggtggggtggatggggacttaggcacaaaatgttaatttgttaatttcacttgggttgtaaaggtacttaagggttttagctgtgtggaggtgttaagggtccctccttttcccatttacagggtcaaggaagaaatgttcctaactttccaagttggaacaagatttatttcacataaaaaacctttctagtctgggtctggtagctcacgcctattatcccaacactttgggaggctgaggtggaaggattgcttgaagctcaggactttgagactagcctgggcaacatgacgagaccccatctctgcaaaaaaaaatttcagaaaattcactgggcacagcagtgcgcgcctgtggtcccagctgtgcagcaggctgagctgggaggatcatttgagcccaggagcgtgcagtgagccatgtttgcaacactgctccagcctgggcaacacagcaagaccctgtctcgaaaaaaaccttggcatggcgtggtggctcagcctgtaacccagcactttgggaggccgaggcgggtgaatcacttgaggccaggagttgaagactagcctgactaacacagcaaaaccccgtctctattaagaatacaaaatattagccaagcttggtggtgtatgcttgtaatcccagctactccagaggctgaggcaggagactcccttgaacccaggaggtcaaggttgcggtgagatggtggcactgcactccagcctgggcgacagagccagaccgtctcaaaacaaaaaaaaacaaaaaaaactccttaataatagtggttacttggaaaaaaatgtgctctaacgtgtttcaagtatattacaggactgataagtgtttttgtcctgtctgcctaaggctgcgactgcctctgatcttatttccgttataagaatattccttattccaaagcagcttctgaatcatagcttcttaataagttgacattacctgtatttatgaattggaggacagtcagtgagttactactgaacatgttcatagctttgattacttttgatgactcatccacactcctataacagtcttagagaaaaactatgtttttgagagtctatcattcatctgttttttgttttatttagagataggatcttcctctgttccccaggtggaagtgcagtagcacaatcatagctctctgtagcctcaaacccctgggctcaagggatcctccttactcaacctccctagtagctaggattactgggatgtacgaacctaagtttcttattttttgttgaggtgggatcttgctatgttgcccaggctggctcaaactcctggcctcaagcaatcctgcctcagcttcctaaagcactgggaatacaggcaggagccactgtacccagccctcatgtctatttttaagtgaaccaacccatattcctttggggacatattcttaagttacagtatattgccggaaaacctgtcccatagaaaagcatacattttatgtgaccaaaagaagcaagttcattcaaattagatgtggagtcttagttgtgcaggcagtgagagaccttttgtgaggtcagggagtggatacttgtggaatgctattctttgaaggtccccactggctttttatctgtcttcattctctatagcatttgataatcatttccttaacaaacacctgtgtgtctaatatgtatcaaacactgataagccctggagatataaaactgagcaagacaaagtaatcaccttcaaatattacataggagaccagcagttataatacaaagtgaaaataattctttatcattattactattgagacagggtctcacgctgttgcccaggctgcagtgtagtggtgtgatcacagctcactgcagcctctacctcccaggcccaagcggtcctctcactgtagcctcccaagcagctgggaccacagggatgcaccaacacacctggctaatttttgtattttttgtagagacagggtttcaccatgttgcccaggctggtcttaaacttgtgggctcaagcaatccacctgccttggtctcccaaagtgttgggattatgggtgtgggccactatgccaggccaaaaagaattttttttttttttttttgagacatggtctcactctgtcacccaggctggagtgcagtggcatgatctcagctcactgcaacctctgcctcccaggttcaagtgattctcatgcctcagcctcccgagtagctgggattacaggcacatgccaccacgcccagccaattttttcggtattttttggtagagatgtagtttcaccatattggtcaggctggtcttgaactcctgacctcgagtgatctgcccgcctcagcctcccaaagtgctaggattacaggcatgagccactgctcccagcaagaattcttaagaggtgtgagttgagaaagtgcacttttaatttggcttaatcatgtcctacccgaaactgtgacttaagcttctggttcaaatttctttaggagtattccatcagtaactcttctgcctccttctctcaggtttagtttttaaccctgtttacttttcctcaggcttcattccctgttgtgccagctaagaagttcaggaaatacttgagtacttagtaggtaggaagcgtgggctaggcacagataatgcactgaattaccttctgtctaacttcaaaattgccagatccacatggaagggaactggagtcgtgtcacaatgagttgggctccatcatgataactggccccccatctttggaggtgtatcaggcaggaatacagagaattcatgcgttaagcataagtttctaagatttaaagctgcctacagaattttttttttttttttgagatggagtctctgtcacccaggctggagtgcagtggcgtgatctcagctcactgcaacctccacctcccgggttcaagctattctcatgcctcagcctcgtgagtagctgggactacaggcctgcaccaccatgcccggctaatttttatatttttggtagcgacggagtttcaccatgttggccaggctggtctcgaactcctgacctttggtgatatgcccaccttggcctcccaaagtgctgggattacaggtgtgagccactgcacccgacctgtctacagaacatttttatttggaagtggcacaatttcttcaacataaaaaatacattatcggctggaatatcacctgtgttcttgcagctccagaggataacacccctcctatgttcctcaaatatttcaggaagcccctggccctgtagtctcaccctccatacacttatagcccttaattcaaccaagttttgggcaccagtttctgctgggctgcagtgcaacactcactgccatttacagcctcgattgctttttacgttttcaactaaatggattccactgagggctcctggggccagggccgggtcttctcccgcttcaatacatagataatgagttagtattttcccttttcagagactggccctagagcctggctcaaactgaatagaccagaacttactggtccagatctgacccgctgcgcaatcacagggtaggtgagggaggcccggttaaaagctataatcctgtttggaaacgttctccgtgggtctgtcagtgtctcgggctcggcgcccgcggagcgtgtttccgacggtgccctgccggggtccgcgccgctttggtcctccgcagccgccgtccacagcgcccggctccgcgcgagagccctgccagaggagcggctccggccgccgcgcctgacccttgtccggggtcttccgcacaggttggttcgccccgccggtctggggtccctggtagcagagattgcgctggggacccggagcactgctcctttctcggcagagcgcggaggggagcccgcttgctgcggagcccccggcccgcgcctgccctgcccgcgggtccgggcctcgggggcctccactacgtctacccttgaattggatccggctctactgtccctgccgcacgggaacccccagccggatgagggtctccctgttcactgctgccttgcgccttcccatccgccttggtcctgacctggcccagccgaggccgtccggtgtcgctgcgtttgggctgggcgggaaggtctgtcattgctgaccctggcgcgccgcgcttcggcgacagcgggaaagaggctgtgctgaccgtcctccctagggactggactgccaagggtagctggtgccctcctgcacggcaggtctgtcgagcatttcattggtcatctccccctcacgcccccatggccaatctgaccccagcgggggccctttttttgtgaatagatgcctcttaacaatgtgaattaagagcccattttcccagttcctagactgtcagcgattaaaacactttctagggtttacttgcgactagtacagtggttagaaatacgggctcttgatgctgatgggggttcacatcccggcctagccagttgtcatctctagaaaatggggataatcatagtacttacctgataagaccactgagagaattaactgagatatgcacatcaaatgcacagctgcttatcgcagctcctatttttgttgttagggaatcttttcccagaaacattaaaatggctgtgaccagcaggtggcactggtgactgtatagtagagtgttgagctggtcacagaatacgtgatagtagccacaagtgtttaaaggtgctttggaaatcttggcttaatgggcaggcttaaactttcttcacgctagaaagtaccttagagattaagtaatactatctcctgtttttgtaggtgagactgatctgactatagcttactcaagcaggtcacagtaggtcccaagctttctcctcaagttcagtgtaatttttaaaaatcatttctacctgtttgctagcctgttgggatgggaccttgaatatacattggaattagatcagaaaccacagagttaaaatggatgtccacattcgagcttttaccatatgccagacattcgtttggaaactagttacaacatggtgaacaaaagccgacacagtgtcagctctcatggagcttgcatattagtggaagagactgacaatgtcaatataaataaatatgtaattataaattactaggaagaaaaaaactgaggctttttgtgattgggtagttcacttatttggggaagtaagctgagcccagaaagatataaggagccagtcatgtcgaaagtgaagggaagagcattcaaagtatagggaacagcatttgtaaaggctctaaggaaggaaaatgtcaggaaattaaaggctagtgtggctgaagcacaatgaatgagaaaagtattaaaagatgaagttgaagtggtaggctggagcctttgggcagggctcaaagaagtttgaattttattctgtgtgtgatagaaatcattgaaagattttaagcatggaatgccaaaatcattttttattttagaagttcactcctgctgctgtgtaaagaacgaattgggtaatggcttgagtagaaaggggatagctagttgggaggttgttggagtactccaggtgagagatgatacaatcaaaaaggctgttggcagcgaaaatagagaaaagtagacagattgagatatattttggaggttaaatcagggagactaaatgatggattagaagagaatgagggagaaggagggatcaagagggattttcaggcttctgggttgagcaattgggtggatagtggaaccatttaccaagatgaaaaaaactggaggaagaacagaagagattgtgactttgctcctttctgaaaaaaacaaataaaaaaagacc

SEQ ID NO: 95210 - DNA, 17449 bp, Homo sapiens
gggtaatttttcttatgttttatagagatggggtcttgctgtgttgcccaggctggtcttgaactcctggcctcaagcaatcctcctgtcttgtcctgccagtgttgggatttcaggcatgagccaccacacccagctgagattaacattttgctgtatttccttataagctttcgctatgtgtatatagatatatttttaaaatatatcttgggttyaggtttctatcatttgtcaccttgaaagtttgtgttatgacacttttctcaatctaaaatttattttcgccaacccccattgttaaacgcttaggttttcatttttggtactattcttaataatgcagcactcactaaacttttatataaatttgtgacccagtctctgataatttctttagaacttcattttattttaatcctgagatgggctaataaatcaggaaagcacaaaatgccattactttggtttttacaaatacttaacctagaaaccttttttctttgaaattcatcccacaaagtattgagattgccaactgtatatgataacctttggggggtaccaagccaaatcacacatcactgccgtcagagagctcccactcttgaacagcagagaacagccctgtcctaagataggctggagtttgttttagctaggactagactggttgaaaatgacagaaaagccaaactatagtgacttttaacaagagagatgattttcctcctcttttgtaaacatagttggcccagagctagtgtgatgctcatgatcatcagacacaggctcctatcttgttttaccatcctcagctcaaacacaaggctgccgcctcatggtgcagggtgactgcccttgctccagccattacattctcattccagtctgctggaaggaggaaagaacagcacccaatctctttgaataggatactgcccatttcaacttcccattggtcagaacttagtcacaagaccacagcaaggggtactaggaaatatcattatttcagtcatccgtgtgtccagctaaaagcccagggttctactatagaatttgggaagaacagacatcgaaggacaaagaacagtcactgccyaaaaatggcagtctctgctataaaaaattgacaagtggaattttttttttttttttttcctgagacaagagtttcgctcttgttgcccaggctggagtgcaatggcacggcacaatctcggctcactgcaacctccacctcctggattcaagcagttgtcctgcctcagcctcccaaggagttgggattacaggcgcctgccatcacgcccggcttatttttgtatttttaagtacagacaaggtttcaccatgttggtcaggctggtctcgaactcctgacctcaggtgatccactcacctcagcctcccaaagtgctgggattacaggcgtgagccactgtgcccggcctcacaggtggaattttttttttttttttttttttgagacagtctcgctcttgtcacccaggctggagtgcagtggtacgatctcagctcactgcaacctctgcctctcgggttcaagcaattctcctgcctcagcctcccacgtagctgggattacaggcgcccaccaccacacccagctaattagtggagacggggttgtaccatgttggccagactggtcttgaactcctgacctcaagtgatccgcccacctcagccttccaaagtgctgggattgcaaggcgtgagccacgacgcctggccaaagtgagaaattattttctcctgaggatggcctgagaggcctcgtgaaaggcgcattcggactggaccctgaggagcaagggacttccagagagctctatggcagcgcagctcaaagcggaggtctctgacagcccagatgaggacttgtcagaaagaatccagtgccacctagagcctggaggctgccagggccgctgtgctcacccgttaaagtgatgccgcaccctttctttggaagttttccatattggttttgtctgtgtgacaatgtttttctgtttgtttgtttgttggtttgtttgttttttgaggcagagtctccctctggcgttcaggctggagtgcaatggcatgatcttcgctcactgcaatctccatctcctgggttcaagaaattctcctgcctcagcctcccaagtagctgggattagaggtgcccaccaccacgcctggctaatttttgtacttttagtagagatggagtttcaccacgttggccaggctggtcctgaactcctgacctcaggtaatccacccaccttggcctcccaaagtgctgggattacaggcgtgagccactgtgcctggccttctgtttgttttttaaaagacaggaaccttagacaggagtttgagttgttttcaaatattcaatcttgcaaaataaaaagttcgcaacccagtgtcagtccctagatggtgtctgcagaggtttactggtccatcaaaccccaaatccagaactcctcagccatggggtggagatgagggtcttgggtgttcaaagaacaacagctggagctcaatgtcaggtcacttggggagcacctgggacaggactaaggaggatggtgagcacatagaggggtatgtgtgggtcaggaactgtgcagtgactgagtagtggaggccatggctgggcctgtgctccaagaggaagggaaagggatctggcagggctggccaggttggaggtagagagagaatttatgagcagaaggactgtgtgctcaaggaggcatgctgctgtttgcggtgccttaggcagcttgccataagcattttcaaccaagccacaccacataatggccaaaattgttcccactcataaccacagctgtctgcctggctgaatggaagtgtagaaaaatgactcaagtgctaactgcttaacaagcctctcgtgacagacacataaccacgtggcagccccatttaaaccatttccttgaacagtagccattggcccacctttctctcctctaccctttctcccctttttccttttataataacactttttaggaggttgggtgggatagttaacccactagacacttaagctttacaactgggtttttgaggtacattggtctgaatttaggggaaaacatttcatgctaaagcctgattttctcagtcctggttgtttggttgtttttttgttttgttttgttttgttttttggtgttgggggtgtttttttttgtttttttttttttcctttcttggagacagggtctcgctctgtcacctaggctggagtgcagtggtgcgactgtggctcactgcaacctccgcctcctgggttgaagcaattctcatgcctcagcctcccaagtagctgggattacaggtgcacgccacaatggcagctagtttttgtatttttagtagagatggaatttcaccaccttggccaggctggtcttgaactcctgacctcaggtgatccacccgctttggcctcccgaactgctgggattacaagcgtgagccaccacgcgtggccaatcctggtttttttctgtagacttctgtggtcatctggcctgactttaacgtcagttgtgattataactgggctgtgcaataatggctacttctggcaaaatcagtttttcttccttgtgacctgaagtcaggtggcatttctggattcacagtgctgtatatttgggggcttttttgtctgtaatttactcagggcttttgtcttctctgaacttggaaggtttgtgcaatgtctgtacactctggccgagaggtctcaagttctgtgcctgcttgaggctgaggcctctcagtttcactccctctacaggaggacaaaggatgtcaatgtggcctttttcatgtgaggacccacatgctggagcagctttgtccagcttatagaggggatgggatggacctggccctccactttcccccatgcagtgtcctggaatgccagggccactgtctatggtcagtccttcaccacctaaaagcaagctgatccacaaggcacctggctgcatccaggcctgtcatctacggccaccatcctcagcttcagagcttatgatctggctcagggaacacagacaagtactgccatctacagccaccatcctcagcttcagagcttatgatctggcttagggaacacagacaagtacacgggcagttacaacccagaggcagaaatgtcttggaggaagtacaggcaatgtaggcaaacaccttgacccaagtacaggattgaacccaatcaagcctgtagcactggacacactgattgactctgtcttatccactacgtggacatttcaagaataatcttcgttcctggaacaagtccatggaagctgttgcctagcaatgttttttattttttagagacagtcttgctatgttgcccaggctggtctcgaactcctgggctcaagcggtcctcctgcctcggcctcccaaaattctagtattatcagcctgagcccctgtgcccagctgcctagcaattttttttttttttttttgagacggagtttcactatcgttgcccaggctagagtgcagtggcgcaatctcagctcactgcaacctccaactcccgggttcaagcgattctcctgcctcagcctcccgagtagctgggactgcaggcgcgcactaccatgcccagctaatttttgtatttttagtacagacggggtttcaccatgttggccaggatcgtcttgatctcttgacctcgtgatccgcccgcctccgcctccgcctcccacagtgctgggattaccggggtgaaccatcacgcccaggcacctagcaattctttagcggtcttggtttacctcccctttagaaggagcttaaaagcaagcaaggcacattgttgcctaggcttgaggcttgctctcacccataaacaacgctgttactctgctctggggacgacacaggaaacgttccccacctccaggtggaggctgcaaaacgtgtcaaaaccatccctgacataatgtcaagagtagcttatactagtttcatcttccttccttggcattcgaactgcgtgtggaacaattagcatttaatatttggtaattagcatgcttaatgtgattctgakaagttctttgacattctcataaaaacagcacattcccacccacccttcaaagagcaagacccagtttgtcaagaaaaattgcgtgccagtcttttctggtgctgaatatgtatgttctgggcctcttcctggacactgctggtaaatttagaaactcgtttagaaaagcacttctctcgtattcaacagcctataggctcatggcgcagaatctaagggaaaatggctaaatccagcttgtgaattcgcgggctgtgatgattctttccaagtaaataaaaaccctcggttcgccccgacgagccacataatctgttcaaatccaacaaggaaccagattttggacgcaaagaaggatacgttctactcgccccgtgcaacaacgtaaaccactgtagccgcccgctcccgtgtctccagcccaaaggctgactctccagtccgcacgtcgcagcgctcttgccctccacaccaagcccgagtcccgcagcccctcgaggccctcggtgcctcccaaccccgagaaggaagcgggggccggtggtgcaccgccccggctgcttggggcggaggaaggacccggaccccttccgccggcccagcccgccccggaacccgacccggccgcccggccccggccgggccccacgtggcccctggagcgggccgcactaccctgctgccgccgacggacggcgcgccacagccactctgcgccgctctgcgagccggtggccaatgagcgccaggcgaggccgctttgccattggcgagcgcgggctccgcccccgccggcaggccccgccccgcgcccgggttaggttgcggcgcgggcggcgggcggagctggtcccgttgtgctgcggcgccgcgcggcctgcagtcccgggcccgcgccccgcgccgcccgcccgcccgccatggagcccggccccgacggccccgccgcctccggccccgccgccatccgcgagggctggttccgcgagacctgcagcctgtggcccggccaggccctgtcgctgcaggtggagcagctgctccaccaccggcgctcgcgctaccaggacatcctcgtcttccgcaggtaccgccgctgcccgcaggcgcctgccccctaggctcagcccgggccgcctgctgcccgcctcacgggcctctccacgccgggacccaagcgggctggacctcgtcctgccctggccccctcgccacccctcacaccgcctccctgggctggggctgggactgcgggctggcctcttgggtgggggagtcggagtctgcgccccgctccacgtgtcagccctcaggacacgtcagagccmgaggagaccccgggtcccaccccggcctccacccggcggcccgcctgccgttcctcgccacgtgtcaccatcgctcctcatccctgggacccctaggcgggatggggagaccctcctcacccagggcggcttggggtacgttttccccaccccagagaacccaggtccccgactgtcactccgcccgcagtaagacctatggcaacgtgctggtgttggacggtgtcatccagtgcacggagagagacgagttctcctaccaggagatgatcgccaacctgcctctctgcagccaccccaacccgcgaaaggtaccccagtgtcccctggaacagtgccggacgaggggcggccccaggtgtgctccgggctcttcccagatgctgcctgcatggttgtcagagaaagtgctagcraggccaggggcgtcccgcggaggggtgggggccgacactgaygcggcctcggaatcctagggcagccctggaaggaacttccaggaaaggggacaccggcacgaaagcgtttccgagggtagaaaaagatgaggcccgtgggtccgaggggtcagggggtctgcttcaggggcctgggggctcccagtcctgccagggcccctgccttgactgccccctcctcccaggtgctgatcatcgggggcggagatggaggtgtcctgcgggaggtggtgaagcacccctccgtggagtccgtggtccagtgtgagatcgacgaggtgagtgccggcgtagagccaggtttgagtcctggttctcccagcggccagctgtgccctgaaatggctgcacacccccgagcaaggcaggtagggcctgtttctccatctggaaaacacctggtcggggagggttcagtaggaaaaccagatggcagagggcctggcaggtggtgagggcacctgcgtggcgagctcttactaaaactgagctgattttttttttttttttttttttgagacagagtttcsctcttgttgcccaggctggagtgtgatggtgcgatctcggctcactgcaacctccacctcctgggctcaagtagttcttctgcctcagcctccggagtagctgggattacagacatgcgctaccatgcccggctaattttgtatttttagtagagacagggtttctccatgttggtcaggctggtctcggacctggcgaccacaggtgatccgccagcctcgtcctcccaaagtactgggattacaggcgtgagccaccacgcccagccgactaagctgatttttaatctgagccccaggcagggccccaagacagctcaactatttgtacgttaccccttacactcagtagctgctcactaaaatcatgctacgtgccaggtgttgcccgggtatggggacagtggtagacgacagatcagtccctgccctctaggagctgatgtcgtagttaaaggagacatcagatggccagacgtggtggctcacacctgtaatcccagcactttgggacgccaaggcgggcagatcacctgaggtcaggagttcaagagcagcctggccaacctggtgaaaccccatttctactaaaaatacaaaaattagccgggcatggtagtgcatgtctgtaaacccagctactagggaggctgaggtggaagaattacttgagcccgggaggcggaagttgcaatgaaccgagatctcgccactgcactccagcctgggtgacagaggaagaatctgtctcaaaaaaaacaaacaacaaaaatagagacatcaaaggatggtctgatgaaggcaagacaggggctgggggacaggagaaggcagggttcctgtgaatgcatggggggtggtcagggcaggcctccaggaggtggcgtttgagctgagacctcagtgaaaagcaggtggccgtgtgcagggagggggaggttctcctggccagaggttggaattgcatccttctaaaataggaaacaggccaagcgctggtggctcacacctgtaatctcagcactctgggaggctgaggcgggcagatcacaaggtctctactaaaaawaaaaaaaaaaaaaaaaaaatggcccagcttggtggcgtgcgcctgtaatcccaactactcgggaggctgaggcaggagggtgcagtgagctgagatcgtgccactgcactccagcctgggcagcagagcaagactgtctcgaaaaataaataaaataggaagcgacaagaaagccactcagatggggcgatttggtctggaaggagggggtagggatgggagagaggagcccaagccgccggcaggagccagctctcaaggagaaatggaggtaccagagttctccccgctttacacattataaactgaggttcccaaaaggggccaggtgtggtggctcacagctgtaatcctagcacttttggaggccgaggtgggaggatcgaggagttcgaggcaacatagggagactctatctctaccaaaaatttaaaaagtagccaagtatgattgaacacacttgtcccagctactcaggaggctgatgggggaggatcacctgagccccggaggccgagggtgtagtgagccatgatcgatgccactgcactccagcctgggccacaaagtgagaccctgtctcaaaaaaaaataataaaaaaaagggaaggggttggccaaggcggcttgcctgtgaggcacttggagagtcccacgtggctgtgctggctccaggtcccccagccccttggcccagactggtccctcccatcccctccaggatgtcatccaagtctccaagaagttcctgccaggcatggccattggctactctagctcgaagstgaccctacatgtgggtgacggttttgagttcatgaaacagaatcaggatgccttcgacgtgatcatcactgactcctcagaccccatgggtaagcagtggatgggccccagggttttctggcagctgcaggtctggaggtcagcctcccccaggccttcagagtaaaggatagagcggcctcccaccccccgaactagagctgtacttttcccttctcatttgttacctgccctctgaaacatggctcaggacagtaggcaggagccargcgactgcccagattcacaagctggtgaccaaggagagtggggatctggcattgggacactgaggaccctgtgtcctcttcagcctcccctctgctctgaagtggtcagcactggagtgggggcaggttctagtcttgaacgaaggcctaggttagaggttcctctgctgtggtgccaatgagactcccccaagaatgggattcaggtgtggatcccccacagacctgggttcagatcctggctctggccacctggtagctgtgtgggtgacagtggccctggaggtcacagccagactgttcagtgtgtctccctctgtcttccccaggccccgccgaaagtctcttcaaggagtcctattaccagctcatgaagacagccctcaaggaagatggtgtcctctgctgccagggtgagccacaggcctrgagcactggggcggggcggggtggggcagggcaggccctgccggatgctgatgcttaggggcccccaggcgagtgccagtggctgcacctggacctcatcaaggagatgcggcagttctgccagtccctgttccccgtggtggcctatgcctactgcaccatccccacctaccccagcggccagatcggcttcatgctgtgcagcaagaacccggtgagatgggggtgtctgggggtgggggttggggggaaggtgggcataaatagagatccctgcccctgccgggcgcggtggctcacacctgtaatcccagcactttgggaggctgaggcgggcagatcacaaggtcaggagatcgagaccatcttggctaacacggtgaaaccccgtctctactaaaaatacaaaaaaattagccaggcatggcagcgcgcgcctgtagtcccagctgctggggaggctgaggcaggagaatggcgtgaacccgggaggcggagcttgcagtgagccgagattgcgccactacattccagcctgggtaacagaggaagattccgactcaaaaaaaaaaaaaaaccctccccaggccaggtgcggtgtctcatgcctgtaattccagcattttgggagaccaaggtgggcggatcacttgaggtcaggagtacaagaccagcctgaccaacatggagaaaccccatcactactcaaaatacaaaaaaaaaaaaaattagccgggcgtggtggcgcgtacctgaggctgaggcaggagaatcacttgaacctgggagacagaggttgcagtgagctgagatgacgccactgcactccagcgtggcaacagtgagactccgtctcaaaaaaaaaaaaaaaaaagtgccccccctgatgtgcccctggcccggtccccagagcacgaacttccaggagccggtgcagccgctgacacagcagcaggtggcgcagatgcagctgaagtactacaactccgacgtgcaccgcgccgcctttgtgctgcccgagtttgcccgcaaggtgggtggcctgcggggctgggtggtgggacccagggacccagagcgccctcctgactggcctcatgtccctccaggcmctgaatgatgtgagctgagcccaggcgccaccactgatgccacccaggacctcggaccttggagcctgcggggtgcctcggcccctccagccccgggccggacctcctgctggctctcgcccaccaaccaagtgttacaagccccagaatgctgcccggcctgccctgctgggcggactgtctgtgtgtctgtctctctggcgttccacctccaagcctataccagctgtgtacagcgccatctctctgccttctgttgcccctcactcaccaaacacgtgtatttatagcaaagattggagtcctgtgtctcctgaccttggctgggcccaggcagggccacattcaccattgggtgcctctggggtgagggtctgcagaggccttgctggctgacccccaagtgtctgctgcagggctgaggctgcaggcgggccatcgtggatagcctggggcacagagggtcaccgcagtcgtcacgtgggacccagagctgtcctgggaagctgacttagctgtccttttaccaagcccttcacaaggccactggtgacagccccccagggcagtggggtgggtgagatcagggtggggctgcccgggagcattctcagaaaaattggggacactcacaggtgtaagtcaggtcccatccaggtactccagggcaaatacaggaaggggtggcggggctggttaccttcggcctttttaagcacatcaggagcttaacactggcccagtgactgtgccctgactccacccggcattcagacttgggttcaaattcccaccatgccccgccccctatgtggacaaattgagaaagcaagtgtgggcaccccaccagggactgcgaggaccagggctgtcccctctccaaggtgctgaactcccgccttccaggacccaacggtggtgggaggacaggaaaggaaccctctttgcatgggcctgagttgccaacccctttccccaccctgggcaggggctgggctagcggacgcatcagggagggaggccccactcccagccgaggcagccaccttggagccctaactcacccgggtatgttttctgggacaccagagtaagggggattcagtttcgccatcaactctggcttcaggccagtcatagccctccagtctccacctgccccccactccccacccctgtgaattcaccagactgagcaccttcagacctttggcccatcagcagatctgacctcaggctaacttctccaggccaccctgacctttcaaatcagtctggggagctggcgtctgcccccgggccttcatagtctcagggaaggcccgagaggagcagctggcgttcaggtgggttggcaggggctatttctggagcctgacaggccaggctgcagctgggtgggccaggcactttcatttaaccttcacaaccacctgcccgccaggcattgttcctgctgcacagaggcaaggcgatgtgcctaaggacacacagccaatcagcagccaccgtccgacgccactccaccctgctcaccccagggtctcctgcatctcaggccaggcactctggaggtcccggcatggatggtctctctgacatctactccctggccaagatccaggcagggaatgctgcccccttagagggacgatcccgtgaccccctaagtgtgagggcctttccccaagggctctggaatcggtccagatctcaatctcaactctgcctccctcagctctgtgacctgcagccacgcaggccctctgccggttaccccgatgtcagagggggagcacaccgtccctgttaggaagctttggtgagaagcacgtgcgacgcagccctcaaccagtgccggcccgagagaagggagggtggaccaggttgtggaaacagccggggccatctgggaggcaggagatctgggaagcagctgcaggaagatgaagttgccggcagcgtagatcctgcgcctccccagcctatagtctatacacacacctggccgccgcgaagaggcatgcaccagggatgggggcaagcctgagccccacgactgggtgggtgcgatgcagcccaggatgatctgctgaaacagaagcagccttgatgaggacacaacctgggtcccccagcgtcccagaaatctttgggccacaaacaggcccagtgtggcatggggaataacatcaatcctatctagacttttcaaaatttgatttatgataattagccaggcccctggcttaaggattcatgggtccgtgcggcttgtcagaagaaaaatcacagtcctcctcccgcagcccctttccctcttggagctgattatttggggtttatcttctgtagtagaagaagaaatcgatttggtgtttgtccccagttcctgtcacggagccgctaacacctttggaaattcctgatcggtaggcgtgtcttgtcgttcattatatgctctgttagagaactcccgagtttatgctaatgcagtggtctagggtagagccccgggggagcctcagggtggggctggtaagtaagacctaaagactgaagggttgggactttcaccccacccaatgactgccaggaaaggatcaggagggctctggagatgaagctgtacaaattcatgaacaatgagcgcagccccgggtggtggctcatgcctgtaatcccagcacattgggaggccgaggtgcgcagatcacttgaggccaggagtgttgggagggcaacatggcaaaacctcgtctctactaaaaacacaagcattatcctggtgtggtggcgcacgtctataaccccagctactcggaaggctgaggcaggggaatcacttaaacccaggaagcggaagttgtgaaactgcctttgccaaattatgactgagacagtgaaagagacctaacttagccaactccatcttgcttctagcctccaagctgtccttcattcctgggcgtaggctgaactaacgttgggagaaatttagtttatagtttaaacaaagacggtcacagccctttctcaaagcagatgttcttgcctggggactagactgtctttgtaggattaacattagccacaagattagaaattatggtttagagtcatgcagctggaggctacgagattcccaccctccctaaactgctcctaagatcagtgcttgagatattttgcagatcctgccttgatggatcagccggcaccacccagatggataaacgggctcatctgatcttgtgacccccacccaggactcagtgcaagaaaacagctctgactccgactgcctgtgatttcatctctgaccagtcagcactcctggctcactggcttccccctacccaccaggttatccttaaaaactctactccccgaatgttcggggagactgatttgagtaatagtaaaattctggtctcccgcacagccagctctgcgtgaattactctttctctattgcaattcccctgtcttgatgaatcagctctgtctagacagctggcaaggtgaaccccttgggcggttacagttacagtgagccgagatcgcgccactgcgctccagcctgggtgacagagcaagactctgtcttaaaaaaaaaaaggaaaaaaaagaaaaaaaccagttaaagaaaataaaaggaaaaagcaaaagaaaaaataaaagaataattctggacagaaatagagttataatttagcattgatcaggctgcactctggcccgcctccatgtaactgacagtcaggtagcaccgcgcctgaccaggcttttgtttaagaattgcttgagttagggcactgtggctcatgcctgtaatcccagcactttgggaggccgaggcgggcggatcacctgaggtcaggagttcaagaccagcctgaccaacatggtgaaacgtggtctctgctaaaagtacaaacattagccgggtgtggtggcgggcacctgtaagcccagctactggggaggctgaggcaagagaattgcttgaacttgggaggcggagtagctgggcttacaggcacgtccatgctggtctcaaacccctgacctcaagtgatccacccgcctcgggctcccaaagtgctgggattaaggctgggcccagtgtcaagagttcaagaccagcctgaccaaatggagaaaccccatctctactaaaaatacaaaattagccgggtgtggtggtgcatgcctgtaatcccagctactagggaggctgaggcaggagaatcactggaacccaggaggcggaggttgcagtgagccgagatcgcgctattgcactccagcctgggcaacgagcaaaactccatctcaaaaaaaaaaaaaaaaaacaaaccaccaaagtgctgggattccaggtgtgagccaccgcatctggccttatgataacattttatctcctacacagcttcttgttttccctggaggttctttttttgtttgtttctcatttacttagttttcaataaatttatcactaatttggccccaaatttttcaccaattctctaatgctccttggactcaacaggtgttctgtcatcgtcccctttctggagaagctgtccagagccttctcaccgcccccaatggagtcccttagtgaatggcatctcttggaccttatgtcttcctattgaaaccacccttgcaaaattatgacataaccgaccccatcctgctcctgacctccaagctgaccctgctcattcctgggtgtaggcccagctgaccggcggaggaatttagagtttaacttgaaacaagaataataatagttctccctaaaactactctcttccctgttcgggggctgaaccaccaccttggtaagatttttttttttgagacggagtcttgctctgtcacccaggctggagtgcagtggcgcgagcttggctcactgcaagctccgcctcccgggttcacgccattctcctgcctcagcctcccaagtagctgggactacaggtgcccaccaccacacccggctaattttgtatttttagtagagacgggctttcaccgtgttagccaggatggtctcaatctcctgacctcgtgatccacccacctcagcctcccaaagtgcagggattacaggtgtgagccaccgtgcccggcctccaccttggcaagattaatgagcagtcacaagacaggtgtagtttctttctttctttttcttttctttttttttttaagatggagtctcggctggacatggtggctcacgcctgtaatcccagcactttaggaggctgaggctggcggatcacaaggtcaggagttcgagaccagcctggccaacatggtgaaaccctgtctctactaaaaatacaaaaattagcctggcgtgttgacacatgcctctaatcctagctacctgggaggctgaggcagcagaatcgcttgaatccaggaggtggatgctgcaatgagctgagatcgtaccactgccctccagcctgggacagagcgagactccgtctatttttttttttttttttttttttttttgagatggagtctcgctgtgtcccaggctggagtgcagtagcacaatcttggctcattgcagcctccaggttcaagcgattctcctgcctcagccttccaggtagctgggattacaggcacgcaacaccatgcccagctaagttttgtatttttagtagagatgaggtttaactccaaaataattctttttcctgatcttttgcatgtgatttactatttgatttttctctttctctttgtttgtaaaacataattattctctccagtgtttttaaatatgtgtaaagctgtattaatatttttatctccttttctgggcacttggggcacactttcgatcagtatcacgttcttcagttctgggaaattttcttgcattattattattgctatgtatgtattttttgagacaaaatcttactctgtcacccaggctggagttcaatggcatgaacatggctcactgcaaccttgagacctcctgggctcaagcgattgtcccatctcagcctgccaagtagctgggactaaaggtgcatgccaccatgcctggctaatttaaaaaaattttttttttttttagagacaaggtcttgctatgttgcccaagctggtcttgaactcccggtctcaggcgacccacctgcctcagcctcccagcctcctgggattatgggcaggagtcactacacccagccagagtcccggtctctaaaagaaaataggccaggcatggtggctcacgcctgtaatccca

SEQ ID NO: 95211 - DNA, 27245 bp, Homo sapiens
tctgctcatgcctgactagctatctactgtaacaggaggagaccttcaaatccatctccccaaggaattctgagctgggtttgtttgtttgtttgtttgttttgttttttcttgagacagagtctcgctctgttgcccaggctggagtgcagtggcaggatctcagctcactgccacctctgcctcccaggttcaagcaattcttgtgcctcagccttttgagtagctgggattataggtgtgtgccaccatacccggctaatttttgtatttctagtagagacacggtttcaccgtgttggtcaggctggtctcaaactcctgacctcttgatctgcccacctcggcctcccaaagtgctgggattacaggagtgagccaccgtgcccggcctgagctggggtttttaaggggattgtagagggggagaggctggaaatttggtatcgtttatgggttggggtaaagggggtgaaatcatcaggatgtagaaactgcattctttggtgagttagctccctgtggggtctttcacaatggctgtcatcagtagtttcactgatatgcaggacctgaaagaatacctcaggtggaaaacaatgttttgcaagcttaagttgtctgatgacagggtccgcatgattctgggacagtaggcagcaaacaactatgaggaaatggctcagagttcaacatgacctcatgatgaatgctgaatgtgctgcaagctttgtttattttcatttctctccctcccttcctccctgatttattttattttattttgagatggagtctcactcggagtgcagtggtgtgatctcagttcaccgcaacctccacctcccgggttcaaacgattctcctgcctcagcctcccgagtggctgggattacaggtgtgcgccaccatgccagctaatttttgtactttttttttttttttgagaccaagtctcgctctgtagcccaggctagagtgcagtggcgtgatctcagctcactgcaacctctgcctcccaggttcaagcaattctcctgcctcagcctccagagtagctgggattacaggtgtgcacctcggcagagtagctgggattataggcgcaccccactgtacccggctaattttttgtatttttagtaaagacaaagtttcaccatgttggccaggctggtcttgaactcctgacctcaggtaatctgcctgcctcagcctcgcaaagtgctaggattacaggtgtgagccactgtgtccagcctaatttttgtatttttagtagagacggggtttcacaatgttggccaggctggtctcgaactcctgacctcaagtgatcagcctgccttggcctcccaaagtgctgggattacaggtgtgagccaccgcacctggcccctgattaattttataaagtttgttgggacggtttcatttccatcttggtacacacagagtttcttgtccttttgttgttgctacagctgcatagtgttctatcacatggctgtgccatagttcattttccagtcctctgtgaatggacatttgtgttatgtccaaatttgtgctattacaaatgctgcagtgaatgcctttgtacgtatatcattttcttccctgacagctatatcaagataaattcccagaaatgggattacagggttagacagttttgttgaatcttgtcaagttgatctctataagggaggtaccaatttttattcccatcagccatataggagatttttgccaccctgagatatgatacagccctgttttctaattaataatcaaagatgattttatagcaacagtaataagtgcgtttgtcggtttcttttctgtttacaaagaactttcttttttattgtatttttgcaagtctttttattttattattatacttcaagttctagggtacatgtgcacaacgtgcagatttgttacataggtatacatgtgccgtgttggtttgctgcacccatcaacttgtcatttacattaggtatttctcctaacgctatccctcccccagccccccaacccccaacaggccccggtgtgtgatgttcccctccccgtgtccatgtgttctcattgttcaactcccactacaaagaactttcttatgcattacactaaaataatagctaatatttattgagcacttacagtgtatcagggattttggtggacattatagagtacttgttaaaagcagcttggagtcaagtcaaactaactgaatctgaaatttggctgcaacactttgtacctatttccttatgtgtaaaactggaaggattatagtcccttcgttggtaggcagtattgtgggggttaaacgctaataccacacgtaaagtacctaaaagaggtacttggcccagcatggtggctcacacctgtaatcccagcactttgggaggccaaggcaggtggatcacctgaggtcaggagttcgagatcagcttggtaaaaccctatctctactaaaaatataaaaattagctgagcatggtggcagacgcctgtaatcccagttactcaggaggctgaggaggagaatcacttgaacctgggaggtggaggttacagtgagccgagatcgcaccactgcactccagcctgggcgacagagcaagactccgtctcaaaagcaaacaaagtatatggctcatgtgaaaagtcaataaatgctgtttactattattcctgagcatttctatgaggcaggttgtattgttcccaccttatatataagtaagccaaagaacagagatattgggacatggaattggtaagtgatagagccaggattttaatctatctgctgatatattgtctgatttgacattgtatgactcatgggtttggccagcatagaaagctctgtgttgagtggtgaagttgtaatgttcaacaaccagattgggggtaagtggaagcagacatgtacagagctagcttcacagctgtgtcatgctctgttttgcaattgttaatgattttgaacaagaggccccacttattttttttattttttaaattaattaattattttttttgagatggagttttgctcttattgtccaggctggagtgcaatggcacgatctcggctcaccgcaacctccacctcccgggttcaagtgattctcctgcctcagcctcctgagtagctgggattacaggcatgcgccaccactcccggatgattttgtatttttagtagagacggggtttctccatgttggtcaggctggtcttgaactcccaacctcaggtcatctgaccaccttggcctcccaaagtgctggaattacaggcgtgagccaccgtgcctggcctggccccacttatttattgattttattttatttttttgagataggatctcactctattacccaggctggagtgcaggggcacaatcatgactcactgcagcctcaacttcccaggctcaggtgattcttccgcctcagcctcccaagtagctgggaccacgggtgcacactgccacgcctggctaattcttttactttttctttttctttttttttttttttgagatggagtcttgctctgtcgcccaggctggagtgcagtggcacgatctcggctcactgcaagctccgcctccggggttcatgccattctcttgcctcagcctcccaagtagctgggactacaggtgcctgccaccacgcctggctaatttttttgtatttttagtagacatggtgtttcaccatgttagccagaatggtcttatctcctgaccccatgatctgcccgcctcggccttccaaagtgctgggattacaggcgtgggccactgcacctggcccacacctggctaattcttcgatttttaccgtgtggtccaggctggtcttctcctgggctcaagcgatccacctgccttgtcctcccaaagtgttgggattacaggtgtgagccaccacatctggtctttttaattttttagagcggagatctcactttgttgcccaggctggtctctaacctgagctcaagagatcctcccgccgggtgcggtggctcacacctgtaatcccagtactttgggaggctgaggcaggcggatcacgaggtcaggagatagagaccatcctggctgacacggtaaaaccttgtctctactaaaaatacaaaataattagccgggcgtggtggcgggcgcctgtagtcacagctactcgggaggctgaggcaggagaatggtgtgaaccctggaggcggagcttgcagtgagccgagattgtgtcactgcaccccagcctgggcaacagagcaagactccgtctcaaaaaaacctcctgagtagctgggactacaggcacacattatcacccccagctccacctctttagtttgcactgggtaccacaaattatgtagtcagtcctgtgtgcatctatgttgcatgtgtattataatttcactgatgtaaatgatgtgtagcatacagtttacaaatactaaaatatacagtacaggactctattgtaaactccatatagccagttctcacagtatgctttctttgatgttgtgtagcttccctatggtcccaattgatcaatgagcatagttcagacatgaatgttggttgatattttatgttaggagtaagaggaaagtgaaacaatcaaaagagatatgtcagaacttcactagtttgtcaaggctacaagcgacttatttgttcaactggataataatttgccaatgctgaacgaatatttcctcaaagttttggtgcattcacttacacactttttttctctcttttttttcttttttgagacggagtctcgctctactgcccaggctggagtgcagtggcgtgatcttggctcactgcagcctctgcctccagggttcaagcaattctcctgcctcagcctcccgagtagctgtgattacaggaatgcaccaccacccccggctaattttttttttttttttgagatggagtctcactctgttgcccaggctggagcccattggcatgatcttggctcactgcaacctccatctcccgggttcaagcaattctcctgccccagcctcccgagtagctgggattacaggtgcctgccaccacgcacggctaatttttgtatttttagtagagacagggtttcgctatgttggccaggctgatgtcgaactcctgacatcaagtgatccgcctgcctcggccttccaaagtgctgggattacaggcgtgagccaccgcaccctccaacacttttaagtttaaccagtaatatgaacattttctccgccactttcttaagtctagacgacttagcagttattaagcatttgctgatttgcgtggtgtaaattctcccaccatgggcagatttcaagctgctgaaggatgtcactgaatgaaaagctgataagaggtgagcagtagcacatcatagagtatttccacggtgcagatatgatagacgtcagaatgtatgcacacagcaggcgctcaataaatgcttgtagcatgaataaattaatgaatcctacttcgtgaatgaaagtgcgcccggtaagtcctaaagcaacacgccttcgagttcttatgatgctaagagaggctgattgcagttagtctggaagtagctgcggggcgcagtgcaggcaggaaaagggctggatgccgggtcaccgcccggccccagctcctggcccgtccccgctcccggtccattcccgccccggccccgccccctcccgccccaccaccggtctggccccgcccctcagccccgccccacccctcaccgcccttctccccgcctctgaccccgcccctcctctgactcggccctgcccgccccgcctctgaccaggcccccgccccccacccctcaccgcccttctccccgcctctggctcggccccgccccctcccgccctccagcccaccctccggtccagcccgcgccgccggcacctgtttccgggcgggcctccagaggccggcgcacaagatggcggctctggcggcctaaagaaggcggccgcggctcagccgtgggctctaacgcggggctgggggccggagacagacttcgcccaggtgacgggtagtaggggcggcgccgcttggcctcgtggggtgtaagacccacttgctgttgcccccggaccttgccgccacaccagccctgtcctggggcggaaccgaaggaaggtcgggccctgctgccccgccccgtccttcctccttcccgggcggtcackgtgcgtggctcacttttagagtttacttcaaccacgtggagcttccatggcggcctctcaggtcctgggggagaagattaacatcctgtcgggagagactgtcaaagctggggacagggacccgctggggaacgactgtcccgagcaagataggctcccccagcgctcctggaggcagaagtgtgcctcctacgtgttggccctgaggccctggagcttcagtgcctcactcacaccggtggccctgggcagtgcccttgcctacagatcccacggtgtcctggatcccaggctcttggtgggttgtgccgtggctgtcctggctgtgcacggggccggtaatttggtcaacacttactatgacttttccaagggcattgaccacaaaaagagtgaygacaggacacttgtggaccgaatcttggagccgcaggatgtcgtccggttcggagtcttcctctacacgttgggctgcgtctgtgccgcttgcctctactacctgtcccctctgaaactggagcacttggctcttatctactttggaggcctgtctggctcctttctctacacaggaggtaagatttggcctgtcctgtgtgctgcaggtcttagtcgcgtccactggaaaccgctgctttgtaaaggagttatagggatgtcaaaggtggctttctaatttaagccgctttaattgaagtctataattgtgggtgatgtgaattttttgaaacagtgatttgagaagatcctggtttgacttacggacgtagggcatgactgaaaattttatatggacatttatttttatttattttttatgtattcatttttgagacggagtctcgctctgtcgcccaggctggagtgcagtggtgcgatctcggcccactgcagcctctgcctcccgtgttcaagcgattctcctgcctcagcctcccgagtagctgggactacaggtgcacgccaccacgcctggctgatttttgtatttttattagagacggggtgtcaccatgttggccaggatggtctcgatttcctgacctcgtgatccacccrcctcagcctcccaaagttctaagattacaggcgtgagccaccgcgccctgtcaggacattttttaattttttttattttttttgagacagagtctcgctctgttgcccaggcaagggtgcagtggcaccatctcggcttactgcaacctctgtctcccggcttcaagcgattcttctgcctcagctccccgagtagctgggactacaggcatgtgccaccacgcctggctaatttttgtatttttagtagagacaaggtttcaccatgttggccaggctggtcttgaactcctgacctcatgacctgcctgtcttgccctcccaaagtgctgggattacaggcgtgarccaccatgcccggcctatatggacattttttctgtctcatttttttttttaatcactcatactttataatgccacagtttcaaatattagaattaaatctgaagagttcaaaatgatatagataattacttctagctagtttgctaggtgacttcttgcaagaggctgattaaggtagtgatgggcaggtgggtaagccctatttattgagcacctattatgtgccaggcactgttctgtgtgaacacagcagtcacagatccctgcccttgtgaaacttacgtattatcatgaaaagagacagaaagtaaaaatagaaaattatagttagggtgaccaatatcctggtttgctcaggactaaggtgacaggactaagtcggatgtgcgacttctggagctaaaaccagaaaagttcctggtaagtcaggttgaattgatcaccctgattatagtatatgaaagatgataagtgctatgggaaaaaaaagtagagcaaagaatgggacacagattactattttaagtagtttgatcagggtaggcttcatcaaaaaggtaacatttggctgagtgcagtggctcatgtctgtaatcccagccctttgggaggctgaagcgagaggatcgcttgaggccaggagttaaacaccagcctgggcaacatagacccctgtctgtataaaatataaaataaaaaatattagctgggcatggtggtgcttgcctgtggtcccagctactttggaggctgaggcgggagaattgcttgagcccaggggtcaaggctgcagtgagtcctgatcacaccactgcactccagcctgggcgacagagtgagaccatgcctcagaaaggtagtatttgagttgagttacattgaaggaggtaagaggtgagggagttggccaagcagatatctgagagaggagcatttcaggaaaagcaacagyaagtgccatakgccttcaggcaggaatgtgtccaaagagcttacagagcagcaagaagtccagtgtgtgaatgaaggagagagtaaagagaggtaaagtaagagaagtacgtttggggagggtaaggaggcacacacacggattatatagaccttgtaggccactggtcttggctctggaatggaggagccactgcaggactttgagcaagggagtgatgtaatataatgttttaaaagaattgctctgggtaaggtattgagaatggatcaaggggagtggggcaagggtagaggcaggaagaccaagtaggaagctcttgaataatccaggcaagcgatgtttggtggcttgtatctagcgggtggtagtggaagaggtaagtagccagattctaaatatgctttgaaggtagacagggtttgctgatggattggatgtgaggtaaagagaaacagaggaattaagcataactcaaaggtttttttttttcttggacacattccacattttatttacattttcagactaactttgggctgggtgctgtgcctcatgcctgtaatctcagcacttcgggaggccaaggcaagtggatcacttgagatcaggagttccagaccagcctggccaacatggtgaaaccttgtctgtactaaaaatacaaaaattagccaggcgtggtggcatgtgcctgtagtcctagctactcgggaggctgaggcaggaggattgcttgagcccagtaggcagaggttgcagtgagctgagatcatgccactgcattccagcctgggcaacagagagaggctccatctcaaaaaaaaaaaaaaaagaccaactttagtttcaaaattatatctccatatatgtatcccttttttgttgatgtcacttaaccttaagtgcatagtttgttaaaaaaaaaaaactgtaagcaaatatttaccatgtctgttacgtgtaacacacatgaacagcttttaacagaaattcatcaactcccccccaacattttttattataagataggtatcaaaacaatcctgaacatatttttcatactwctagtagtcagcacccacaccacttcaaaaattaacacatttgtgctggatgtggtagtttttacccataatcccaacactttgggaggctgaggcrggcagatcacctgagttcaggagttcgagaccagcctggccagcatggtgaaaccccatctctactaaaaatacaaaaataagctgggcatggtggtgcatgcctgtagtcccagctacttgggaggctgaggtaggagaatcgcttgaacctgggaggttgtagtgagccaagatctcatcactgcattccagcctgggcaacagaacaagactccatctcaaaaaaataaaaaaaattaaaaaaatcaaacacatttgtgacagtgttcattgtacctgctactttttttttttttttttaatttaacggagtcttgctctgtcgcctaggctggggtacagtggtgcgatcttggcttaccacaatctccgcctcccaggttcaagtataatcccagtagctgggattacaggtgcccgcctggctaatttttgtatttttagtagagacggggtttcgccatgttggccaggctggtctctctaactcctyacctcaagtgatcaaccctccttggcctcctaaagtgctgggattacaggcgtgagccactatgcctggccaatacctgctactttttaaacaatttcaactgcagctctctttcactaagcaagatggataaagcatgccatttctgttttcttttttcttgagacagaattttgctcttgttgcccaggctggagtacaatggcacgatctcggctcaccacaacctccacctccggggttcaagcagttctgcctccgcctcccaagtagctgggattacaggcatgggccaccacgccctgctaattttgtatttttagtagagacagggtttctccatgttggtcaggctggtctcaaactcctgacctcaggtgatctgcccaccttggcctcccaaagtgctggcattaaaggtgtgagccacctctcctggcctctgttttctttttcctttccttttttgtttgagatgggggtcttactctgtcactcaggctagagtgcagtggtgcgatctcagctcactgcaacttctgcctcccgggatcaagcgatcatcctacctcagtctcctaagtagctgggactacaggcgcgtgctaccacgcctggttaatttttggattttttgtagggacggactttcactatgttggccaggctggtcttgaactcctggcctcaagtgatctgctcgcctgagcctcccaaagtgctgggattacagacatgagccactgtgcccagccctgttttctttattgagatttttagtctttagaaacacacatgcttccactgccatctgacacttcttaccacgctttcatcttgtaaacctgaattatatttcgagtactccaagtttatgtttaaatgacagtaccttaacaagagaaaaaaattgggttgcatttttcctgttacctgaaaacataatgggtgtacatatattaaatatattcttacaaatgtccaggtcatgtttaccagccggagttcttttatttaacgtgtgggtattttgcattgtgatatttaatcaagacattaacacgagtagaaggttgttgatataagacaagtttgagatccactaaaattaattgttgtatgtttgtccttccagtggctgtggaagcttcatattttctttggacatcattagacgtcttagctcctgaagtacaactttaatgctatatgaattttgtcattttgctaacactggtgtgctgcggtcatccaccatcccactggagttatttattccattcatattaattcttgttacaaatctaactgatgggggagcttctgggtatttgggtccactttctattttcaggctatatattctttttttttatttttgagacagaggctcgcgctgtggcccacacgggagcgcagtggcgtgatctcggctcactgcaacctctgcttcctaggttcatgtgattctcctgcctcagcttcccgagtagctgggattacaggtgcacaccaccacacccagctaattttttgtatttttagtagagatgaggtttcactatgttgggcagactagtctcaaactcctgacctcgtgatctgccctccttggcctcccaaagttctgggattataggtgtgaactgccatgcccggcctatattctcttttcataatttgtccttggtggcccaataatcatgcctgtccaccttgtaaatgtcatatcttcatcatctttaaggccccagttaatcataccattgcctatcaatagctgcataagcataactcaaaggttttgacctgagaactggaagataccatctggagtgatgtcatcatgtgagaagggcaaggctggggatagaacaagttttgggggaaaagcaagcaattgacttcgtggttttttgttttgttttttgtttgttttgagacagagtctcactccgtctcccaggctggagtgcagtggcatgatctcggctcactgcagcctctgcctcccgggttcaagtgattctcagcctcccaagtagctgggattacaggcgtctgccaccatgcctggctaattttgtatttttagcagagacggtgtttcaccatgttgtccagactggtctcaaactcctgacctcaggtgatccacccaccttggcctaccaaagtgctgggattacaggcatgagccactgcgcctggccaactttggacatcttaatgtctattaaatctcctaacaaagatgtcaaatgggtagttcaagttcagagaagcctgggctagagattacatatctgggagtcattggtctatagataaagttgtaggactgggtgaggtcatcaagggggagggagtgttggtagaaaagtcagtcctggtctgagccctgggacactcccacattagaggtgggggaagaaaaggcacaggtaaaggggatgtgagcaagcatccagaggagtaagaggaaaatcaaaaggctgtggtggcctggcagctaattataaaaagttcagtgaaggaaatcaatgaggtggtgtaatagaaagtacaaggtggtggtgaagggaagaggctgtctttgtgaaagtgacgttcaaactaggacttgaagacggaaggataaggagctggccacggggtggaattggagtctgattgtgatgctgagtcctccagggctgaaggaccactaagtgcaaatgtggtgggtgagagagagtgtgacattggctaggatctactgaaaggtctgtgtgagccagagggggcatgagacacagttggtgagttaggcagggtctctgtcatggcgatcttaaccagtcctactccccaacctccagggctcagtccttgggcctcttttctctatctccatgtactcccttggtgatgtagctcatggcttcagatgccatctgttaagctagtgactcttaaactccagactcatatccaacttcttgctcagcaacttctcctagaactgtctcataaacatctcaagcttaacatgtctgagaccaaattctgatcttctccccaaggaaacctgcttcgcccacagctttttccccattttgctcaatggcagcttcatcctagttcttcaggccaaaagctgtgggcatcgtccttgactcccacgtctcacatccagttcatcagcaaattctgttgactctcctttcaaaatgcatgtaggatctgaccacttcttaccgtgtccagccaccactgtgatcatctgtccctggatttttgcggcaggctcccaactggtctctttacctctgttctggtcccattcaggctgttcccactcagccaccagagtaattctgttaaaatatagggcagccctgtcagtcctgcttagaactcttcagtggctcccatcttgctcagagtaaaggccagggtctttacagtgactccctagggccctacattctttgcccaccttttgccctccccccagttctctgacccaccctcctcctttcttcctgctcatcctgggccagccacactgccctttctagtccaggagcatgcacaacccctcctgcccctccctcaggtcctttgtagatgcagcttcctctgtttgaaatgcttttcctgcttctaaccatgtggttcactttctcacttccttcacctatttgcccaaatgtcagctgctcagtgaggccttgctttctaccttgcttaaaattacacacccactccgtgcccccacctgatacttcccctgctgctcttctctgcattagttttcctcatagcacatgttaccttctaatgtgccatataaagtacttaattggttaattatcttcccccttcgactgcgagctccctccctgcagtcagggatttctgtctctggtattagctgaacccctagcacccagagcactgcctggcatgtaatattacttagtaaatatccagtgaacaaatgggaaggcattgaaatatactgagcagagtagtgacataatctggtttaagattttttaaacattgtcttttattgacatataattgacacacagtgaaatgcacaggtttttagtgttgcagcttgatgaattttgataaatgtatacagttgcataacccacaccccgtcatcatccagaacacttccatcacccccaaaagcttcccagtgcttcttgcctgtcaatcccacactccctgcccccatccagagrcaggaaaagarccactgttctgattcctctcacagagattagttttgcctgtcatataaatggaacctttcactatgaactatgtatgtatgtatgtatgtgtatttatttcagtctgagctctcgtctggcttcttttgctcagcgtgatgtttttgagattcattgttttattgcgtgtatcagtagttcctttttttgctgactagcattccattgtaacataccacaacttctttttatccattctccttttcagggacatttggattgcttccatattttggctattacgtctgaacattcatgttcaagtctttttgtggatatttgttttcatttttcttgggtaaatgcccaggagtagaattgctgggtcacagggcagatgatgtttaattttatgagaaactgccaaactgttttctgaagtggttgtacttctttacactccccccagcaagtgttccagttgctctgcgtcttgccaactttttgacttaagtcttaacagattcattctggctgccgtgtggagaaccggcccagtatttcactgtgtaagctcattcagaaaatggggttgggagaggaggaatgcctaaaaggaaattcccagatgggccacgtctctgaatcaggtagagcacatgaagccttgggccatgtatcaaatgctaggaaacagctttctccccaagggctctactgttttcttgtgtcagataaccagatctttttcctccccagagtgggttgctcttggttttggggtggggacagagatctctgctcaaccttgcttacatcactttttttttttttttttttcaaaagacagagtttagctcttgttgaccaggctggagtacaatggtgcgacctctgctcactgcaacctctgcctcctggttcaagcgattctcctgcctcagcctcccgagtagctgggattacaggcgtgcaccaccatgcccggctaatttttttttgtatttttagtagagatggggtttctccgtgttggtcaggctggtcttgacttcctgacctcagttgatccacccgctgtggcctcccaaagtgctggaattacagcgtgagccactgtgcctggcctttttttttcttgagacggagttttgctcttgttgcccaggctggagtgcaatggcacgatctcggctcaccacatcctctgcctccagggttcaagcggttcttctgcctcagcctcccgagtagctgggattacagacatgcgccactacacccggctaattttttgtatttttagtggagatggggtttctccatgttggtcaggctggtctcgaacccctgacctcaggtgatccacctgcttcagcctcccaaagtgctgggattacaggcgtgagccaccatacctggccgcttacattgctttttgccgagtgatctaaggaggtgttcttggagactccagccaaaggtcaaggctgtagtgctgttgcattttctttcacagccagaccagtggcgtcacttggggagctgagaaaacaagcacagcaagagtgggcagctgtagaggaactggctaggtctgtgctgggagtattcctgcccagcatcatctttgcgtgggtgtagtcccttaaatgtgtgagatattggaagagacgtcaatttactaattctgaactggagctcgtgctctgcttgagggaacttcctcctggagggcatgtcctcatacaaccaaattatttatgaaaacatggcttggtataaaaattatccaaatagaaggaaaaaaaatatggcttgagggtgcagaattagcttgctgaatgttgaagagtgtcagtggccatgccttaatgcccttccctggagatactttgttctgaagaactaagggtgtgtatttagcaccaagggaccccagctgctgatgtgaaggtgaacttggactggatcttgttccttagctcctgtcattttatttcattttgattcctgtggctagtgggaacttctgtcattttagactggttaaaatgcctaaccagagctttattttctgatcttgagtccacatcttgtagcttggttagaactggagtttgctaagcttctgtagcaataattgcatgggtcacctccctcagtgggcagctccactcattccatactgctttacctgtttcagtctgagtgggagatctttcctgaccttgatcccaaattccaggtgcttgttactgtagctctgtcttcagttcagcccttgtgccaagtattggggagtgagctgtgaccaagccagacacatgtcctgccctcatggaacttacagtttagtgagaaaggtggagattaattagaagcatgatgaagtttatgaacatggcaggcatattgccatgggagcatattgcaaggggatcaaatgtggcttaggggtgagrggaggtggtcctggggaatggtctttaaagtcttaaagggtgagtagagttagccaggccaagggaggggtgtctgaaggctctgacggattggaagaagtctgtgtgaagaggggaggagagctcaaggtgaggcaggagaggtagggctgggccacaggtgagccaggttaaagatctgggacttttatccccaggatgagtggttgataagggtttaagtgtatgttgggggagggggtggtcagattcctttatttatttatttactaatttttttgagacagagtcttgctctgtctgccaggctggagtgcagtagcatgatcttggcttactgcaacctctgcctccaaggctcaagcatttyccctgcctcagcctcccgagtagctgggattacaggcgtgtgccacacgcttggctaatttttgtatttttagtagagatggggtttcaccctgttggccaggctgatctggaagtcctgacctcaggtaatctgcccgccttggcctcccagagtgctgggattacaggtgtgagccactgtgcccacccagccagattcctatttttaaaggttcactctaacgcctttttagagattagattagggatggagagggggaggggttatgagaggggaagctgatagaccagtttggaggatgttgcagtatcccaggcataagatgaccatgaggtagatttggtaagggggatggagggtggccccggggatggagagaatggatagttttgaaggaagtgggttagacaggctttgaagtagatgagcaggacagaaacaggaggtaggggtggtttagtttcaatctcataggagacagaggaggaaagcagcattataactctcctgtcctcgctgttttgcttatcgcaggggtgcaggtttaaggaccccgaaatttcactgaaattcactggccgtttttaaaaccagaagatgccttgagattgtaggggaaggaggtggaaaagtagaaggccagagtggctattctgtgagggattgatctcacggggtcttgcaggggttggtgaagggtgaaagatagcaaagaactggattctaagacctttagatccttcctgggctctcccattgaactaagagtatagtgggtgcctagtgtgctatgttgcagagctctgttgggggacagtaggaagggaaacttgggtatgaacctgggaagagggacttgaggcctcactgggcattctctctgcacctgtggcattggagaagaaatcagaatttgctctgtggggttaagggatgaaatgagtgcccacctgcacagtctaaggatttaccattttcagccggaagtggcctgcctcttcactggtgaacagtccctaaatttccagccttggtctcacaccaactctctggattttctggccgcaggaattggattcaagtacgtggctctgggagacctcatcatcctcatcacttttggcccgctggctgtgatgttcgcctacgccatccaggtggggtccctggccatcttcccactggtctatgccatccccctcgccctcagcaccgaggccattctccattccaacaacaccagggacatggagtccgaccgggaggctggtatcgtcacgctggccatcctcatcggccccacgttctcctacattctctacaacacactgctcttcctgccctacctggtcttcagcatcctggccacacactgcaccatcagcctggcactccccctgcttaccattcccatggccttctcccttgagagacagtttcgaagccaggccttcaacaaactgccccagaggactgccaagctcaacctcctgctgggacttttctatgtctttggcatcattctggcaccagcaggcagtctgcccaaaatttaaggggacaagtagctccccccacgacatgtctccctttcttagaatatattaaagtcagagtctctgaggaaggaatgtgatttggcagtcagggtactaagcatgggtgggaactcctgccttataaaaattgtttttgtgttcttaragataatatgttgtttttctgttttttgttttttccattttatggggaatttaaaaaccattcttgtatcagaaggtgaattaggcgcatggtctttgttttattaatwatttccactagagggtgttctcaggtcactttgcagtgaagtggacttagttcctccttgttctgtacaaaatgtctccagactttgtaaaggagctgcccagtttggcctcctgtcccgaaaagaccctaataactaggcagagtgttgtcctgctttcttcgtctcgtaggatgtgctatgattggtgccaggcctcactaacacaggggctacctgtctcttattctcagcacctgtgtcctgagatacgctgcctgagacagagagagtccctcattaacagcctgtgtggctgtcagctttttgcctaaattgtgattcagatgcttttgttctctctcctttcacttattgccacagttgaggaaaagtgtcagattaccctgcagcaagacaagccaaggactgggagggaaaaaaaaaccactctggaggcaactgagaaaatcactgcttttggataggaatcagtagggtggctgttttccctttgttgaatctactagagtgacaggaaggactcccagccctttcagtaactatcaggagccctgaaacggtagaggcactgccatccttgtgggatactcaaagcccacagggcttttccctccctattgcatcttctgatgctccccacaccyaccctccacctctccacctctgtggtgttcccatttgtgtgtttcccatctgtggagccagactgagcaatagcttagcagcgagtcagggacagctgccactttccacagagccacaggatgggcagagcagggacccagggaatgaatagccagtggacaaacagtcttgagctctgttcagccagagtgatgggccctgccagttaaggggctgtgtcttcatccttgaagacagatgtgcaatattgaccctgcctctccccagggctttgtggaaagatagttgagggctttagtgagatcacactcagagtggggcaattccagcatttatcctggctgcgtttcattgcattgtctgtgaagtataatttctgggccagaattgctcagttgcatttgatccaggactatagattggaaatgggtcatcattgttttctgttgtgattatagccattctagtaggcgtttaaggtcatggcctgcagaaaatgatgtaagaactagttcttaatctttcagatcaagctaatgatgatatggaaccttgagttcgaattgattggtttacttggaaaaaaacatgtttgaaaattgcaaaagttccgccgggcgcggtggctcatgcctgtaatcccagcactttgggaggccgagacgggcggatcacgaggtcaggagatcgagaccatcttggctaacacggtgaaaccccgtttctactaaaaatacaaaaaattagccaggcgtgttggcgggcgcctgtagtcccagctacctgggcggctgaggcaggagcatggcgtgaacccaggaggcggagcttgcagtgagctgagatcatgccactgcactccaacctgggggacacagcaagactccgtctcaaaaaaaaaaaaagaaaaagaaaattgcaaaagttcctctaaagttaaatcaaaggtggtttgtctagcagagagccagaatcttctaatagtgggcagagcccagagacaaggggaagaaagatgaccttctccccagtccttcccagcaccatttttgtttcacaccaggcttgtggcattttggtgctcacaggggttttgccttctgacctctccttggagtaggccattctcatgcagggctcaccctgaggcaggaggaccaagggctccctgcgtccacggaccacgtatgccttggtggtcactcccatcggggctatcagttctgcactgtgccctggtgcggattttaatgcatatttttatatataaatgttcccaaaggccaaatttgttgccaggttttatacgcaggtcaccataatttgtattatgttccctgagtcaatgaaggttttctttagacttcttaattaaaaagagaagaaagaaaatgttcaccaatggtctggcttctggtttttgctttcctcatacttactgtctgattgtgaactctgatttgtaaatctcagggagaccaaggcagtgacattggacattcaggctgtgcagaggggcacctggtctttggtgatgagtttgggtagggtttgaccagattcgacaggcctttagaaaaggcagcagggactgggcatggtggctcacgcttgtaatcacagtaatttgtgaggccaaggtgagaggattgcttgagcccaggagtttgagaccagcctaagtaacgtagtaagaccccatctctacaaaaaaaattttaaaaagttagctgggcgtggtggtgcatgcctgtagtctcagctactcaggaggctgaggtggaaggatcgcttgaacctagcaggtcgaggctgcagtgaggtatgatcacgccactgcacatccgcctgggcgacagagcgagacactgtctcaaaaaaaaaaacaaaacaaaaaacgttgagggctgcatgtagctacagtggatttgccaagagccagtcagcagtcaggccagattaacctcgtttcatttttctttttcttgatagggtcactgtgctgctagatggagaacatgaggtagattgagtacatgtgggtttcagctaggcattggacaatatatcctatgaacaaggcagagagacgtgggatggataacagtggagttagataaattcctgagagactgagcaggcggtgggagagagctaactgatcagcatgtcagtggcagctgggaaggagcccttagtagcagttggagccctgtcctctgccctttgctccgctggattcaacacctgttattaatgacgcggatgaggcagccaaaatgaaaggtttcatgaaccttggaggaagagcttacaaaatgacaattaggagcctcataaatcaaaaggctgctttgatgggtcaaaagaaaaatgtagtgtgaataaatacaaagcaatacactaaggtcccaaaatcaacagcataaacatcagagagggggagagccatgatgtgacagccatggagataggggggtatgagttttctcagtgactggaatctgacatcacttgtctttatttatttatttattattttttttgagactatgtctcagtgtcgcctgggctagaatggagtggcgtgatctcggctcactgcaacctctgcctcccggattcaaagccattctcctgcctcagcctccccagtagctgggattacaggcacgtaccaccacacctagctaatttttgtatatatatgttttatatatatctcactctgtcgcacgggctagagtgcagtggcgcaatctcggctcactgcaacctctgcttcctgggttcaagcgattctcccaccttagcctcctgagtagctggcattacaggcacccgccactatgcccagctaattttttgtatttttagtagagaaggggtttcaccatgttggccaggctggtctcaaactcctgaccttgagattcacccgccttggcctcccaaagtgctgggattacaggtgtgagccaccgcacctggcataatttttgtatttttagtagagacggggttttaccatgttggccaggctggtctcgaaatcctgacctcaggctatctacccatctgggcctcccaaagtgctgagattacaggcgtgagcccccgtgcctggctgcctttatttcttggagtcagatttattctgctccccaggcaggtggctgaaaattcaatgccagctacctcttgagcaccctcccaaatgtctgggatcacccagaactcctggcctctgtggggccagagccagggatttttgcttaccatctgtaaggtcacctctctgctactggatgctggggtttggccctggaatctgcccttgtcttggacactgctcctctagaagggttcataaagccccttcctggtgacaagtgccagtggggcacagatcctgctactccagtcacatttctgcccagtcttggagcactaccactctacctatgataatgctccatccacctcccctactcaaagcatttcccttcttctctacgctttgcaggacctttgtgctgaatcccactcagggcacctttggaagcttggtgctgacttctggagtcgggtgggaaaagatatgaatatatcctatgttgtcttactaacgcttccgttactcctgtattaaaaccaccaggccaggtgtggtggcttacgcctgtaatcccagcactttgggagaccgagatgggtggatcacttgaggtcaggaattcaagaccagcctggccaacatggtgaaaccctgtctttacaaagaaatacaaaaattagcacctgtaatcccagctacttgggaggctgaggtggcagaatctcttgaacccaggaagcggaggttgcagtgagccgagatcacgccactgcactccagcctggacaacagagcaagactgtgtctcctaaataaacaaataaataaaataaccaacacctgagcctttgacctgggccaaagcttagtctgagtcagtaatgagctccaacttccatgcagattaatatgatctgagctagaatttaatatgatctgagctagaattaacaggagaattagcgtccagaataaggaaggcagaaattctgcccatccctgtcattcttctcatgctgggctggggccagtcctgggcactttcttgccttctttcttttctctagatattaatagaatcagtgtggtgagagatcaagaacatgctgtggatataatatacttggatttcagcaaggcatttgacaacatgctatgaaatatggaatggggccaatcacggtggctcatgcctgttatcccagcactttgggaggtcaaggtgggtggatcacttgagttcaggagttctaggccagcctggccaatatggcaaaaccctgtctctacaaaaatacaaaaattagctgggcgtggtggtgcacaactgtaatcccagcgactcgggaggctgaggcaggagaactacctgaacccgggaggcagagattgcagtcagctaagatcgtgccactgcactccagcctgggtgacagagcgagacttcatctcaaaaaaaaaaaaaaaaaaagaaatatggaatggatgaaaagacaattacaggagcttgctttctatatgcatgtgtgtgcacgcgtgtgtgtttgcattggtaacggctgcagtagagatttccatttctcagtgtaagaaccacactttgaagatgttatcaacaaagtggatcttgtcctgaatgcggttggcagatgggtgggggcacataaagccatgtcagcctggaaaggagagtcacaagaaggctgtcttcgggaagacgggttggacttttttttttaaaacttttttttgcgtgtggcttcaaagggtaaaactaggactaatgggtagaagttatatgtccccaagttgaagctcttagctcaggaaggtttctttcattctttcttttttctttttttttttgagacggagtttcgctcttgtcgcccaggctggagtgcaatggtgcaatctcagctcgctgcaacctctgcctccagggttcaagcgattctcctgcctcagcctcctgagtagctgggattaacaggtgtgtgccaccatgtccagctaatttttgtgtttttagtatagatggggtttcaccatgttggccaggctggttttgaactcctgacctcaggtgatccacctgcctcggcctcccaaagtactgggattacaggcttgagccaccacacctggccagatcaggaaggtttcttagccattagaggaatcagcgagggggatgttcagaatgtctcagttgggggtgagttccttgtgactagaggcattcaagcgaaaagatgattcctcgtcaggaacatgggtgtgaagagtcgcatcagagaggcgttggatgagaagacctctaagggtcttccaatcctgtgattcagttgttctgttattacgggatagtctttcagacctgccccacgggttgggaggacagagtacaagagccgtgttgacatttcttcttgatgtcagactgttgactgtctggccatcttaacaggaacagctgtgattgatattctttttttaaaagattttatgtatacacacacacacacacacacacacacacacacacacacacacactcacagagttgatttcacctcgaaagcccttgaagtgagagggatgacagctcctctctgagccctgcggaccactctgctgctaatggactgtcagcctctttcattatgggctccagactgtgcaggctggtgtaaaaggaatgcctctggcaagaacctggcacttgggttccagccagttgacatttgtgacctgcccttcttcaaactgggacagccctcccactgtgagtgactaagctaggatggcaaatggtggtataaaccaagttgggttcctgcctgaggagggggcaaaggctgagtctgggctcatcaggaggcttgcaaacggcttcctggggtcagggaaaggctgtaattgcaaggcacagactcacttcagaagatgctggagctctgggaggaacagtgagggctttgatcacatgctcccaaccaggctgagtggggtatcacaagttggtctgggcgcttctatgatgttaagggatcccaaggggcagggctctgtgtggtgtgattcaaggggtcctccaaattccgcactcccacggtcctgccatatcctggcccctgtctcccccagcttggcttagaattgcctcccattaggatcacaaatgggtttaacagggaagacaaaagcatagcatgtgttactcacctattattttgccaacatgtttattgtcaatttctcccagtaagtggtaggactagagtataaggaccatgttttcttttccagcccatctcagcactagcacagtgcatggtgcaacagagcaggcagtcagtaactggttgttgaatgactgagttacatgggaagggctgggccctccagggctgactgacaggtgtgagagtttggaccactgcatcacatcagctgtcagtaaggacaggtgagttccacttggggttgggagtagaggagaaccatggcagtaacttattattattattattttgagatggagttttgctcttgtcacccaggctggagtgcaatggcacgatctcggctcgctgcaacctctgcctcctgagttcaagcgattctcctgcctcagcctcccaagcagctgggattacaggcacccaccaccatgcccagctaatttttgtatttgtagtagaaacgggatttcaccatgttggccaggctggtttcgaactgatctcaggtgatccacctgcctcagcctcccaaagtgcttggattacaggcatgagccactgtgcctggccccatggcagtactcttaagagcttttaagatccagctcatattcctggcacgtagaagtctctaaataaataaacgttggatgactggccgagggaatggcagtaataaagctgtcatttgttgaatgctcactatggaccaggcactgttctgatgcttaaatacattcttttagtgctcataacaaccccacgaattggatattaaggtctctttttcataagagaggaaactgaggttcagggagattattaaacttgtctagggtcatctggctagtaagtgatagaaccatgattcaaatcttgctctaattcagtgcaagttcttttattattattatttttaattaaaaaattgagacagggtctcattatgttggccaggctggtctcaaactcctggcctcaagcagtcttaccttggcctcccaaagcgttgggactacaggtgtgagccaccacaccc

SEQ ID NO: 95212 - DNA, 167943 bp, Homo sapiens
acttgaggtcaggagttcgagaccagcctggccaacattgtgaaaccccgtctctactaaaaatacaaaaattaggctggacacagtggctcacacctgtaatcctagcactttgcgaggctgaggcaggcagattacctgaggtcaggagttcaagaccagcctggccaacatggtgaaactttgtctttactaaaaatacaaaaaattagccgggtacagtggggtgcgcctataatcccagctactctgccgaggtgcacacctgtaatcccagctactctggaggctgaggcaggagaattgcttgaacctgggaggcagaggttgcagtgagctgagatcacgccactgcactctagcctgggctacagagcgagacttggtctcaaaaaaaaaaaaaaagtacaaaaattagctggcatggtggcgcacacctgtaatcccagccactcgggaggctgaggcaggagaatcgtttgaacccgggaggtggaggttgcggtgaactgagatcacaccactgcactccgagtgagactccatctcaaaataaaataaaataaatcagggaggaagggagggagagaaatgaaaataaacaaagcttgcagcacattcagcattcatcatgaggtcatgttgaactctgagccatttcctcatagttgtttgctgcctactgtcccagaatcatgcggaccctgtcatcagacaacttaagcttgcaaaacattgttttccacctgaggtattctttcaggtcctgcatatcagtgaaactactgatgacagccattgtgaaagaccccacagggagctaactcaccaaagaatgcagtttctacatcctgatgatttcaccccctttaccccaacccataaacgataccaaatttccagcctctccccctctacaatccccttaaaaaccccagctcaggccgggcacggtggctcactcctgtaatcccagcactttgggaggccgaggtgggcagatcaagaggtcaggagtttgagaccagcctgaccaacacggtgaaaccgtgtctctactagaaatacaaaaattagccgggtatggtggcacacacctataatcccagctactcaaaaggctgaggcacaagaattgcttgaacctgggaggcagaggtggcagtgagctgagatcctgccactgcactccagcctgggcaacagagcgagactctgtctcaagaaaaaacaaamcaaacaaacaaacaaacaaacccagctcagaattccttggggagatggatttgaaggtctcctcctgttacagtagatagctagtcaggcatgagcagagcaggagaggcccccaccccctaaccccaggaatgtcaagcaaccattgggtgatggtcaggcagttgttaagctatctcgctaaaataataattgattgcagctggtgccagagaaaggcagtctcccaaaagatagaaacacctgaaactggtgatcagcagcttcccataagatctcaggagctgggcgagtaggctcaagcatgggcactaagaggcaaaatcgcagatgatcactaacaggcaaaatcgccgatgatcttcctctaggaacactggactggtaagggaaacacatcttgagtgagcatgcccacaactccagtaaacacactgcacatgcgcccctacccaagtgctgacaggccaccatgcatgtggacagcccaccccaagggaagaatcaggggagaagggatgcaagaccctggaagtatgccaaccccgagtcaaggtcaaacagcgcacttgatctctcaggtcaactgcttggttctcttccaagtgtcctttacttcctttcattcctgctctaaagctctttaataaacttcgctcctgttctaaaacttgcctcagtctctcactctgccttatgcccctcagttgaattctttcttctgaggaggcaagaactgagcttgctgcagaccatgtaaattcagcgctggtaacactcccatctcctcagttggctgccctgcgatcactaaactctttctctgctgcagactctgctgtctcattgcattggtcaactgttgctgtgcagcaggcatagaatcctgttggaactacaagagaaagatctacaagatgcagtaaaattttaaaaatgcaaaatagtgcgtatagtataacaaaaggggaaaataaaaatatatgtatgggctgggcatggtggctcgtgcctgtaatcctagcattttgggaggctgaggcaagcggatcaactgaggtcaggagtttgagaccagcttggccaatgtggtgaaaccttgtctctactaaaaataaaaaaattagccacgcatgatggcacagacatgtaatcccagctattggggaagctgaggcaggagaatcactttaacctgggaggcagaggttgcagtgagccaagatcatgccactgcactccagcctgggcgacagagtgagactctgtctcaaaaaaaaaaaaaaaaaaaaaaaggaatatacatacgtatatatttgcttgtttttgcagacagaaaatctagggatgcataagaaactgagaaaatacatagtcaaggggcaagggtggagcaagacttttcatgataaatgtaacttgtttattttgagatttgaatagcgactatattgcatattagaagcttttaatgataaaaatatagatgttgggccaggcacaatggctcacgcctgtaatcccagcactttgggaggctgaagcaggcggatcacctgaggtcaggagttcaagaccagcctggccaacatggcgaaaccctgtctctactaaaaatacaaaaattagctgggtgtggtggcaggtgcctgtaatcccagctactcaggaggctgaggcacgagaatcacttgaacccaggaggcggtggttgtagtgagccgagattgcgccactgcactcctgcctgggtaccagaacgagactccatctaaaaaaaaaaaaaaaaaaaaaaattgaacatcagtgaaaatgtaaaatttagaggaatagttatctcacaggagcaatgaaaagaggctaaatctaaagtagccattattactcgagaggctgaggcaagagaatcgcttaaacctgggaggcagaggttgcagtgaggtgagatggctcccctgcactccagcctgggtgacagagtaagattctgtctcaaaaaaaaggagcaattatatatatatatttatttatatatatatatataatttttttttttgagacagtgtctcactctgtcaactcaggatggaatgcagtggtgcagtggtgagatcacagctcactgcagccttgacctcctgggctcaagtgatcctcccacctcaacctcttaagtagctgggaccacaggtgcatgccaccacaccaactaattttttgcattttttgtagagatgaggtttcaccatgttgcccaggtgggctcaaacaatccacctgcctcagcctcccaaagtgttgggtcactgtgcctggccaatatcatagatattaacaataacaacaacaacaacaaaaaccctgccaaacaaagcattttgttagccacggaatattgacatctttatttgtttatttatttatttatttatttatttatttatttatttatttgagatggagtctcactatgttgcccaggctggtctcaaatgcctgggctcatgcaatcttcctgctttggcctcccaaagtgctgggattacaggtgtgagccaccgcacccagcccaactatctttaatttggcagtttagaccttctgaaaactcatttcttctaccttcacttgtttttattacataagtaattgataatgtataaagaaaaaaagtgtgtctttcccaaattacatcttagttgtgcacatttcccccatgtaaacagagacatataagaaatgcataaatatttttgtaaatggttgtattatacttacattgttgcacaacttgtaatttttaaactagttgtgaaccttttccttcttagcaaatattcatctaattaccactatttattgttattattattatttgagacaggatctttctctgctgcccaggctgcagtgcagtggagatcacagatgactgcaaccttgaagtcatagactcaagtgattctcgtgcctcagccttccaagtagctgggactacaggcatgtgctaccacacacagctaatttttaaatttcttttgtagagacaagggtctcactatgttgctcaggctggtctggaactcctggcctcaagcaatcctgcctcggcctcccaaagtgctgggattccagggatgagccaccatgctaggctctaaattataattattaatggctatgtatttttcttattatgaatgcatcttttttttttttttttttttttttgagatggagtctcgcactgtcaccccagctggagcgcagtggcgcgatctcggctcactgcaacctccgcctgctggcttcaagggattttcctatctcagcctcctgagtagctggcattacaggcacctgccaccacgcctacctttttttttttttttttgtatttttagtaaagacggggtttcactatgttggtcaagctggtctcaaactcctgacctcatgatccgcccgcctcggcctcccaaagtgctgggattacaggtgtgagccaccgcgcccaaacgaatgcatcatattttattggactcctactttgaaatatttaggaattttcagtgtttactatgacaaatagcactgtgattaaaaaaaaatgtagtcaaatccacttttgctgttgatttttttttttttaatctgtagagacatcgtctcgctatgttgcccaggctggtctggaactcctggcctcaagcgatcctcctgctttggcctcccaaagtgcgtgggccaccgtgaccagcagttatttattttctttggttgtgtgtgtgtgtgtgtgtgtgtgtgtgtgtgtgtgtgtgtatgtatgtattgagacggagcttgctctgttgcccaggctagagtgcagtggcacgatctcggtgcatgcaaccttcacctcccgggttcaggcgatactcgtgcctcagcctcccgagtatctgggattacaggcgtgagccaccatgcccagctaatttttgtattttcagtagagacggggggtgcgggtgggggaatttcaccatgttgaccaggctggtctcgactcctgacctacggtgatccgcctgcctcggtctcccaaagtgctggaattatgggcgtgagccaccgcgccgggccagctattgattttttgaaaggatttttaaaaaataatgttgctttgaaaatttttatttatgactagctcttttggttaaaacttggctatggtttctctggagtgatcctgagttggataattttgggaaagttagagaatctaattaaaaacattttcaaatgcttattaattgtaacaaaagagatatcacaggatccataaagagcgctagcccgaaacgtcttttgatgcagtaattcctgggcaccggcatcgctcacattctcctctcagaattacaccgggaggggtcgcgaacctctgctagccgctctcgctgcgatccggagatacccagacaccggactccttgagttcacagcccggatgcagaagggaatcctagcagcgccgtaccggatgtgtgrgtggaagtgactgaggtgaactcacgaccgattggttctcccgagtggacccaagcctgttttcacctgccactggccgcgtggtttgtctatttgaacagtccccgccccctggagaagccgggtcctgaagcttctcttcttcattactattggcctgtttttcagtccatcttctccctatacctgtcgattggtcctcagggctgggaaccctccttccctcsctcccggcttagaggacagcggggaaggcgggcggtggggcasggggcctgaagcggcggtaccggtgctggcggcggcagctgaggccttggccgaagccgcgcggtgagtctagggcctggcacgacccctctagggcggcgtaatgtccagacccacggcyagcctgcccgtgggggggccaggggaagccgcccgtctgggacgtggggtccccacattgccggccccacgacctgggcaccgtctgaggccttgactcccacccctcgaggcaacgcccacctccccgggacccccaagagacccctggacccttcggcccgcggtacgtccgcccgaaggccggcccatcagctctggtattgccctttgggtcttttgcctgtcacagccaccctttcttttgagccacgtataaaaattgtgtatctctgccccagggaacacyagcgtccgtgtcagccccttgtcctccactgtggacacctctcagagatccagtccccgaaactgagcttggttacatcgttggggtacatcttctctccctctcccccagccccatccctgtttcccccatccaatcttaacttccttaagccctatcaacaccattaggatatttgacttcagatatcctaagtttaattgaattcagtctggagcagatggcctgtgggcctcagatcatataaagatacactggttctttcctgagaatagaaatcccttgccagccrccttcccccctttcggacgcacacacatacacacaaactggagtagttttcttagcagggattcttaagtttcttctcccctaaaggatgacatttctttctgcagtcttcttcttggcagtggagtatttgaaagctttacaaaaccaattattcccaggtttttcctctgtgccttacaaattctttcaaaaataagaattttgagaaattggttttgtagcataagctgaacatacttgggataggtgtatgttacacccatggcagtgtgggcataattgaggaatgagggaatgagctcaggaactaattggtgttttttgttttgttttgagacggagtttcgctctgtcgcccaggctggagtgcagtggctcgatctctgctcactgcaagctccgcctcccgggttcccgccattctcctgcctcagcctcccgagtagctgggactacaggcgcccgccaccatacggctaatttttttttttttttgtatttttagtagaggcgggatttcaccgtgttggccaggatggtctcgatttcctgacctcgtgatccgcccgcctcggcctcccaaacccggccaggaactaattactttcttttagcttacatttgaagagctagtcccctgtagaactgcgttgttcagtacaagaaccaccagccacatgtggctgtggagcacttgaaatgtgactagtccaggccgggcatggtggctcacacctgtaatcccagcactttgggaggccaaggcgggcagatcacctgaggtcaggaatttgagaccagcctggccaacataataaaaccccatctctactaaaaacacacaaaaattagccaggcgtggtgctgcacatctgtagtcccagctactcgggaagctgaggcaggagaatcatttgaacccgggaggtggatgttgcagtgagccgagatcatgccactgcactccagcctgggtgacagagcgagactctgtctcaaaaaaaaaaaaaaaaatgactagtccaaattgacattgttgtaagtgtaaaatgcacattagattttgaagactcgctaaaaaaaaagaatggacactatatcaattttttaaatattgataacatgttgaaatgatattttggatatattggtttaggtaattaatttcacctgtttctttttaccttttaaaatatggctacaagcagccttaaaattacatttgtggatcattgtatttcctcttttttttttttttaattgagatggagttttgctcttgttgcccaggctgtagtgcaatggcccaatctcagctcactgcaacctctgcctcctgggttcaagtgattctcctgcctcaacctcccaagtagctggggttacaggcacgcactgccacgcctggctaattttgtatttttagtagagacggggtttcaccatattgcccaggctggtctcaaactcctgacctcaggtgatctgcccaccttgggctcccaaagtgcygggattacaggcgtgagccastgtgcccggcctaaatttccattagatagtgctgctgtagaataataatctctctttttagactgaacttgaggaaaggggcagtcttagtcatttttaattctttccctacctcctgacatttgttacctggcattttgccatgtacatagtagtagtagtagtaataataatagctaacaattattaagaacttagtatatgccctgcactgttttaaacactttttgacacgtattaagtcatttagttctcacatcaacccatgaactaggtactattatcttcctattgtagttgaagaaacacattttgagtgtctttcttgaggtatataaccttgtttttgttttcgtttgtttttgttttgagacagtgcagtggcaggatctcggctcactgcagcctctacctcccaggttcaagggattctcctgcctcagcctcctgggtgacacatgccaccacgcccagctaatttttgtatttttcatagagatgggttttcaccatgttgggcaggctggtctcaaattcctgacctcaggtggtcctccaggctcagcctcccaaactgctcaaggtatataacccaaggattcaaacccaagtaggctaggccgatagcccacaatttaacctccctactacactgcctcttttaaacatcagtcattgtttaatgaatctaggctttctaaatgttcctcaatcagatctctcaacctttttagaatccccygcctgacaagggctagggggagatctgtgttgggtgaccagggccataagtaaatttatcatcatactttcttatccagaatattaaaggaaacttctctctaaagaacctcagggcaagatgcttggaaccggacctgccgccgccaccaccgctgccaccacatctagcaatgtgagcgtcctgcagcagtttgccagtggcctaaagagccggaatgaggaaaccagggccaaagccgccaaggagctccagcactatgtcaccatggaactccgagaggtgcttctgggatctggggccagtcattgtgggatgtgtgggctaaatgtaccatcactggtttacatttttttttgtacagctaagtgaggatttggaaaacagagattattttataaaggcacccaacctgtcacatccataaaacatgcaggttcttttgcagcagttgcacatttttgtagcatttttcttgtttgtggtcacattttaggggccagaatagacttagctgtttcttttaactttttattttttccttaccacataccacaccctcaaatgctttctgtctgataacagtgattgggatgggtttggagagttgagagctaggggctttctaaatagagaccagacttgaggtcagagacagtatcttgtttctccttttatccctggtactagaaagaacctaggacaggacattttctgccacagagtagatacctaataaatatttgttaaataatcagatgattgcaagttcaggtactctacagtgtaatcctatagaaatgggcagtaacttgtcttctttsgtttgaactatacctcctgcctctcaggatctaatctttagatgccagcccactcccaccaccacagttagagaattattagaaattgttctgattatatcttcttttgcagatgagtcaagaggagtctactcgcttctatgaccaactgaaccatcacatttttgaattggtttccagctcagatgccaatgagaggaaaggtggcatcttggccataggtaaggacagagtctctggtcacaaaaacaacacactcacctttgtgcccactgcaccctgtgtctgccacttactggatactagttcatatttgcttaatgaaatttaagaagcccgtggcttttaattctagcagcagccctgggccacaggaaaaacgtatttttagatgtggaagtggagtctcggaaccatcgagtgacttttcagacagtttaccagagctgagactagaagccagctttctttccactccttcatattgccttttgtgggctctgcttcctcagtagagcagggtttcacatagtggggctcacgaatggaaaagtggaatcggtatagttaataaaaggcaggtctttttttttttttttgagatggagtctcactcttgccggggctggagttcagtggtgcaatcttggcttgctgcaacctccgcctcctgggttcaagcgattctcgtgcctcagcctcccgagtagctgggattacaggcacctgccaccatgcccagctaatgtttgtattttcagtagagacagggtttcaccatgttgggcaggctggtctcgaactcctgacctcaagtgatctgcccacctcagcctcccagagtgctgggattacaggtgtgagccaccacaactggccaggcaggtcatttttaacttctaaggactggtcatcagtcctgtgaattattatccagtcccagttgttttccctttttggggggtaggggagaaaattatactagcatgagattattttgctttatgtaaatatttctggcacaagtattaaatatctgggttaaaatgaaaattgtatctgtccttgccatctagaaatgtactcaaagtagaatggagggttcactcgccagattttttttttttttttttttttttctctgagacagagtctcactctgtcgcccaggctggagtgcaatggtgcagtctcggcttactgcaacctctgcctcccaggtccaagcaattctcctgcctcagcctcccaagtagctgggattacaggcgtgtgccaccacgcctggctaatttttttgttttcttttttttttttttttttttgtatcttagtagagacggggtttcaccatgttgcccaggctggtctcaaactcctgagctcaggcaatccgcccgcctcagcctcccaaagtgctaggattacagacttgagccaccatgcctggccggcactcaccagcttttagttgaagtctgcgtactttcctggccagcatacgccccatcatcaccttttgccttcctctcttttgcagctagcctcataggagtggaaggtgggaatgccacccgaattggcagatttgccaactatcttcggaacctcctcccctccaatgacccagttgtcatggaaatggcatccaaggccattggccgtcttgccatggcaggggacacttttaccgctgagtacgtggaatttgaggtgaagcgagccctggaatggctgggtgctgaccgcaatgagggccggagacatgcagctgtgagtgtctacagggaggagcacagccaggcttggggaacgatggtgtcatgggggggtcttttgcttccttctgaggctcattccttaaaaaagctggttagaagagctaggattccaggctgtgagatggggtagagtccgtccttaagagggaatctagcatggtgtggtggggatcagaagcatcagctgcgtgctttccagtctgctgcccttcggaggaggcagtactgtgaggagggggcacggtaccaggaaaaggacacacacttggaccctggctcaagtcttggctttgcaacttcctacctaactctgtaacctggggcagcttctgaccttcagtttcttcctctgtcaaataaaaataacaacaggattaaacattaaacaggattatccattcagtaaatatttactacatacctactgtattccaggtagagttctaggctgttagtatagtggtaaagaaaacataaaacacatctgcacttccagaacttatgttcaaacattacaagcattctgtgtttgtaaacaacctaggataatgagcactgagatgtttaatcaattttgctttccttcctctgtcctcagaatttcctagctagaagagtgagcaagccttctctgttcctggtgtgtatggctctaagatgacaagagactgtactcctgagagaacaaaactctggtaccaatgagagttctcggtttgcttttttctccaggtcctggttctccgtgagctggccatcagcgtccctaccttcttcttccagcaagtgcaacccttctttgacaacatttttgtggccgtgtgggaccccaaacaggccatccgtgagggagctgtagccgcccttcgtgcctgtctgattctcacaacccagcgtgagccgaaggagatgcagaagcctcagtggtacagggtaaggagatggctccattcccaccactagcaaagcacatctgcgtagagaatcacctggcctaaagggcagccacaagcccttgccatggagcaagaatcacgttttggtttgctctcaaatgaattttttttttttttttttttgtgatggagtcttgctttgtcgcccaggctggagtgcagtggcgcaatctcggctcactgcaacctccgcctcttgggttcaagcgattttctcccaccttagcctcccgaatagctaggactacaggcgtgtgccaccacgcccagctaatttttgtaatagagacagggttttgccatgttggccaggctggtcttgaattcctgacctcaggtgatccacctgccttggcctctcaaagtgctgggattacagacatgagctaccgcgcctggcctccaatgaattttttatgctcagtatgaatcaatagttactttattgcattttattaaagcaaacatctattgatagccataccattattctatacattattttatgtatgactaagaatgcaaatatgccaattaaactgtgacttggtacctctttctttttttttttttttttttttttttttggagatggagtcttgttctgtcaccaagctggagtttagtggtgtgattttgtctcactgtagcctctgcctcctgggttcaagtgattctcctgcctcagcctcccgagtagctgggactacaggcatgtgccatcacgcccagccaatttttgtgtttttagtagagacagggtttcaccatattggccaggatggtcttgatctcttgacctcatgatccacctgccttgacctcccaaagtgctgggattacaggcatgagccactgtgcccggccaactttgtaccttcttcttattaataattaattataagacatctcagctggatgctcacgcctgtaatcccaacattttgggaggccaaggcaggaggattgcttgagctcaggagtttgagaccagcctgggcagcatgtgggatcccgtctctacaaaaaataaaaaaattagctgggcctggtgttacacgcctgtggtcccagctatttgggaggctgaggcgggagaattgcttgagcccaagagatcaaggctgcagtgagtcatgatcatgccactgcactccagacttgacaacagagtgagactctgtctcaaaaaaaaaaaaaagacatctcttttcagagatgttaaaatacggaaaaataggtgtctcaaaatcagtgagatacaaatgatactaatttagaaagtgccatttctctctgctctagtataatgaggcctgtgctgattactgctgcagagggaacttatcagtgagtcttatattagaaataagagctctgaacatgggattgggagatgcgggttccagtcttgcctttgctgtgtgatcttggacaagtcacttaaattctttgagcctgtgtttttagctgttaaatagggatgatgatggtatcttcctcaaaggcttattatgagaattgaagctggggctgggcgtggtggcttacacctgtaatcacagcactttgggaggctgagatgggtggatcacttgaggtcaggagtttgagaccagcctggttaacatggtgaagccctgtctctactaaaaatacaaaaattagccaggcgtggtagtgtgtgcctgtaatctcagctactcagggggctgaggcaggagaatcacttgaacccaggaggtggaggttgtggagagccgagattgcgccactgcactccagcctgggcaatagagcaagactccatctcaaaaaaaaaaaattgaagctgaattaaataaaagagattgatcagttagttttgttgatgactggcactaggcactgagcaggcgtggtagcacctcagaacccccagtgtagatgggatgggcctgtattctttctgggtttgtactctgtctctaatgaaggcaccctgtctctctacatagcacacatttgaagaagcagagaagggatttgatgagaccttggccaaagagaagggcatgaatcgggatgatcggatccatggagccttgttgatccttaacgagctggtccgaatcagcagcatggagggagaggtgagaagccacggcagaggggagtccaggctccccgtgtaccattctgtgagcgaggcaaggcgagatccatgtcctcatggagctgacattttgtggcaggaaacataataaataagtaaataagataatttcagatagcagcaagttctatgaagaaagtcaaaccagaatagaatagagagtgatggggagggggtgagtggagggtcaaggaaggccctccctgaggtggtgttatttgacgggggtccacatgacacgaaggagctaccttgcagcaggccgggggactgtgttccaggctgaggctttgaggtggaagagtgtgagacattgatgaaacagaagaaagggaagtatggctggtgtaccgggagcaagggagagggaaggaggggccaaattaataggcccacggttcacagtaaacacgagctttcacaggggtaaacattggaagtatgcacacaggcgaataatgtgatgtcatgcgtttctaacaatcactgactgcttataggaaaaaatgtggggaaaggcaggaatgaaagcagggagaccaattaggagatgtgttggcttgagaaggtggatttaaaagtgcatggattttattagggaaacagccttcaagagaatatggggagggagctgggagaagcatcggaccacaatgcacatctgaccctgagtaagcaagagggtaaaattcggatagaagtgttctagcctactctgcagggccaccgcggggtcctcaagccaaagttggctgtcagagaggtctgtgtctcccaagagcaggatagccttagcatccctactgtgttctgtcattggctgggagcaatgggtgacgttggcacaaacttagtgatgggtttcagagcagcagctggggcccttggttatgcgccttgtagttggaggttgcattctcacggctgccagacgaagctattacggtagtctgggtgagtgacagtggtggctttgactaggagtggtggcacagatactgagaagtagttgattcaggatatatttgggaggtaaagctccatctgtgagactggctgtagaaaatgagctgtgaaattttaccccggggattcctgcttataatagacacagtgcttgttagataatagccatgcccagatgtgggagcagcgcatgcagcagtgtgcagaagcaggaggagtctggcttcagatccccaccgctctgatgactgtgcgactcaggcaagttacctgtttagcctcatttttctccctttggacaggggctcttacctacctcattgggctcttgtgcggtttctatatgatgttgrctctctatatccatgagttctacatctggattcaactagtcatggttcacaaatacccagggctgggtgcagtggcccacacctgcaatttcagcactttgggaggctgaagtgggaagatcacttgatcccaggagttcgtgaccagcctgggcaaaagacggtgagaccgtgtctctacaaaaaaatttttttaactttttaaaaagaaaaaaaaaatcaaggaaaaaacaaacaatttaaagataatacaaatttttaaaaatacagtgcaacaaatatttacatagcatttactttgtataaggtgttataactaacatagagatgatttaaagtatgtgggaagctatacataggttatatgcaaatactatgctactttatcggagggacttgagcatctgcagattttggtatcgcagtgggtcatggaaccaacccccatggatactaaggggatgactatgtgtgtgaagtgtccagcacagcacctaatacatagtgggcattctataaatggtaaccttcagattttacctcctgagtttaacataatgttttccactgtaatctaggcacctctgagatctttgtttcctcccattaaaacaggacagtatcacctagctcatagagtggttgtcagatttcattgaaatagttcttgtgcaggtggtttgtaaattataagaaactatccrrggctgggcatggtggctcatgcctgtartccaatccaagcattctgggagaccgaggtgggagtttgagctcaggagtttgagaccagcctgggcaacataatgagaccttgtcactaaaaaaaaaaaaaaaaaaagaaactatctaaatataaggtattaaaatttcataatttgttcattcattcaacacatattaattgagcacctagtatatgccagctacactgtgtcctaagagctagaataatccagcagtgaacaaaatagattccattcttataagggaagatagataatatacaagtaaaaacctattatatatcatatggttataagagctatggagaaaagtagggcaaggaaggggaatagagtatgctcacctggattraggattacattttaaaacacggtgctatttgagcacagccatgaaggaggttagaaaaaagccctacaggtatctggggaagagcattctaggcagtggtccctgaggcaggagcgtgctggtgtattagaggagcagcaaatactgcagtagcagctcccctaccrtggctgagcagagtgagcaggagaagtgtgtggggatatggggtcagaggaacacctaagggaaggagggggcatatcacatagggcctttgtgtgggaagcgggaagctataagtgggctttgagcagtggagtgacatttaactcatatttcaaaaggatcactcttgccattgtgttgagaatggattgttagagggtcaaggactaaagccaggaatccagttaggagggaattgccatggtcttagtgggggatatttgtggctcagaccacagtgggagctatggagttgcaagaagcaactggattctgaatttgggatttgctgatggtttggaggtagatggagagaaagaagtgtcaaggtgtttggcctgagtattaggaggatgaagttgccattcactgcagtgggaagactgaaatgggagcagcaggcttgcgggagaagactgggaatttggttttgaacctgttaacttagagacctgttgggcacctgagtgaggatactgaatagttctggggagagagctgggcaagggggatggatttgggcattgtcagcgtatagatgttatttcatcatgagactgggtgagaagcacagggaactagtacagttggagaagagatggagtctgcaaacctgaggtcaggagatgaagaggaccaaggcagatggggaaggaacagccagggagggaggaggagagccaggagagtttagagtctgagaagccaggtgaagaaagggcgtcaaggaggtggaagtatcagttggatgaaatgctgcagataagtcaaataagatgaggactaagaattgaccattggatttagcagcttaagactcactggttgaggggcgcctctgcccggccgcccctactgggaagtgaggagcccctctgcccggccagccgccccgtccgggagggaggttggggggtcagccccccgcccggccagccgccctgtccgggaggtgaggggcgcctctgcccggccgcccctactgggaagtgaggagcccctctgcccggccagccgccccgtccgggagggaggtgggggggtcagccccccgcccggccagccaccccgtccgggaggtgaggggcgcctctgcccggccgcccctgctgggaagtgaggagcccctctgcccggccaccaccccgtctgggaggtgtgcccagcggctcattgagaacgggccatgatgacagtggcggttttgtggaatagaaagggggcaaaggtggggaaaagattgagaaatcggatggttgccgtgtctgtgtagaaagaggtagacatgggagacttttcattttgttctgtactaagaaaaattcttctgccttgggatcctgttgatctgtgaccttacccccaaccctgtgctctctgaaacatgtgctgtgtccactcagggttaaatggattaagggcggtgcaagatgtgctttgttaaacagatgcttgaaggcagcatgctcattaagagtcatcaccactccctaatctcaagtacccagggacacaaacactgcggaaggccgcagggtcctctgcctaggaaaaccagagacctttgttcacttgtttatctgctgaccttccctccactattgtcccatgaccctgccaaatccccctctgcgagaaacacccaagaatgatcaataaaaaataaataaataaataaataaataaagatggagtgttttagtttcaaaaaaaaaaagactcactggtgactttgacgagaggacaagattttctgaaaagtgaaaatatgtgtgtcaagaaaagtttagaagtttggaaaacttgtatctccttctcaatttggagtcttggaggatgagtagtccccaacccccctcccctggcccccaaaaccaaggcttgctctgctgcccaggctggagtacagttggtgtgatctcggctcactgcaacctccgcctcctgggttcaagcaattctcctgcctcagcctcccgagtagctgggagtacaggcatgtgccaccacacccagctaatttttgtatttttagtagaaacgggttttcaccatgttggtcagactggtctcgaactcctgacctcatgatctgcccacctaggcctcccaaagtgctgggattacaggcgtgagcccttgcrcctgactcaggatgagtgattaagcagcccattgtaaaggtaatagacatgagttctcagtcagcttattccatactacctgtggaatcctaggattctgagaaaattatttggttaagtttttgttttttgtttttttgagacagatttccctcttgtcgcccaggctagagtgcagtggtgcaatcttggctcactgcaacctctgcctgctgggttcaagtgattctcctgcctcagcccccgagtagccaggactacaggtgcccaccaccacgcccagctaattttttgtatttttaatagggacggggtttcaccatgttggccaggctgggcttgaactcctgacctcaggtgatctgcccaccttggcctcccaaagtaccggaattacaggcatgagccaccacgcctggcctgcataagtttttacctgggtttctagggagaagaaagagatcagacagtccttaacaggatgctggcaggggagctcccatcacctttgcaagcctcattgcagtggcctaggtcagtagtcacagcagtatgcaagtcagcccttccaaaccaagtgaggagtcctgggaggtgagaacccttggcaaggcagccctctgctgctgctttattgttcaataggtggtgctcttctgcctaacttagaacaaaatcaggtcccttgcaaggttctggggaaattgtaaccctaaacatgaagagtggccacccttcactttggaagtagttgcgtttcgggattaggcaaatgtaattgtctgtagaatccacagtgcccagtttgaatgccagtcataagtaaagatgatttttttcctcctcatatatatagcgtctgagagaagaaatggaagaaatcacacagcagcagctggtacacgacaagtactgcaaagatctcatgggcttcggaacaaaacctcgtcacattacccccttcaccagtttccaggctgtacagccccagcagtcaaatgccttggtggggctgctggggtacagctctcaccaaggcctcatgggatttgggacctcccccagtccagctaagtccaccctggtggagagccggtgttgcagagacttgatggaggagaaatttgatcaggtaagtggtgagaggccctttccctcttttcctaagctccacacctcacttttcccctgccaaccctttatccttcctctctcaggtgtgccagtgggtgctgaaatgcaggaatagcaagaactcgctgatccaaatgacaatccttaatttgttgccccgcttggctgcattccgaccttctgccttcacaggtgaggatgtccatggaagacatcattacccatctcagggtaaacagggaacaggtgattccagaaaagccaaatatcttttcctttgaagcaacgccaacaaatctctgatttctttgtctcatgtccaatttcaatgctatttagttcaggttttctaatgtcagaggcagcagacacaggaacaatcagaacagagaggcaattctatggccaagcaaattttcatgtatggatgccaacaagttcacaagtagacttaaaagagaccaaaggaagggcagttttgatgtagctactgtgcagcatctacgtcaaagctttgtgagtcagggagggtttggggatcgtcctgcttctgtccctgaggtggtcaccaagctgcctcaccacttgcaggcagcatcaatccttggctcctgaagctggcccaactcagagtccaacttctcaacgaagccttcctagattgctccagctgtaaatgtccttgccttcttccatcatagccctcagctgtggaaaggtttggcatcagacctgagatgaaccccacctccgcccttaaccatgaggttttggacagattatttgacctacctgggcctcagcttcctgacttgtaaaatcagaataacaatctctgcctcccaagatgagcagcattaatgtctcagcatctactatagtgcctggcacagagccctaataagtggaaaccattatatattattacagcctcctcaagctacttcaaatatgttttggaaatagggtagaggtaaaatttataatgctcyagttgcctgttcatacttaatgtccttgtcttacctctctacttgctgagtgtaggcacccagtcttgaacatctcttcccactttaccgtggtgctcattgcctgtgcttagtgaagcattcaggacccattgagagccaggaacataagcaaaaggccagcctggccctcagcagaccctattccctagcacacagactcacttcacgccacccagcccagacaaaccacaggagaaatgtagctggtcaggtgttaaacacgctgttcgaaagaagtagaacgtgttgggtgaggacatgacaattcgccacataaaaccactgaaccagagagaaataacagaaggaaaatcacccgtattttgttagtttctattgttctggcctggcacccagcagcttttctcttttttaatgaccagacaggctgctgttcagtagagctttaaatgatcttggattgaaagtctgtggttcaaaaggaactaataactaggccaaatttgatcaaagtctggcacattacccttgtaagttacccttgtaagttcagaaggctgcctagcagcaggatacaaaggctcagagggccctagatttsttcttttgatgtgggtgtttgttattgttgttgctctcttttttaaggttagtcaaggttgttttattaaatatgctaaaatatgccagtgacattcagcctgggcacaccgtataagtatttgcttcattgcataagtactatttgtttaaagcttgcagtttggaagttattgcttaaacttctcaatgttataagctttagaaatataaaaaaatactccaagactgaactagaatctctacagtcagatttctaatctcaggatgctaaatccaggaaagaaaattatactctcttggggttttttttgagacagggtcttgctgtgtcacccaggctgaagtgcagtaatgcgatctcagctcgctgcagccatgacctactgagctcaagcgatcctctcacctcagcctcccaagtaggtaggaccacaggcatgagtctccactcctggctaattttttaaatttattttttgtagagatgatttgggatctcactgtgttgcccaggctggtcttgaactcctgggctcaagcaattctcctgccttggcctcccaaagtgcttgggattacagacatgagctgtggcgccttgccaggaaattatrctcttgattttaccccgtttcctgccgaaatgctatccccttagtttttcttgttgacccactctaattttagggttgtatctccttggtcacctgtcttcaagccccagcatgcctcattgtcatttgaccacaagagccatgggagaaaacatttctcagagtaaatgcagtcatagcatgtgctattttagaagtctaattcattgtctaaatgtggttctggtagctttcagtatccctaacttcctaagggatgtgtggttttcccttctctcctattttatgtgtactactggtgcctggacttgggaccaacatcaatggaagagaagaaataaatagacaagaagcaagaatcaggaaattccagccttcagaggagaaataacactttagcttggattgtatgagaatcgcctacccatgcacactggcttatgtgaacctaatgaaaatatacatgtggctttccaaattatagactaaatcttcttctattaaatataactgtcataaaaatctctaggtaatagcaaaatgatttccaggcctatgctgaatggaatggcctgtttattgcaaacagtgctcagtattacagtcatatattgcttaacgatggggatacattctgagaaatgcgtcttaggagaatttgtccttgtgtgaacatcatagaatgtatttacataaacccagatggtatagcctactctacacctagctctgtggtgtagcctattgctcctgggctacaacttgtacagcatgttactgtaatgaataytctaggcaactgtaaaacagtggtaaatgtttgtgtatctaaacatagacatagaaaagatatgtaaaaatatactgtattataatcttatgggaccaccatcatatacatggtccattgttaacccaaacgttgttaagtggcacacgactgtactgtttttttgtttgtttgtttgtttttctgagacagagtcttgctctgttgcccaggctggagtgcagtggcacgatcttggctcactgcaacctctgcctcccgggttcaagtgattctcctgcgtcagccttccgagtagctgggattacaggcgcactaccatgcctggctaattttttgtatttcagtagagacggggtttcatcatgttgtgcaggctggtctcaaactcctgagctcaggcagtccacccgccttggcctcccaaagtgttgggattacaggcgtgagccaccgcscccgaccctgtactggttttttattagtttgagatggggtcttttttttttttttttttttaaatgagatgtagttttgctcttgttgcccaggctggagtggaatggcgtgatctcggctcaccgcaacctccgcctcccgggttcaagcgattctcctgcctcagtctcctgagtagctaggattacaggcatgcacccttatgtccggctaattttgtatttttagtagagatggggtttctttatgttggttaggctggtttcaaactcctgacctcaggtgatcctcctgccttggtgtcccaaagtgctgggattacaggcatgagccactgcatctgagacagggtcttattctgttgcccaggctggagtgcatggctcttggctcagtgcggcctcaaactcctggactcaagtgatgttcctcagcctcccaaagtgctgggattacatgtgtgagacactgcacccggcccatgactgtacttcaaatttcattataatgtaaaattgtttagatgatcttctgtttttaaacaaggtttgacatatatttcttcagcaagagcatgtaattcttgtgtgaaaatgtaacagtaatggagacaattctgtgatattgttttggcaaccttttacgttttttgggtttttttttttttttgagacaggctctttgtcactcaggcttgagtgcagtgctgcacacgatcacacctttctgcagcctcaaccatctgggctcaagtgatcctcctgcctcagcctcccgagtagctgggattacaggcatgcaccaccacacctggctaatttttatttttgtagagacagggtctcactgtgttgcccaggctgtttcgaactcctggcctcaaacactcctctctccttggcctcccaaagtgttgggattacaggtgtgagccactgtgcctggccactttcttaatttattcttaaactgaattgctttataggacctttgactgttgatatgtagaccctaaccctgacctggagctatctactttgtcttttctgtgctcagatacccagtatctccaagataccatgaaccatgtcctaagctgtgtcaagaaggagaaggaacgtacagcggccttccaagccctggggctactttctgtggctgtgaggtctgagtttaaggtctatttgcctcgcgtgctggacatcatccgagcggccctgcccccaaaggacttcgcccataagtaagcacctctgttatgatttcaccttccactccatttggttggagaggaaggacgctctatttcagatccacggagcttacgcccattttttgcatcattaaactccagggtatagcaaatcatatgaagaacagcccttccttagttgaattctaagcttttccaaatgaaataacatatatgaaatatttggggaggttgaataccctgagaacatgtgagatgccaatgctattttcagtgttattatttactgggaatctgctagttttgcttttttctctggcttttaaaagtcttattttgatataagacctaaagagaggaatccttgactggaactgaagggacctaagggtcatctttttcctcatcgctgaagttgaataagttattccacctctttaaacctcctggcgaataaaatatgagaaaacccctcagcatcctgccagatggagagactggggtgtcttcgctaaggcgagggggtcagtgttcatcatcctttgtctcaggttgtctttatacttccctgtttattagcgaagattgctgtggtgaattaatacgccccactcattctttttttttttttttttttttttttgagatggagtcttactttggttgcccaggccggagtgcagtggcacggtcttgggtcactgcaacctcctcctctcaggttcaagcgattctcctgcctcagcctcctgagtagctgggattacaggcatgtgccactatgccaagctaataattgtatttttttgtagacacaggttttcaccattttggccgggctggtctcgaactcctggcctcaagtgatccacccaccttagcctcccaagtagctgggactacaggcgtgtgccagcacgcccagctaatttttgtatttttagtagaggcggggtttcaccatgttggccaggctggtctcgaactcctgacctcaggtgatccacccacctccgcctcccagagtgctgggattacaggcgtgagtcgctgcgcctggccccattctaaagcccagcattctcatcatagaagaatttctttccatatgatggctgtgtactgccttcttgtctctgatgaacacattgttcagctctcttcctacataattatcttggtgagcaccacaataacccatatggtatagctgtgtgaattcagaaaaaaggccccttccttaagacactttactgccatctgctggattgttgtagaaatgtacaaatctacagtaattgtgatgtgatgggtccctttgaactgtgctctggacaatttgcatacccatctgtggtakccctgcctgagtaacctgctctccttgccccaaggtgattttgaggtgggacattaaagaatgtcattatgtctcaactagccactctccatttctctacaggaggcagaaggcaatgcaggtggaygccacagtcttcacttgcatcagcatgctggctcgagcaatggggccaggcatccagcaggatatcaaggagctgctggagcccatgctggcagtgggactaaggtgggtgtcagaaacctgagcttgccctgtatcagcgtgaggcttggcccccagtgttgggactgttaaaagaatgaggcatggttgtttgcacattcaactggatggacaggatagcttagactaaacacacaggctagtactgaatcctagtttcatcactagctttctatatgatcttgactaagttatttaatttccccgagcctcatttttttttttttttttttttgagaaggggtctcgctctgtcgcccaggctggagtgcagtggcccagtcttggctcactgcaagctccgcctcccgggttcacgccattctcctgcctcagcctcctgagtagctgggactacaggcgcctgccaccacgcctggctaattctttgtatttttagtagagttggggtttcastgtgttagccaggatggtctcgatctcctgaccttgtgatccgcccacctcggctcccaaagtgctgagattacaggtgtgagccaccgcgcctggcctcattttttttttttaatctgaaaagtgggtgcagtagtaattcttattgcctagggttgctgtgggttcatggtatagtcactcttagcaccatgcctggcatataggaagtactcaataaatatttgcaaatattgtgtatattattattgagcaagttgcttaagcttcctaaactaagttctcttcatctgtaaaataaggacagtgttcttaatctgcttcccagagtgtttgttgagacttggtcttctgtagtggctgaattatagtgagcaagtcttctgtggcaagaaccagaaactcatagattgtttggagacctgagactaagccaagagagtttacacttttattcttattttataatatcctttctactctgaagaacagaggcctgatccccttgctgggagagaaagctgtttcttcccaagaacagactgagtgtcatgtgcccagcccttatgtgacttgtttccttcccctcagccctgccctcactgcagtgctctacgacctgagccgtcagattccacagctaaagaaggacattcaagatgggctactgaaaatgctgtccctggtccttatgcacaaaccccttcgccacccaggcatgcccaagggcctggcccatcagctggcctctcctggcctcacgaccctccctgaggccagcgatgtgggcagcatcactcttgccctccgaacgcttggcagctttgaatttgaaggtaagaaattacaacggctcttgccaagatagtgagagatgctggaaactttgggaaaggaatgaaggtatctaggattcctggatcttgctggggtgctaaagacagggtagctgattctgtagcagctcatccttcctagactctttccacgtattggtaattcctacttttgtttctttgtcccatactgagtttgggggcaaatggtttgagggaaagtatacrttgatccaaggaaataatgcttcagagacagatccccctcacatcctcacttttccacttctttgtagctgagatgrtatgtaatgctttaaaatgtataagtaggggcttttgggtgtttccatgtctatggcagtatgatttcttttttctttcttttttttttttttttgagacaaagtctctctgttgcccaggctgatgtgcagtggcacaatctcagctcactgcaacctctgcctcctgggttcaagcgattctcctgccacagcctcccgagtagctgggactataggcgcgtgtcaccacacccggctaatttttgtatttttggtagagatggggtttcaccatgttggccaggttggtctggaactcctgacctcaagtgatctgcctgcctcgacctcccaaagtgctgggattatatccatgagccactgtgcccggctggcggtatgatttctaaaagtaccatactgtgtagttctaaactgcaaataaacccataataataccccacagagatatatttcagggggagaagttgatacttttgaaatttaagatcatataggtagtattggtcaagaatgtggggaaacaagcaagtacagaaarcctgaacatgctgtctggagacagccacccatggtttctctattgcagttcctccacttaacattgattcacacccatgataatttatttctagtgaatagaaagtagctatgtttaaacccagcctacacagactctttgtctggtatttaaatccgggaactaaaagaggcaaggtaaatttgatcaagaattgtattatcctctgagaatgtaaggggttgagttggaataaaacaaaataatttattatttaaagggaatataaaaaggctaggattgggggataccttttatctgtctctttgctccttcaccacccccttttacctttctgctgattgaaatcccccttgttaccctttaaaagttctgggtcaggcctggcgcggtggcttacgcctataatcccagcactttgggaggccgaggcgggcggatcacaaggtcaggagatcgagaccatcctagctaacatggtgaaacgctgtctctaataaaaataccaaaaaaaaaaaaaaaaaattagccaggcgtggtggtaggcacctgtagtcccagctactcaggaggctgaggcaggagaatggtgtgaacccgggaggcggagcctgcagtgagtggagattgcgccactgcactccagcctgggcgacagagcaagactccgtctcaaaaaaaaaaaaaaagaagagttccgggtcagtatcgtattgatcaatrtctagttgaaagtagaattagtagcctcaaaatggaaaattcagctagcaagctgcagacctacctgtctacagcagcagtgtttattctgttttctctctgcctttctatccaggccactctctgacccaatttgttcgccactgtgcggatcatttcctgaacagtgagcacaaggagatccgcatggaggctgcccgcacctgctcccgcctgctcacaccctccatccacctcatcagtggccatgctcatgtggttagccagaccgcagtgcaagtggtggcagatgtgcttagcaaactgctcgtagttgggataacagatcctggtaaggcttgccagacagaaggaatctaggggagttaaggagcttaggacaattgggagtagccagtttcattacatggcctctctagagttcttcggctcaaaaagctgatattcagctatttctctgccaaggcgtgttaggcatggctactgtagcctttggtgtaagataatctacctttaattcttttgtcttttactcttgtgagtagagaaaagaatgacagaggttagatgagaaaaagcatctggaatcttcccactacgctgatggcagtggaggtagaagctgggaagggctggagtgatgggatcatgaggaaatgttcaaaggctccattgctcttgcagaccctgacattcgctactgtgtcttggcgtccctggacgagcgctttgatgcacacctggcccaggcggagaacttgcaggccttgtttgtggctctgaatgaccaggtgtttgagatccgggagctggccatctgcactgtgggccgactcagtagcatgaaccctgcctttgtcatgcctttcctgcgcaagatgctcatccaggtaaccgaggtgatggccagacccacaggcagggaagacaggactctcgctgtgagaactgcttgaggaagcggagttgaggacaaggatgggggagaaagattgaggtacctggtaaaagccgcatttgtctgcaarggtccaaatgtttccctggctttataatggcagttccagtgctcatcacctcatgagccctttgtcaatatgactctaaggtggttcagagtcctctcatgcagctctttctttttcctggcaagtcaccagtgatcccatttcttggccctctttgcttgctgggttgatctgctgcagatggtgtcagacttcccagcgcctccctatccttcagctctcctgcttttcttgctggtgccaggtcaagcacggaggccgttgttcttcacaaaaataaccagtgtgagaccgtttccactatttgttctaatagtcattgctccagtctgtgatcctggctttcgttcttaaataatatgagaatgccaagctcagctgcttggtctgtagcgtaaggtagaattgctctggagacatggctcctcagtttttgtcttcacctactgagtaagatctgtggcctcctggtgagcaatacatggagtcctgccaatacaccagtcctgcctggtgaagttatttccacctgcctcttgtgggtctctatgttgctcacccagtcatttcctgtccccattgctcactgtttgcttcctgatcctccttcatggtttgttttgaagtaaacactttttataacatataaggaacttaaacatagaaaatcattaatatatgtaactcactctagagaaatgtttgttcacaatttgttataaagtggctgtaaattatatcatcagtcaacaaattaggaagttgtacttatgttggcacttctatttttagcgtaatgatttatttaactgccggcctgcgttagaagtgcctgccattttaagtcttaaaaacattcctcagttataggaaggaatagaaatcattgttgaaggccgggcgtggtggctcatgcctgtaatcccagcactttgggaggccgaggtggccagatcacctggggtcaggagttcaagaccagcctggccaacatggtgaaaccccatctctactaaaaataaaaaaaaaatagccaggcatgttggcaggcgtctgtaataccagctactctggaggctggtgcagggagaattgcttgaacccaggaggtgaaggttgcagtgagccgagagcgcgccactgcactccagcctggcgacagagcgagactctgtctcaaaaaaaaaaaaaaaaacgtgaaatcactgttgagcctgccagctcaaatcatgctaaattaatttggcgtagaaatatctcctaaacggctgagtgcagtgtctcatgtctgttatcccagcacattgggaggccaaggcaggcggatcacaggagcccaagagtttgacaagaccagcctggggaacatgacaaaccacgtctctacaaaatatacgaaagttagctgggtgtagtggtgcatacctgtagtcctagctactcaggaggctgaggtgggaggatcacttgagcctggtaagttgtggatgcagtgagccgtgattgtgccactgcactccagcctgggtgacagagtgagaccctatctcaaaaaaaaaaaaaaaaaggaaaaaataagaaatacctcctaatgagaatatcaatatgttcattctgtcagcagactttttgaccacatgctatgttccaggtactgctgggcactgggaatatagcagtcaacaagccaggcgtggctgcaatcttctttcttttttttttttgagacacagtctcgctctgtcgccaggctggagtgcagtagtgtgatcttggctcactgcaacctccacctcccaggttcaagcgattctcctgccttggcctcctgagtagctgggactacaggcgcccgccaccacgcccagctaatttttgtatttttagtagagacggagtttctccatgttggccaggctggtctcaatctcttgacctcatggtctgcccgcttcggcctcccaaagtgctgggattacaggtgtgagccacctcgcccggctggctctaatcttcttaaagctgatattaagctatcaggccatttcattttttcaatattgcagagtgtgaagctcctttgaatgaatttatgtactgaatttagcccttgaaatgttaaaattactcttttttgtttttaaactttgatatagatttttccaaattgaggtgtacattttcatgccttggtaaaggctttggtgttttgttttgttttgagacagaatctcactctgtcaccaaggttagagtgcaatggtgggatctcgtctcactgcaacctctgcctcttgggctcgagcagtccacctgcctcagcctcctaaagtgctgggattacaggcatgagccaccgtgcctggccgactttggcctttcttgcggtcttggtcatcagggtgggcattggttattgttattaggatgcagtgaggctctcgggctctaagtgaacctggggttctttggattggccccgcactgctgcagatagttgggctctgctccgtgaggcacatttccttgcagtcagccatgtcttcttggtgctgcaggtctattctcagtatccccttcatttcttttccctgtggtctgctatgactggggaaaacaggctgccaggggaatccagaaaaatcgggttattaagtcagtaacctaagacaaaatgtaatgttaaattgtagactcctctgggtagctgagttaacctgagctctgtgacatctgcttttgtcactgctcatcgatttccttctggcagctttatccagaaatctgtctatattatgctgtctatgtcaccatgagcawgatatgctgatttgctggtgtcctaaggatgtcagctagaaccaatgtgttatctccagtcagtaaggcttcgggggatcctgccagtgtgatccccacctattgaggtttatctagatatgccccaaacagctacagagtatcagcacttctcttggyatcatagctgttctaactgttctttgattcctttgccattatttgtagtcttcagtaatttgctgtctggacaaagatttttctcccaaggggccctaccttctttcctcatttttatagaaccctactcacagctctccctgttggttttctcagtcttctctggctgtgctacatggttaaaagctctgctttagagagggccatgggacattggagtgctgtgataaaaggaaagggagcaggttttcgaatagtttttcttcctgtcacagctgtatctaaggctgttctgcctgttgcagaaawgtctgttgctcattgagtatctagcagctacttcatctgtcgtggaggtctgggtttttcccccagttccctgccactttttctgttggacacagtctctctctagaatgtcttctgccatagagaacatatgagcctttcttccctacagattttgacagagttggagcacagtgggattggaagaatcaaagagcagagtgcccgcatgctggggcacctggtctccaatgccccccgactcatccgcccctacatggagcctattctgaaggtaacacaaaccgagaggctggtgctttctctgtgcgttgtcatcagctcatatggggagatgggagtgtttcagtgttcactagtacactgaacaaagtaggtgatttctttgctctcacgcttggagaccaaagggccatatcaagcactttcagttaaagaataccaagaatcttatcagttgcaggaaagtgctgtccttacaagaggtaagagttaatgcttcaggcacatcatcacagatgtttggaaaggagaagtaggtagatagtagcataaaatagctcgcccaaaatgaggaaaaaatgagcttgaaaatctgaaacaaccttcaaatctcaacacattagagtcacgtgaagtcctttataatgtatgttaatctggatgaacaatcactgagacgcggtttagaggagacatgagaaatactttcacattatggtgcttcccagctctctcacatgtcagacttagacttcatatggagaaaagtttgagaatttacattccagagaaatcttggattcataaagcctagaaggaatttctttatgactgagatggtctcttgggtgaattttacttatataaaagaaaggtttctagtagagtctaatctgcattcattttctcataacttctttctctaggcattaattttgaaactgaaagatccagaccctgatccaaacccaggtgtgatcaataatgtcctggcaacaataggagaattggcacaggtaaaggggcagctactttttccatagcggagatagggtggaaaagaaactaacctctaaggaagtcaaaatactatttttttttttaaatgaaaggtctcacatatttattgcggaacccagccaacaatgcattcataacagattcagagagaaataatatattctcaataaaacatgtccaactctccagatagtggtgacattttcagcttgatatggtaatatcattgtgaccttcagacagcataaatrtgtgtgccatctcatgtgcaattccttatagaccctgcttggttcttctccartgtctttttttggagttgtacctggttttattaccagttttcatccgaatccactggggaatgggacgattttacttttgtttcttggccaggaattgcttaattctgaaagtcttgtgagaagaatggcaagaatcagagtcaggcacacaccatgatggtggagaaaggaagagagggcttttttaaaaaaawttttttattttatttatttgtttttgagacagtttcactttgtccaggctggagtgcagtggtgtgatctcggctcactgcaacctccatctcctgggttcaagtgattctcgtgcctcaccctcccaagtagccgggattacaggtgtgtgccaccacacctggctaattcttgtatttttagtagagatggggtttcaccatgttggctaggctggtctggagctcctgatgccaggtgatctgccctcctcagcctcccaaagtgctgggattacaggcatgtgccaccgtgcccggcctccaaaatactttctaatgccagaatttctaaccctttctgccaccctctttttcattttgcaggttagtggcctggaaatgaggaaatgggttgatgaactttttattatcatcatggacatgctccaggattcctctttgttggccaaaaggcaggtgagtattactgcttcctgattgagcaagacagaccccatgagtccagggactttgcttctctttattcaccttagtgtcctcacccagtgcctagaacagagtgtgacacatagtaggtgctcaaaaatatttgttgaatgagtaaaagttagaaagatttgaaaccagaattacctgttgtcctgacccagagtcagtttcagtaattatcggggctgactagtgccattttgtctatacaaaagaaaatgcaggtcaattgtcagagccgtagctctcagagggaaaaagaaagccttggccactgcctatgaaggaacagaagtttagctcatccttgcccagccctggttctgctttcccaatttgaggctattagatgactagactaaaattaagaacagtcttaatttatttctgggcatggcagctcacacttgtaatcctagcactttgggaggctgaggcaggaagattgcttgagctccagagcgagagcaacctgggcatgatgagactttgtctctactaaaaaaaaaaaatagctgggcatggtggcatgtgcctgtagtcccagctacttggaggctaagatgggaagatcactcgattccaggagattaaggctgcagtgaactgttatcacaccactgcattccagtctccagtgagaccctgtctcaacaacaacaaaaaatcttaatttccttttgaatctcctgttaatcatttgggatatggaagaatgatgtgttttctttgagaaaggtgggaattttctttgtctcttgatccagtgattgttgcagggttgtgtgcttgatcaaccttggttttatgcccttttgggatttctgctcatggttagtgtctttactggaaacctcttttcttcttacagcctctaacacttcattataatcattatacaaagagttcaactatgctttcttttctctcgtactggctcattgaatcgtgttcttgtgcctatccaggtggctctgtggaccctgggacagttggtggccagcactggctatgtagtagagccctacaggaagtaccctactttgcttgaggtgctactgaattttctgaagactgagcagaaccagggtacacgcagagaggtaggggacgtggcaaacttggtctttaaagactttgctgggacgatggcaagagagagatggttgcagcattaacatgctctgacagtgtcagtcagacttcctgtccctctccaattttgttcatgtagctggtcatttggatatgaactggggattatgtaacctgagaggagtatccgtgatacttgttgtaatcatgttgtgatgaatgttttcttttttccctcccctttcccacgcaggccatccgtgtgttagggcttttaggggctttggatccttacaagcacaaagtgaacattggcatgatagaccagtcccgggatgcctctgctgtcagcctgtcagaatccaagtcaagtcaggattcctgtaagttgggggtagccatgaaagacttgccaagttctcactcacagagcccttgctggttgtgtttagaaagtctggagctggattactgagaaattataggatattggctcgtgtagcaacttttgaatgaaaagtcagtagtttcttcttgaatcccggaagggttgctgcttcccattgtggccagagtcctcatgtctgtctagattctttgtcaagggttggcatgccaagtctgtctgctttttgatgccaatgcaagagatacacattatcaccccatcacctctatctatctctcattctttcttagtgcctctttgatggttctcattcccrtggtatctacagaagaagaggatagaattgattcttcctgttttaattgatagggaaatcagaggcgaggctcagggccatagggaaaactagcagcaatcagaaatttggggctcttttttccgtgaaatggtctggcccaagagctgcactgcctttttttgtttgtttgtttttgagatggagagtcttactctgttgcccaggctggaatacagcactgcaacctctgcctcccgagttcaagcaattcttctgtctcagcctcccaggtaactgggactacaggtgcacaccascacacctggctaatttttgcatttttagtagggaggggttttgccatgttggcctggctgttctcaaactcctgacctcaagtgatctgcctgcttcagcttcccaaaatgctgggattacaggcatgagccactgtgcctggacgccttttttttttttttaaaggtttgttttatttttaattgactcagggagggggaatagggagaggttggtgaatgagtgcaaggttccagttagacaggtggaataatttctggtggtctgttgcccattgccttttattgtttttattttaacttaattttatttttttggagacagggtctcactttgtcacccaggctgaagtacagtggcatgatgtagcctcgacctcctgggctcaagtgatcctcctgcttcagcccctcaagtagctgggactacaggcgtgtgccaccacacctcgatactttttgtatagcccgttgccttttgacaagtagcctgagtgaatgggggtggggtatggggttgcaggagggttttctagacttaacccatattccctcagggcaggcctatttctgacattgaaagttaacattgattctcccaactattccaggaaaatattattaccccaaaataaattgtttctgaactttctagatgggatcatattgcttcacatttcttcctcttctggtattagagaggcatgcctgtgatgtcattctgtcagccccatagctgttgagagcagggcctgagccatgctgctcctggtgttcttccttattcatggcaccagtcagcccagctcttcatctgtttagttcttaccctcctcgctgcactcttcatgttagtatacctccctcccttgccrctgcccccgctgccaccgtcagagtccttgaggtccttactgttcaagtcaggtaggtagtatttgcctaccaacttgtctgaattccctaggggaaccaaggagctgctgaacagatgtttgcctaatttaattccctttactttattttgggggagtaattatttttattgatggtttcagttatgaagttgtgaacggtaagaagctaaattaaacagagcaatttagagaaaaccaacccatcatgtactgttttaggcttttgtggtttgagtaatagaaaagccaaaaaccgtttactycttgatggtgagaggctattcattggttcctaatagaccttgaactcccaacagtgttagaacatactaggaagaaagatatgaatgctaatgtctgttaggaggttgtttgttactaaccatgctctgcctgaagtcacgtcatgccatgtgtagctctaacactctctgttgttttgtcctagctgactatagcactagtgaaatgctggtcaacatgggaaacttgcctctggatgagttctacccagctgtgtccatggtggccctgatgcggatcttccgagaccagtcactctctcatcatcacaccatggttgtccaggccatcaccttcatcttcaagtccctgggactcaaatgtgtgcagttcctgccccaggtcatgcccacgttccttaaygtcattcgagtctgtgatggggccatccgggaagtaagtacctcaaaccccaatccttctctttctcctctgcaccacacatgcacagatccatctgtgcttcagcttcttaattgtgcattctstgtgcccctgagccyaatgccttcctcccccttaactcccaacatataaagtgtacaatcagctcactccagtgtcctggctaaaagggccaggtgcagtggctcacacctataatcctagcactttgggaggccgaagtgggcagatcacctgaggtcaggagtttgagaccagcctggccaacatggtgaaaccccgtctctactaaaaatacaaaaattagccatgcgtgatggtgcacgcctataatcccagctactcgggaggctaaggcaggagaatcgcttgaacctgggaggtagaggttgcagtgagctgagatcgagccaccgtgcttcagcttggacgacagagtgagactctgtctcaagaaaaagatggctagaagatgaatagcctgggggaggaaaagcattgtcattctcagtaatctagagttcagtccggttgtagatgccccacaaatagaaaatcagtctggatttctggttgctccttcatgacgagatttaagtcgtaacatttttagtgaaaatactacacaggtgaagttgaatgcttcttactggatctcatactgccaccagttggtcccattactgttgatcctcagtgcgagcatgcggccgagtaggtgtttatccgatctctccattgtaagcttatctgttttcctttgccattagtgagtaatctgtggggtgacactttgagactccatggctatcctgttcctcagctaccttccatccggtgattttagcatccgttgataatcctcacttgagttgattatcacactggtggttgcaaagtgatgactttctaattttgctattccttctccattttattagctggcagcatttttctgtgaagaggaattttcccctcccccacctctcactcttgctgtttcttgtgtctttctttaaaccacagaatatgcaaaatggttctaagattatatgtccctactactaccaaccacagatctaagtaaagttcagagtagctttgtagttcctgttattcttagaatacactctactaagggtgtacagtaagagtactatgtttaaaagatacctcaattagttacttttccctctgatcatattgtcaacatgatgtacatttagaggagatagcatgtttttagaaattatgtttcctaactttgtgtctggagtatagacatactgtttatttgtttctattgtatttataactatcaacctaattgaatttttttttttttttttttttgagacaaagtctcactttgttgcccaggctggagtgcagtggtatgatctcagttcattgcagcctctgcctctcaggttcaagcaattctcctgcctcagcctcttgagtagctgggattacaggggtgcaccaccaagcccggctaatttttgtatttttagtagagacagggtttcgccatgtttgccaggctggtcttgagctcctaacctcaggtgatccaactgcctcagcctcccaaagtgctgggattacaggcatgagccaccacgcctggccggaattcttattaactctaataatttacctgtaaattctctcaggtttttactctatataattatatagtctggtgggcgggggcgggggcgggggtggggggaagaaaaattaaaaaaggaagttttgttttttagttttaatcttgtaaaccaccacttagtgacacagtaaggaaaagtaataagtactaaaaaagtmataagacctctactaccatgtttttggtttttgagatagggtctagctctgttgcccaagctggtgacacagaggttgcaataggtgatatgggctcactgcaacctccacctcctgggctcaaatratcctcccacctcagcctcccgagtagctgggactacaggcatttacaaccacacccagctgattttttgggtttcgccatgttgcccaggctggtatcaaactcctgggctcaagctatctgcccaccttggcctcccaaagcactggaattacaggagtgagccactgtacccggcctacttccatgttaattagatgcagtgatagtggaaatctataaccttgctcctgattttaatgggactgctgttaagatttcaccatgaagtataatatttgttgtagctttttggtagatatctttttattttatttttatttttaaaaaaatacggaatgcttcacaaatttgcctgttatccttgcatatgggccatgctaatcttctctagattgttccaatgctagtatacgtgctgccaaaatgagcactagatagctttataaaggtcaaatattctcatataaagagaatactaaagagttttattatgaatgtatattgaattctttagtctgtaatagtcatatggtttttctcttttaatgtgttaaatatgttgartcacactgataacgtgttytaatgtaagaatgctggcattcttatattaaaaccaccttggttataatgtatttttaaatttcgatcttatgtcagttcagcttagaatttttggatctgtgttcttgattgaattggtctataattttctctttcttaactatgggctcaaagatctgtttagcttttctgtatctccttgaagcagttttggctacttttttttaggaagctgttcattttgtctaagtgataaaacttgttgacatgaaattgttcacactgttctcttacattttaatttttttaagatctttttttatgccccagaactgagtggattatgttttaattttctactagagatttgttaaagcatttttcaaagaagcaactatcggccaggtgcggtggctcatgcctataatcccagcactttgggaggccaaggcgggtggatcatctgaggttcggagttcaactccagcctggccaacatggagaaaccccatctctactaaaaatacaaaaattagccgggcatggtggcacatgcttgtaatcccagctactcaagaggctgaggtgggagaatcgcttgaatctgggaggtggaggttgcagtgagctgagattgtgccattgcactccagcctggatggcagagcaagattctgtctcaaaaaaaaaaaaaaaaagaaccaatttttgacttgttgatctattattattttactttttctgctttttaaaaaaaattgtgttagaatgttaagtcattgtcagtcttcttttctaatgtaatctcttaaggctatgaatttcactccaagtattaactgctttccaaaatttcttaaagcttacataccgtaagatatgtggggggaaaatttaaaataaaaaatttatttatttatttacaagtcagataaaatttacataccgtaaaattcattgatttttaatatatttacagagttatgcagttatcactaataatctaattttagaaaacttaaatcaccccagcaaaaaaacctcctgtccattttcagtcattttctgtttctgcctcatccctgggcaactactaatctgcttctctctctatagatttactttttctgggcatttcatgtaattggtgtcatagaatatgtggtcttttgcatctggcttctttcacttaaaacttttgaggttcatccatgtgtggcatgtatcagtaattcattcttcctttattactcagtagtgatgtagtattttcattattgtccagaaatattttccagtgttagaatttcttcttttacccttgagttatttagaagtgggtattttatttgtaaacttaaagggtttttaatttctcttttttatattgatttctaacttaattgcattgtgtttatgattctttcatgcttgctggaactgctttaatggtctagtggttgattgattttcataaatatttcctatatccttgggaatacttgtgtatttgctaacgttatggacagggttttacataagtcattagattgaatttattacttattgtgttcaaatcttttgtgtccttctaatttttgtttgtttgatctatcaatactgagagaagtgagacaaaaatctccctttacattggtgggcttttttctgatagtttagtcaatcttgttttatgtatctttgagattatattactagatgcatgcaaattttaaatcctgatatcttcctggtaagttgactcttttatcattatgcaataatccttcttatctttaataataccttaaaacgtattttacgtaacattaatatagctgcaccagcttttttttggaggtatatgtcttttccaattcttttacttttaactgtcttgtgactttttgttttggatgctgtcttgtaaatatagctagattatctttttaatccaatttaaaaatgtttgtcttttaaccagtgcattctaggccaattgcatttattgtgattgctgttatatttggcctatttattttattttattttattttattttattttattttattttattttgagayggagtatcgctcttgttgccagggtggagtgcaatggtgtgatctcggctcactgcaacctctgcctcttgggttcaagtgattctcctgcctcaccctcccaggtagctgggattataggtgcatsctaccatgcccagctaattttgtatttttagtagagataggatttcaccatattggccaggctggtctcaaactcctgaccacaagtgatccacccgtctcggcctcccaaagtgctgggattacaggtgtgaaccactgcacctggccatgtttgcgtttatttccaccatcttacttagtgcattctttttgtcctgctttgtctgtttatctttcttttttgtctttttctggatttgtttgagcctttattttttatttcatcttttgccttcactcattggccacctttaatttttcttaacattttgtaatagactatttcaatcatgaatatagtagacaacctattatattagattctcacatacccatcagtaattactagcattttgtcaatttggttttatctcttacctccatcgcctttccccccgacacatgtacatacatttctgcagtattttaaagcaaattacaggtatcatattatttcaccaatacatactttttcccatgtaaccacaaatatgacacctacaaagctaacaatcatttcttagtattatttaataccaacccttcttcagatgtccctgattgtcttaaaaattcattgtaatttggtttattcaaataaaaatctatataaggtctacatctggcatttggttgatgtatataattctttcactacttatttaccttttccctctacttaaaaaaaaaaaaaaagtcatgtatttgtagaagaaaccaggtcatttgtcctgtttctcatactggatttggctgattgtatcttcgaagtgtcttaatttcctataaactagttagatttagaggcttgattagattcaggttctgttcttttgacaagagatacttcatagattacagtactgtatacctcctatttcaacatttagtaaacagatattttccatatgacccactgctagtgatgtaaaggctgatcagtgggttcggatattgtcatctgatccatctgttataaagttccctatcagcctttttcccagtcattttagcattcattggtagttatttcctagagctgttatttgattagggactgcaaaatggtgattttcttacttatatatatattttttttattaaaaaaaatgtttttttccatgacatatctctcaggagctcctgagaacatgtgccccaaaatggtgattttctaatttgattattccttctggatttattagctagaaagttctttagaaataaagaacttggctgggcatggtggctgtaatatcagcactttgggaggctgagttgagaggattgcttgagcccaggaggagtgtaagaccaacctgggcagcatagcaaaaccccatctcattttatttaaaacatttttttaggctgggcgcagtggcccacgcctgtaatcccagcactttgggaggccgaggcgggtggatcacaaggtcaggagatcaagaccatcctggctaacacgatgaaaccctgtctctactaaaaatacaaaaaaattagccaggcatggtggcaggcacctgtagtcccagctacgtgggaggctgagacaggagaatggcatgaacccgggaggtagagcttgcagtgagccgagattgggccactgcactccagcctgggtgacagagcgagactccgtctcaaaaaaaaaaaaaattttttttaaataaattttaaaaaagaactttatataatcaactactgaggtaatttgaagtgtagatcatgtaggaaaagcagaatacatgcatgaatctttccctttatttatcaatttatcaattttttagtataatgagtcaagcctctaacagcttttcagaggtgagccaggcaccttcccacctcccaatcctaccctcattctttggagtatcagtatgaactcatgaagatacatatatatatataatttatctttatttatactgtaaaccaagttggttgcacagtcactcaaagaagactgtcaagtgaaagtcatttagtcatcttattgttaatactaatattggtcatttactttactacttgtgtgtttaagaaagatacatatatatatgtaatctcactaaaagaaacagagctctctatatagagtatttctatatatatagaatatatatatgtatatatacactatatatatatgtatatataatatttctgttcattgcaggcaccaatctttttcacaatcagattgtcctgatcaccctggctgttgtgtcctttttacatggcccggtagactttcttgctttctggcggaaaaaaattactccaagcgtatcaagtatatttcactcaaacctgggcatagccatttccaaggagctctgatttcttttagtgagattacatacatatatatatattttatagatgtaaatagaaaatgaccaatgttagtattaacaataagatgactaaatgtagtttaagactttcagttgatattcttcttgagtgattgtgcagccaacttggcttatagttatactcatttgtttctgtttattttcaatttttagaaatttccttgagtttacaaaaaatttaggctgagcgtggtggctcacatctgtaaccccaacactttgggaggccgaggcaggtggatcactcaaagtcaggagtttgagaccagcctggccaacatgacgaaaccccgtctctactaaaaatacaaagattagccgggcatggtggtgcatgcctgtagtctcagctactcaggagactgaggcaggagaatttcttgaacccgggagacagaggttgcagtgagccaagattggaccactgcacttcagcctgggcgacagaggaagactccatctccaaaaaaaaaaaaattacttttgttttagttatataagacattaacatagttccagagctagaactataaataaaatcttatctagcaacgtctagcttctgtcaccatctttatacctcgttttcttccttcctttattatttcytattgctgctataacagattaccacaaatttagtggcttaacacagatttcttatcttacagctctctaggttatatttctgacatgaggtctcactgggctaaaatcaagatgttgacaggactgtgttcccatctggaagctctaggggagaattgttttccttgctttttctagcttctagagcacraggagttggacaagcttgttttagagggtgcctgcgttcctaggcccccttcctccatcttattaaacattattgtcgttttatgtcgtgtttgtttatattcatccacacatatttcatgtctcatcaccctgtcttccatattagagctttctcctagaatcatattctttcttcataggacaaattcctcttaggagcattcattgaaataaactgctcttatctgaataagtctttatttcaccctctttttaaatcttcatttggagatttaaaaattaaattaaaaaatttatttttttagccaagaatattattctaggttctcctacaactgtagatacgatcccactttctgacttctttttgttgccgttgagaaatcgtgaatcccttttacatattttttctgtggctttacttctcattgttttgttatcctgaagtgtttactattatatatctagatgtgaatttcttttgattatcctgtttgagacttggagggcttcctgaatgtgaggattggtatcttatcagttcctgagaaattctcatctattatcttttttggaattttgtccttatacccttctatttttttttttctttcttttcttttcttttyttttttttttttttgagatcaagtctcactctgctgccaggccggaatgcagtggtacgatctcggttaactgcaacctccaccttccatgttcgagtgatcctcatgcctcagcctcctgagtagctggaactacaggcgtgcaccaccatgctggctaattttttttgttttttgcattttcaatagagacagggttttaccatgttgcccaggctggtcttgaactcctgtcctcaagcaatccacccgcctcagccttccaaagtgctggaattataggcatgagccaccgtgcccagccttattcccactttttttaaggcattttaaacagactaaattttctgtcgaatacttctattatatataaaactcttagtgggtctgattgtgtatattgtttctgagaagtcatgcttgtagtggtctgtttcctcacgtgttttataatttcgaatcatatagcatattcaactgggctttccctggagcaatactagaaaatctgctctaaatttgcatctttccagagaggatgtgcatttacttctgccaggtggtccatgagaactttaatttcttggcttagagattcccaggccacacagttagtgaaaataaatccctaaacctgtacaatagatgcctgaaattatgaactcttaggggaggcatttttctgcctagaccccacatcacaactggcaaatttctttatctccttttaccagtggacagattttttttttttaactcaccatttctcttaatatgtagctctttgaaagtctggctttatgtgagaggctttagttctttttttttttttgaaacagggtctcactttgttgcccaggctggagcgcagtgacatgatctcagctcactgtaacctcacctctgaggctgaagtgatcctcccacctcaaccttccaagtaactgggactacagacacatgccactatgcccagctaatatatttttttgtacttctggtagagacaaggttttgccatgttgctcaggctggtcttaaacttctgagctcggggtgatctgcctaccttggcctcccaaagtgctgggattacaggcgtgagccactgcgcctggccacttcagttctaataatcttataatcatgtttatatttttgtacttaattttaggcttttcatagtgggggagtttggaaggagatctagtgcatcatattttcaggagcaaaactgtgttcttttaaaatactcatgttccgagcaaaaagagaacacatgtgaaagggtaaggaagaagaggcagctcctctagctctctactcagcattgaggtgcttgcctgtccatgtcccttgggcagctactccttatgaataagccacggaaatgctccctaatcatgcctaataaaatggcaccaaggaccaggaagcttgtttcctctttctgtctctcagttttctctgacctccccgccatcgctgtaggcctgttttcctccagcttaggttttctactttctttcaggctttgcataataaaaatttgcctgaagaacctttatatttagtctcattttccttgatctttgtaataacatttttttttttttgagatggagtctcgccctgtcgcccaggttggagtacaatggtgtgaccttagctcactgcaacctccgccttccggtttcaagcaattctcctgcctcagcctcccgagtagctgggattacaggcacatgccaccatgcccagctaaattttgtatttttagtagagatggggtttcaccatgttggccaggctggtctcaaactcttgaccttgtgatctgcccgcctcagcctcccaaagtgctgggattacaggcgtgaaccaccgcgcccggcctgtaataacatatttgtatagggaccactatacatatttgtatggggaatcactacaaaactgtagtgattcaattwggggratggtggggaccaggagataggtagaaatgagcctactgagtcaaatgtgtgccacatggggaccaggctgtaatcaccttagaagtcaaagttatcattagggaatatgttcaaactcttctttaagcccaatcctgtatgtcctatcgatcttgcctctttgggtaatgagtactataaatccattactcactgtttgagatagcacttttttttttaagtaatgctttttatttattccaacttacccgacttgcatgtggataggagtgaaaatacatatgttcattttctaaattatccttgttaatggagagaaacaaaggcagagagagctgtaaaaatttggggaagggggccaggcgtggtggctcacgactgtaatcgcagcactttgggagggcaaggcgggcggatcatgaagtcaagagagcgagaccatcctggctaacacggtgaaaccctgtctctactaaaaaaatacaaaaaaaaaaaaaaattagccgggcatggtggcgggcgcctgtagtcccagctactcgggaggcagaggcaggagaatggcttgaacccgggaggcttgaacccgggagcttgcagtgagccgagatcatgccactgtactccagcctgggtgacagagtgagactctgtctcaaaaaaaaaaaaattgggggaaggggtgtcaaatattatttgctacttattactggcgtgtaatactatctgaagctcataacaaaataaaacctacatcttgaagacaaatctttaacctggaaagtagttgagattttctttacccacaccttccttattcccagctttatttagtgcatgttttttcttcctacacctaaaaggtactgacttcagtagaatctcctcatcctatccctaccccagtttgcttgcttattttggctcataatctctcagagacatagttaattaattaagacctaagtaatgagttaattactataaatgagctacaatacccataatcaagagttagctgtatttattttaggaaggaagtggtaattaattagagccaaataaacaaaaggtacatttacagttggtaaaaactttcaggtttatttttaagtttagtaattccaggaatccttcaatgatacagacattcattgagcactgaatagtattcacgtccctgttctagtgcttgacatgaattatcccatttaagccttagaagtctatgaggtaagtattattatctccattttcccatggaagagcctgggcacagggaggttaaatgagggttacaaagcccctgctgtgcagtaactggctcgccttgtgtgtaaaaacctctgacaattgttttgagtccccaccactatcaccatttaagtttgtgtcttttttttttttttttttaagagacagggtctcaccctgtcaccctgcactctgtagagtgcagtggcacgtgcatagctcactacagccttgaacttctgggctcaagcatttctcccaccttagcatccagtagctagaactacaggcaagtgcccagctaattttttgtattttttttgtagagacaggatctcgccatgttgcccaggctgttcttgaaatcttggcctcaagcagtcctcccgccttggcctcccaaagcactgagcctccaaacctagccaagcttgggtctttgaaatatattctcagtagatagtgtagtgtggaaacccattccatagttgcctttatttgttcacatgagcttaakgtaagcctgggrgttcartgtccttcatgataccagctggttgacctcttgtccatttcagtttttgttccagcagctgggaatgttggtgtcctttgtgaagagccacatcagaccttatatggatgaaatagtcaccctcatgagagtgagtagaagttaatgctttggcctcttccatgtttgggtcaaggaaggctcagaagcaagtttgaatgacatagactttttttcacggatctttgtagagctgttacagtcttagtacaggaagtggaacaaagcccactggattttgagggggaggaagggctgttgctccaggttcccaggtacaaaactacaaggcatgaaggctgaagagaaatcctgcagtaattgttctgccagaaatagacaattgggttatttgcctcacacacaacaaagcaattttactttaatatcacaagggtgcttttctattttcatgaaagccctctttgttactgctcataaaccatgaagggattgggttttcttagggctgttaaatatgatggacacgtgttgggcaccaaggaacaaggtgatgctttaccctgctacctccaaaaccatacatatcaccttttgactgcagtggcacatgagaaaaggctcaggttccaggattttataacatgcattaagtaggtgccagaagacaccccatgggcaatatcatttttccttgtgttctatataatttaaatgtctctacggggaagattgcttcacagggayggcatgtcctcaaagagttggaagatttctgttctttcacaccagacctttgtagttagtttggactaaaatcaaaatggctggactatttgattttagcaggactaaaatcaaaatggctggtttcaaatggaacttcccagcacctggatctcagaactgaaaacctccctacatgtataaataattaaaagctgctctattccctgactcttaccacagaagcctctgtacaaggaggatttaggcagaatgctaaagaggccgatggctagtcttagtgggaggaggggcaagggaagaagcagtgtcctcatgggaggaggatgaagtaatctgtgacttaatccccccaagaaggctaaacaaggatacaatatgaccatattatagtcataacaggttgatgaccaaaacacagggaattgaggcagggagcctcacacctgcaaaatacagctttcatttcatcccagatagagaaggtgcaacgggggctcttcctttgactgttgattctgggcattttaatgagctcccccgagcctgggaagaaaatagtctttgtgaacagtgatccagctgacatcccttggcaggctgcctgayatctttgaggtagagaagcccctgtgaggagctgatgataatgcagctgggaggtaggttggccttctctaaagaaggcagagtagggttcaagtggatgaacatcagacagactctggaggctgtgaaatctgtggtgtttctttggcaacacttttaacctagaaaacacagctttttcagagagaatacttctctccaagtagagagaaaggaagttttaccagcatcttctagtatagtttttgctttctaaaccattatgcttttaaagatacctttttaaataaaaatactatatctttttataaagcctttcatctgaggagttatccttgttgttatggacttctactttgaactatttagaggctccaagaatattaacattcatgtgttgccatcattagtagggtttctattatcattaartttcctactccagaacttttaaagatggtggtaggcagctgtctttttgagttgatagaaatgatatcttttcctggagttagaggcttggactaatttgctttgcagcactgaggcaggatctgtggccagttggccaagtttttattttagtaacttgtgtggaaaataaccatgtgggtgtagaaaggggctcattttgtggcactgttcaggcctgatggatagatttttgggaagggacagatatcagatgctatctattaatagcaaaatctaaatccagaaaagccaggaaatatttgtaatactggagtcaccctctggtagagatcaggtgataccaaagtaaggtccaagtccaccctggaccacttcagagttttttgagtgacttagtcatctgttcattctagaatattccagatgctctgattgatagattctggggatacagagataggatacttgtccctaagtagcctacagtctagagggaggacagcaaagcaaaggaagtcttayaactgctatcgctatcaaagggagtgcaaaggacccaagtggatcatggaaggagaagaagaaagcctgcatgggagaagtgaggctagagccaggtctagaaagacagacagggcttagctgagcaagaagtgggattctaggcagaggaagcagcatgagcaaagcccagaggactgaggtagcctggtgcatctggggaaatgcaattgagtttgtccagtgtagctgcaacataggacacaagaagggcccagtgggaggaggggagtgaggagttgatctcggcgcagaccatgctcactacagttttgcttttctggccatcttgattcctttgttcatatatcatcagaaagggacctgactcagctcctctgacttttctctctttgtaggaattctgggtcatgaacacctcaattcagagcacgatcattcttctcattgagcaaattgtggtagctcttgggggtgaatttaagctctacctgccccagctgatcccacacatgctgcgtgtcttcatgcatgacaacagcccaggccgcattgtctctatcaaggtgagtagcctacgtcatcctccagagagattttctgmtttcctctgagtccctgggtgatcagctaaaagctgagacctcattctgagtgacaggttgatgcccattccataagacagaatcccaagaatactaatacccaatgtgtgcagtttacagaatgtctgtaatcctctcttgattatccttatgttttgtatctgtttcaatggattaatcttgggaaatattttatcccagactaattttctttattttccagcaacggattccttatcaactcaaataagcacagagaaagcaaagtaatatgtaagcaaataaaatgaggggaagaaagtgctatcaaaaggatatagttcaaggccatttaataaagagttttcccagtccccagagaactttgaattgtctacaccaccacccgctgcgtgtccttagatacttgggacytgactattcatcaccatgcttttgctcccttttgcagttactggctgcaatccagctgtttggcgccaacctggatgactacctgcatttactgctgcctcctattgttaagttgtttgatgcccctgaagctccactgccatctcgaaagtgagcacctcctctttgggactagcaatctttaagctttaatgttttgttgaaaatgttcatttcttaagttcccaggccatctttctattttttttgttatttcaactcacattattttagtctagaaatatcccaggtttatggaaatcttaactgtccctatcccattggaataaatgttggatccatgtcatccaaaataccttagaagccgttcattcccatccctttggtgctgattgttaagctcaccctcagtcacgtctcttccttggagattgtatgttagcagttactgtatgttagtgattgttgtagggcagcgctagagactgtggaccgcctgacggagtccctggatttcactgactatgcctcccgsatcattcaccctattgttcgaacactggaccagagcccagaactgcgctccacagccatggacacgctgtcttcacttgtttttcagctggggaagaaggtaagatgggagtctggacagacaggtgctcttctgccttatttggaaagaagactttgtctgtgagccactcagactttgtctgatgccagccaccatcagagaacgtggaattacttgctttttttcttttcatgtgttcagcaaacatttattgagcaacctatgtgagctaagtgccgttctgggggtaacacggtaaacagaataaagtccttgctctcatagagcttccatcctgatgaagcaaagcaaataaacagtttgtttcttaagagtgatgggttgaagtggggagaagtgctctttatttagggtagacagagaagacctctgatcagttgacactcaagcagagacctagataaaataaaggcctggttgcaaagaattggatgcaaggagaagaaatagcaagtgctaaggttgaggtggcagcttgctcaaagagttcagggcacagcaggaaagcagtgtgacttcagaggagcaagcaatggggaagtgcttgtagttaaggtgatggagataaggcagaatagtagagactagattttgtaggcctggagctctcaaaatatcattcctggacaagcagtatcagtgtctacatacctgagaacttgttagaaatgcagattcttgagctaggcacagtgactcacacccgtaattccagcaacttgggaggctgaggcaagaggattgcttgagatcaggagttggagaccaactccagacatagcaagaccctgtctccacaaaaaaatttaaaacttagccaggcgtaggracacgtgcctgtggtcccagctactcaggaggctaaggcagagggatcgcttgagcccaggagttccagactgcagtgacccccataattgtgccattgcactccagcctgggcaacagagcaagacctcatctcacctaagacctactgaatcagatcctctagctgtggagcccagcagtctctggtttcatgagctgtccaggtgattctgacgcccactaaaatatgcaaatcactattgtgggccattgtaagtactttggcttttactctgagcaagactggaagtttttggtggactttgaacacaggaaaaataagatctgacttaatatttttaaatgataactcaatgccatgtgggaaaataggctgcgggggcaagggcagaagcaaagatctgttaagaggccaccatcataaaccagatgatggggacttgaactaggattataacgggagatgggaagaaggattcttttgaatatcacagagctagccacaaacccagaagaaatggtcataatgtagttgtataatattttttcctctactttttctccactctccaaaatgatagtttctcatctcttccccctcctgttttagtaccaaattttcattccaatggtgaataaagttctggtgcgacaccgaatcaatcatcagcgctatgatgtgctcatctgcagaattgtcaaggtgaactatacttcttttctgttctgaagtccctgttgtctttactacttgatattcytgtaatcttggctatgggagtttgtgtagctttttggctgtaaattagggattggcaaacttttttccagttttgtagactatgtggtctcttttgcagctcctcagctctgccactacagcctgagagcagccatacacaatgtgtaaatgatgagcctggctgcattccactaaaactttatttatggacacctaaatttgattctctcaattttcatgtgttgcaaaatatcaatcttcttttgattttttttccccccaaccatttaaaagtataaaaacccttcttagctcttgggctatataaaaacaggcagagggctgggtgcggtggctcccgccttgggaggccaaggcaggtggattgcttgagcccaggagtttgagaccagcctgggcaacatggtaaaaccccatctgtacaaaaaatacaaaaaattagctggtcatgatggcgggtacctgtggtcccagttaccgaggaggctgaagtgggaggatcacctgaggctgcagtgagctgtgattgcaccagtgcactccagcctgggtggcagagtgagaccctatctcaaagtagattaaaggctaggcacaggggctcatgcctgtaatcccacaactttgagaggctgaggcrggaggatcacttgaggtcaggagttcaagaccagcctggccaacatggcgaaacctcgtctccattaaaaatacaaaaattagccgggcatggtggtgtgcacctgtagtcccaactattcaggaggctcaggcaagagaattgcttgaacccaggaggcagaggttgcagtgagctgagattgcgctactgcactccagcctgagagacagagctagactctgtctcaaaaaaataagtaaataaataggttmgattagataggcaggtagggagtggcacaaataaataagtgaatagatgattctttttaaaaagtkttaaaaagccaggggatgggggctgtttgccacctttgctccaaacactttatcrcttttcccattgccgacaattgtttatctttgctagttgcatggttgcttgatcttaatactaagtcagtgcttgtcagtaactaggagtgactagcaaagactgtctacagttggggagtcagcccatctgtggttcattttgtccatatgtgcaactttttacttcttactgaaatcctggctctaccaggtctgcacctcccaaaatttaaggatatttcctaaaccagaagcatctagtagagttataggtgtttcctataaatctttggttgtagggatacacacttgctgatgaagaggaggatcctttgatttaccagcatcggatgcttaggagtggccaaggggatgcattggctagtggaccagtggaaacaggacccatgaagaaactgcacgtcagcaccatcaacctccaaaaggcaagtccattgtttcaggtgactgggaaaggagagctctgctcttctcacttactcaaaacttttaactgtttaaactgggcaaccgaaaaccagcccaggtgttttttccagaaatctasataccatgaacttagatcattttgtctttttacaggtgcctaaattgtaattttgttttgaatagagaaaaagtagagaacaaaatgtccttttgtgctcccttggaatatggatggtagaaccttttgttgcaaatacattctcattttttacatgaagggaacaaagctagtgagccccctagttggcattgagactgatgaaggctctttcaaacagtgcttttcaaacttctcaaactcattgggcttaccagttgctgggagtcttgtaaaaatgcttattctgttgttggcagtctgatttggggcctgatattctgcatttctgacaagctgccagctaatgtgatgctgctggtccatggaccatactttgagtagtgaggttttagatgtttccaagtgattactgaattatctctgctggccaaagcctaagatatgaccagcttttcaccatgtatgccatcagctatccacctaaaaacaggcagtttcaaagcatctctagtgaatcagagcacaataatcataattacttcaccaactttaaataaatataccacatcgagtattttccattttgcattagtctttcatgtttctggtgactgtaagcaacttccagtttagatttcagtgttatttttcatctattagccatctcactccatgtgcagcagcagatagaggtgaagaactgggcaagactgtgtcctagctgactcgttcacttcttttggaaaaacccataaagatttgaacacagtcctttgtgcatgtgtacgggctcacgcccagctttgcggagcactgggggtttattactgttgtttcagagtctttactcacacaaacagcttcaagtgaccactgctaagaaacgtttgctgggttaagatggaggtagtaaaatattcctgggtcaggagtgatgctgctttccctctggggattttgtaactgctactctgagactttaggaggaagaaaaaggttatcagtcacttggcattcccaggtaatcattgaggccaccctgctgacacctcacastggagggaggggccaggcaggaggccagatgtacatttccacccagatgttttcatcctgactaggttcagaatgtccttccaaccaggcagccgtccaccctgctttagagctttgttctctctattttaggaaattcctcagtaatctagtttgcttccaggaagttttgctttctacccagacttggaaaaaataagcataaaccttgccagatagacaaaagaaagactcttagtttatctcacctgagaaagtagatcaagttcaaaactctagacagaatcctccacagctcactctcagatctatttcattgggaagtaaattgtgggagctgggcatggtggctcatgcctgtaatctcagtaatttggcaggccaaaatggaagaatcacttgaagcaggagtttgagaccagcctgggcaacatagtraaacaccatctgtataataaaaatgaaaaatgaaaaaaattaatttcagcctgggcaacagagtaagaccctgtctcaaaaaaaaaaaaaaaaaggaattgaaaaaattttaaaaattagctgagcagagtggcacctgcctgtagtcccagctactcaggagactgaggcaggaggttcacttgagcccatgagttccagggtgcagtgagctatgattgcgccactgcactccagcccaggtgacagagcaagattctcttcaaaaaaaaaaaaaaaaaaaaaagaggtagggggccaggtgcagtggctcatgcctgtaattccaacactttgggaagccaggcgggaggattactcgagcccaggagttcaagaccagctggggcaacatggcaaaattccccctctacaaaaaatacaaaaattagctggacatggtggtgcatgcctgtagtcccagctactcaagaggctaaggtgggaggatctcttgagcctgggaggtcaaggctgcagtaagcagtgatcatcccacttcaccactccagcacaggcaacagagcaagaccctgtctcaccaacaacaacgacaaaaaaaggcagcagacctcattgttcagaagtaaattgtgcctccttataatcatgtgatgataattagggattggtgcatttatcagtcttaaccaactttcagagtaacaatttgccacctcagtcaccattttatttgttatgataatattrgatttatgtgatacagaaaacataaaaaccatttatgtatacttctagaatgccttccagaattttcagcagctttactgtctgtctgaatgataatctgtttgggtttaccttcaccatgagtaagctggcattccatgaacaggcaccagcatcaccagatgaggcgatcagcagtgggtggatggcaagaggaagcagctcgtgtttacacagttgttatagaacccagagaattgagagttgataatgttttacagagcagggggaaagggccacatgggggacttgrcctagtcaataaattaagctatgattttttgaaaacctatttactgccatttatcaagtaatagtaacaactgacatttattgagtgctttccgtgtgtcaagcactgtggtggaacactatattaactcatttaatcttcatgataaccccatgagttaggtgctgtcgttgctgtcccactttacagatgtggaccgtgaggcactgacgggttaagtaatttgcccagtgtcaactagcatcartggtggagctgggatttgacctagatagcatgactccagagcccactctcttaaccactgtgttgaattgtstctgccttacccaggcccaacctcatttcattagagggaaaaagaaactagtaatacttccctgtttatgtgcagcttttaacaattgctgtataatataatacagctacacacaaacccatcttgtagggaagaaaccasgtatctgtgggcaggaaaggactggatgttcccattgtgctcaacagagcaaggtctaaaaatcagtctttggtatctagtctccctcttccttctcattcagaggttctcgttgtatggtcagtggtattatttagtttgtctcttgtaacatttctgcttcggtttttgacataaagtgataggttgtctaattctattcatccrtaactctttagaagcaacagcacatctccagtgtatcccagggaggtgatggttgagtccttgatggtatagcacctgggggtcttttcactcactggaccacttcactagtccaaagtttgagaccttctgctctgtcttacatgatttcccccatttagggaggattgatgtgtcctgctggaaaaatctatgaagaacatattttaaaagttagggatttagtgtagttaggcctaggccagttcaaataggtgtygttttgacaataataacaatcattttttgctcctttattccggctaagccatttagacacattatccytagatgaggcactctgaggctcagctgcaaaatacaagtaatttgcccagggtgttacagctgctgagtggaagagccaggatcccaggcaggtgtttctaactttagagaactaggcaaatagtactaactttgtgccaagcactgttataaattcattacatttattaacttaaaacaccccaggaagcagaaactataatcctcattttacagatgaggaaactaaggcacaggggagttaagtgacttgccaaagatcagagagccaattatgttatataactgggatttgaactgaagccattgagtcaagtgtagctgttgcccactacactatactgttctccaaaacctcagcctttccacccacctgaataagctgcccctggtagtaactcttgatgtctggagagttcagagttttgagagaagttggaggggatagagtagaaattaaatctgttcaacccctttttcttgttttaccacagtgccatgtgctttgggctcactgctcacctggttgcaacatgattcactatggtgtaaacctgagccttttccctcttcttgcgtgactcttcactgtcagatgagctggtgttctaatgcagaggacacagctcccttcatgccctgctggagcccattaggctttgtcgaatgcacccgagtgtggcaatcccatgtattctggttctgtagtgctcctttgctgcagtcagagtccagcacaaaggagttgtgaaacaggctttttccacagtgtggtatgttccagagttgctgttcttaattaaatattattcttttgtatttgtactctaggggaattttatcgtgaaagatggattttataaatctaaaagtagaataatcattaaakagatgaggacttttttcaattggcccttgaaactgattgttttccattgtcacctgtgggatcacaggcctggggcgctgccaggagggtctccaaagatgactggctggaatggctgagacggctgagcctggagctgctgaaggactcatcatcgccctccctgcgctcctgctgggccctggcacaggcctacaacccgatggccaggtatagtgtgtcagggcgggtggagaagatcagcacatagaaaaygatatatacaaattagtttttattagaagtaataatcaaggggctggtatttttaatttttctaattttgtgggatacaaagaaagagaaagacaaattcaacaagctcatactgtagcatctatcttaaccttgctagtagaccacaaattcctttttctagtagctttaggtctaacattttaattacaaagttatttataactctaaaagcaactgtgtaatagttgaatgtaacctatttccaataacaatggtattctaattattgctgtttgttacaaataccacaggaaaaaaaaggtctgaaacaataacagttatttattttactcctgaatctgcaatttgggaggacttttgggacagctcgcctctgctccacatggtgtcagtggagatggtttgactggggcaggatggaggatccgcattcaaggctggcttgtgtgtctggcaaagtgcaggtgactctcgactaggaacccagctctggctgggggccttggttcctctccatgggatcactccatgagttgcttgggccttctcacagatggtgactggcttcaagagtgagtgtcccaagagaacgaggtagtagaagagcatggtgtttttatgatctaagtcataaagagtcttggaagtcatgaagagtcacttctgccttgccctgttgctcaaggcagccacaaaggcgcagtcaggctcaaaggaagaagacatgggcacccacctcttgagagaggagaagtaatattctaacagactatatgggacaggagccactgttgcagacatctttggaaaatagaatttgccagaatttattttttctttttttgagagtcttgttctgttgctcaggctggactgcagtggcacagttgtggctcactgcaaccctgcctcctggttcaagagattctcctgcctcagcctcccgtgtagctgggattacaggtgtgtaccaccacacccagctaattttgtatttttagtaaagacggggtttcgccatgttggccaggctggtcttcaactcctggcctcaagtgatctgctcaccttggcctttcaaagtgctgggattacagacatgagccacttggccaaaattttttttattgatacataatagatgtacatatattttcaaagtacatgtgatatttcgatacattcatataatgtgtaataaaacaaatcaggataattgggatattcatcactttagacatctttttttgttgttgttgtttggttggtttttttgttttcatttttgtttttgtttttgagatggagtcttgctctgtcacccaggctggagtgcagtggcgcaattgtggctcactgcaacctccgtctcctgggttcaagcgattctcctgcctcagcctcccgagtagctgggagtacaggcacacgccaccacgcccggctattttttgtaattttagtagacgtggggtttcaccatgttggccaggctggtcttgaactcctgacctcaaatgatccacctgccttggcctcccagagtgctgggattacaggcgtgagccaccacgccccgcctggttttttgtttttgtttttgttttggaaacagggtctctgctgcccgggctggagtgcagtgggacgatctcggctcactgcagcctcaacctcctgggctcaagtgatcctcccacgtcagcctcctgagtagctgggactgcagacacgcaccaggcccagctaattttattttttgtagagacgaggtctcactatgttgcccaggctgatctcaaactcctggactcaagcagtcatcctgcctcagcctccaaaagtgccgtgatttataggcatgagtcatcaccattttttttttaatttttaaaaatttttatagattttggagtacaggtgcaggtttgttacatggatatgttgcatagtggtgaagtctgggcttttcgtagaaccatcacctgaataatagtgtacatcgtacctatcaggtaatttctcatccctcaaccccgccaaaaaaaatattgttttaaatagtaaatctttttttttttttttttttttgagacggagttttgctctgtttcccaggctggagtgcagtggcgcgatcttggctcaccgcaacctctacttcccaggttcaagccattctcctgcctcagcctcccaatgagctgggactacaggtgcacacctggccaattttttgtacttttagtagagatggggtttcaccatgttagccaggatggtctcgatctcctgacctcgcaatctgcccacctcggcctcccagagtgctgggattacaggcatgagccactgtgcccggcctaaatagtaaatcttaaacagccatttaaaatttggtttacaggctgggcattgtggctcctgcctataatctcagcactctaggaggctgagacaggaggatcacttgaggccaagagttcaagaccagcctgggcaacctagcgagactctatctctacaaaaatgaaaaattagccaagcgyggtggcatgaagctgtaatcctagctactcaggaggctaaggcggggggattacttgagtccaggagtttagaggctgcagagagccacartcgtgcccctgcattccagcctagatggcagagcaagactgcatctcaaaaaaatttttttttggtttataaaacttctaatgcatgtgaaagatttataatataatgtaagtaaataaaatggaatacaaaattgaaaattaaaataaatgtgaataggataaagattagaaagtaatatagcaatggttatctttagggaaggcttaaggagtgattattttcttttttattctcttctttatttcttaaatttttctgcattggatattaattatttataatgaggcataaaatggtgatttaattaataagcagcccttcgcattggcaagaagcagaaagcaaggcatttcacttcatttttgtcagcagctggtttgctgttatgatatatatttagcagtagtgatggcccctgagactgttggtttgatgccatgatttgcatcctctaatttctttcaagtattttttaatgctttaaaatagtttctaggacttccctgtttccgtagtgtggagatatcatgtactcagctgatgtatttattattcctcttttctctccagtcacctctgagcacagtgttatccatgagaggcttgtgatatacacaatgtttttatccccttagtcccaaatacgttcattcaagatccaatgtggcctctgacctagatcaggaaaactttttttatgattttagagatgaaggtcttggttattgccctggctggtcttgaactgctaatctcaagagatcctcctgcctcagcctcccaagtcaccaggatgaccagcgactgtaattacctggctccgaaaacttacttttaattttttttttttttttgaaacagagtctcgctctgttgcccaggctggagtgcagtggtgtgatcttggctcactgcaaactctgcctcccaggttcaagccattctcctgcctcagcctcctgagaagctgggactacaggccaccaccaccgcgcccggctaattttttgtatttttagtagagacggggtttcaccatgttagccaggatggtctcgatctcctgaccttgtgatccgcccgcctcagccccccaaagtactgggattacaggcgtgagccaccacgcctggccttatttttaaatttataacagactttttttggtcttcatttgatcctttggatttcaaattttgttttttctatcaaattccaaaattatacacattggtctaacttaacctgttaatatgtaacagaaaataggtatagaggcatcaaatgctaaatctatccattgtaggtatatcctgttttttcccatttccttccccgcacagtcaccagaacagtggggaggacagaattaatgttagatgtaagggatggcaaatgtgtccatcatgtggtactgtggtaatgtaaagtggtcatagtaatctttgaaatggaacctctggttccaygtctttgtgaggccccaactgttggcttagaaaatcttttagaacttaaggatttggatcctatttgctaatgcttctagtcctgttgtcattttttatgaccatccaactaaggattctggttatattttgaaagcaattgcagatgctgcctttgacatttctgaccttaagaatttagacattgtcccagaaacatcccaagaatcatttaatgattattattttctgcatttgttaatgccaacttctatgttagaagtccctatactgttcatttcccatttcctccagtgaagagaaataatgcaaaaactgccaagaaatattcctttggagaaaagtcactttgctctgctcttctccccgccctgccactcgccccccaagtccctgaatatcacaatgtctgtacctgcagtgtaaaattcagtagacactagccatatgtggttaattaaaaataaataaaatgtaaaattcagttccttggccacacttgccacagttcaagtgctttagtgatcactggctaccatattggacaggaaaattctcttggacagcactggtctgtatagcactggtttgtataaccaaaatcagtgatgccaaaagcgaattgataggtgtgactttgaggcagcaggcagaggcacgggaggtctctccattttccaccttctctgccttcagggatctcttcaatgctgcatttgtgtcctgctggtctgaactgaatgaagatcaacaggatgagctcatcagaagcatcgagttggccctcacctcacaagacatcgctgaagtcacacagaccctcttaaacttggctgaattcatggaacacagtgacaaggtgagacttttccccattgtccagatggaggctgacagggaaccagctggtgggaggagagaagcatccacacagccttctcttgtttgtgccccatctgccattttcctgtgctgtgaggttttgctcttctccagggccccctgccactgagagatgacaatggcattgttctgctgggtgagagagctgccaagtgccgagcatatgccaaagcactacactacaaagaactggagttccagaaaggccccacccctgccattctagaatctctcatcaggtaggccataaaccctttttaattgctgccttcatgcaaaatgacctctcttctcccactgcctggtgccacttcactggagtcacttgaagacttctgctctgtgaaatctgcctctgggtctggccagcatgtttaaatgacatgttgttgcagatggctctccccaggaatctagccatgattgtcatttctgttgacccttatcacctgggctcctgttgttttccaacctgtcctttcttgttccagtgaaatttagttgagaagcaattctgtggccatggcagcctaggaagataggttttatgtctgggttagatagcgctgtctagagctggagtagaatgtgctggttcctgggcttcagagggtactcaagggcacagtggggttttatcaactaaatctattgatgcctgcatcttcctcctctggtgttttgtgaatataaaaggcagagcataatctgaaatctaatggtcttttctctgatgtggttatgttcgctcctctgttaagacagttttcagtcttctgggtatggaaaaaatagttcgtttaataaattttctgctgttaggaaattacaagcagcatgaaacattagctccagctcctaaaaaaccattcacttcccctaatgattatcagagaatatcaacttcgggatctcattatcttcatgtgaatgctaaatggtcggtcatttcactgcagatagtttagaaaaaatcatctggctagtaagttccttcaccgtggctgatagagcctgctgtgtggctctatcaaaggaggatagagcctcctttgtttgagagggtaatcaaatagccaagtcctttcctagctgtgcttttgagaagatatttaaaagagttcctttaacactttaaaaagttagcgaaaagatagaaatagaatcctgtttttgcccaaataaattggacttggagaaaatgttgatttctgaaataccatgtaggaataattaaaaacatgccgtcctctgaggcatgcttcagtttcacatcaggcacagtaaatgtgaaaatccactttcttccttccatctctggcttaggtaatgtgctgtcacttgatagctcatagaaaatacggtaactaagtatgatcactttaaggtcagataactcattttgcatattaatttccttgctcacctgtttgagacctatttgaaaccttcccaattccacccttaatttttccgcatatttgatacaatcataaaaacttaaagttatgcagatttgtagcagaaaaatatagtcagaggcctggaaaagtgctctagaaggttatttagctttgtaagcaaatataattgaaagtaaatcctcagaattccctggagattgatcttgtcctttgtttaaaacgctgttccaggccgggcggggtagttcacacctgtaatcccagcactctgggaggccaaggtgggtggatcacttgatgtcaggagttcgagaccagcctggccaacatggtgaaacacccatctctactaaaaatacaaaaattagctgggtgtggtggcgcacatctgtattcccagctccttgagaggctaaggcaggagaattgcttgaacctgggaggtggaggttgcaatgagccaagattgcgtcactgtactctagcctggatgacagcgagattctgtctcaataaaaaagtgaatgaatgagtgaatgaatgaatgctgttactggggaaagccagtgtgctcggctctttgggtgtcctcagctaagtcagctcagcttgcatttctgcctcccttctgctggtctcctgtgtcttcccatcacctttctttttttgcttccaattgcagtttttacttctgattttgtaaagctgcttttcctaagcccggttgtggtggtatactgtcgtctttactgaaggaagttttaagaaacagccttagacaaagttgctcatagcactacccctagttctgtgggtgagcctcatggaaattcttctcaggggtcttttcccactgttggttttatgtccctgagccactacttggatctggccttggagacatcgctttgcagtaagggattgaattccttcctcacagtggctgctagagagcttgaagctaaattcctggtctacctccaacaaattccagacatcttacctgtttttactactaaccctcccccaacccccacaggctttgttttatttttcctactcttattttcccttcaccaagttgtctgctttttcagagcttattttagtatatacatttgagtcaacttccctaaattctttttgaaacaattagggtagccctacacaaaaacatctttgttcagctatttcttttcttttcttttcttttttttttttttagatggagtcgcgctctgtctccaggctggagtgcagtggcacaatcttggctcactgcaacctccacctcctagatgcaagcgattctcctgcctcagcttcctaagtagctgggactacaggcgcatgccaccatgcccagctaatttttgtatttttagtagaaaggggtttcaccatgttggccaggatggtctcactctcttgacctcgtgatccacccgcctcggcctcctaaagtgctgggattacaggcgtgagccaccgcgtgcagctatttcttatttttttgtctttgctttaaaaaactgtgttctgttgacagtattgttctcttgctactagttcaatccgtcttgcaacctattgacttttttaacctatctgctacagggcaaattaaatccgagatgtaatcccaaatcagggctaacactgagatagtataaactacccccatctccttaaagctcacatatcagtaaatatatttgctttcttggggacagaggattgagtggttatttgttagaaagcgcacacacaccacttttacttggttagccccgagcattagggtaaggtctgctggcctgtttttgcttctctatcctaagtagaatagagggtctgataaggctggatgccttcactgcccagccccagacgtgtaatcccctttatgaagaattgtcctggttgctgcccttttgtcccttacctgttcccttttggcttctgctccccgcttggttgccctgaacaccaaaacaaaccccgggcctctgtcactgctcaccctctgatttaactttaactttttatcctgctgtaagtggtaatggtaagaatttaaaaagaagatactcacattttgaaagtgtttattgtagaaggaaaagaaacgttgaatgtttaaaacaaaaccacaatattttatttttacaaagtgagatgcttatttacagcatttattattaactataacaccatctaccttcagttttcaaccatttcctacagacaaaatttaaaaggaagctccttgagcttgtttcttacaaagtaaataaaaatagatatacctgtattaactatgaatattttaaggcagttttgtgccggcatccatgagagactctgtccacctcctgctggtgcttcattcctttcagtgctgtacatgaccaaggcgagcaggggcagtgctcagagtctgatcgccagatgcagtgccctggagtttcctccccgcaagtccagcctgggtcagttccagccgaacaatttttgtgttttaaaaataatgtgtagactcaagataatttcactggatttaaaaatagaaataccatttcccacctgcctccttcactcctttctctaacactcaaaggcctatcctttgagaatcaaaataatatggktctttttagcaaagggatttgtgttttgccctcacatagcctaagccgtagagaaaatagataaaacgatctcaaaattattttctttcacagacaaatcatgtggaaaagacaagctactgctatgtcagggatcttgggcagagagaccccactcagtctaccaccttgagaaggatgtggcaggacccagtgggtttaaatagttcatcctgtttactgtaacatccttggtacatatgatttttttgtgctccttggagacttattctttctttggagattataggctgtttctcagtcctaccctttctaacactctcttcctgtcctcatctgccctcatccagtctccacgtgtctcagtttctgtatccgtgctccacggcagcctccttttaaggcttgaagtcttctgggcggattttcatctccacccgtttgagggagtaggtagatccatgccagccrtaccaggtgatgccatccaggtgcttattgtgctcacccaggcggtagtacactccattgaggttggagtctgtgcagcagttgtaccagtagccacctggcatgagaaacagacccagtgctagtaagttgactgtgatagaccagacatcaggtaaggagttagagccagggtcagaaagaataccaaaaccggaatatcaactgtacagttataattcactctttctcctcaagtgggattatgagcttgtacctgaacttctcctttccggtccccccaaatctcacctttgcggagctgtgcacacttgtccaagcagttgtcattgtccttgtccttggtgctgaaggctgtgttgttatgatactggagggcgtcgttccccacattgccagtgtagttccccaggaagaggcgatagctgttgagttcattgcccaaaacaaagtggctatactcagcgtagcgcaggttgccctcccagtcctgtcaggaggagcagagccttaaagaaagtgcagcaggctccatttcatgctgtctctataccccttctctcctgacagtcccatagccaaacatctttttataggtgtgaatctaataagactttattacttgtttacctccagtttactgtgttaacctgggaatcagaaaacaaggctcgaacttctttcctgattcaccatatggccttgattagtctctctttctatattcctcactttcctgcttataaggtgcagctatgtttttgctgaatcccacacagagctgctgtaagagaaacatgaggatatagtgagtgctttcagaccttcagcaagggtccccaaacagtatcagtaagatttgcacctaaaggacctcatgctcggccagagcagagactagtgttcggcacagctgactgttgaatttgctctactctggcctgggtctggcctcttcctgtcccacctgcagccccacttttgtcggggggttggggggttgcagaaaggaaaaatacctatttttcctcaactccattacaacttgcaggaaaaccatcacaatgaatatacagatttgtcttgaatcagaataggaatggcacccccggagttgtacgcggtcatgtgtggtggcactggtccagtcatggggcccctgrccttgtgcttacctccatctctacacgcagccgggttggctgtctggagagccggtggatgtgttcgttccccagccagaagtccccacggatgctgccaaagccctgcttgtactgcttccagtcccggtagaaggagacaaggccactttttcgtctctggatgatggtccagcctccgcctgaagtctccatgtcrcagaacacctgaagcagaggggatactctggtgagggacttgcaggggcagaaggcaggagcaagagggcaggcttcccaacctgttcctgtccctgcagagccagtagatgtgtgcactcccgcagtcacactggctcactcgggcagtgatgctgccccactgctggtgagctggggtgggtggtgcattgctctggaagaacgatgcaaattgggcccgggggtgagtgcacatgaagcttggagggaaaaatccagatactttttttttttttgaagcagaatttcactcttgttgcccaggctagagtacagtggtgcaatctcggctcactgcaacctccacctcctgagttccagtgattctcctgccttcctagtagctgggaccagagtgcctgtcaccacactgggctaatttttgtatttttagtagagactgggtttcagcatgttggccaggctggtctcaaagtcctgacctcaggtgattgttccgcccacctcacctcccaaaaaacttgggattacaggtgtgagccaccatgcctgggtgaaaatccagataatttgatgctgccttcgtgttttcttttctcctcccccaaggaatagctgttctaggacatggcaagagatttaaactaagttatgtggtggttataagaatgatctgatctatgttagaaggcttgttgtttgactgataatgatttgaaggggccaaacagatgcctgggtttggagtgcagggcataaactgagtgtttgcatagctctgtggtgtttggtgtgtttgcttgtgtttgagttttcctttttttttttttttttttaattgaaatggagtctcactttgtctcccagattatagtgcagtggcgtgatctcggctcactgcaacctctgcctcctgagttcaagcratcctcctgtgtagcagggattacaggtgcccaccaccatgcctggctaatttttttgtatttttagtagagacagggtttcaccatgttggccaggctggtcttaaactcctgacctgaagtgatccacctgcctcggcctcccatagtgctgggattacaggtgtgagccactgcgcccagccgaattttcctttctttaaactgtgaatggccctgttgttgtagtccccttgagggggtgaaggacaggtattagggcatggccagtgactgtaatgacctcacctccagttcagggctgcccaggaagtcatcaggaggaagcttatacactccagagatgcggtagttcttctggtagagggaagagcagtcgtagatggcatctacaagagaacaaaccacagggtgagcatttagacccagtggctccatctgagttgagtgtttagagactgagcctttatttctaccctgggattctcagtggtgttaattacccatcagtgtctgcatttgggagaggtggatatggggagatccagagggggtgtattttggctttactagcggtggagcagaggggtagggaagcccttcacctggatagcattagtgggacgttccaacaggtggtttcaggttaactctgaaataaattattctgctatagctgggccatgaattctagaaatgttacagtgtatgagggccacgtaacagatactcctgtcagatagattcagacttcttagacagccgccactataacaaatcagtcgtgaatatctcatagagtctggttttgttgatgtttcctggttggttgtttttgttgttgttcagagatggtggctactgccacctgagaccataattaagggagatagattttattatcacatattttccccttccatccagctagcacctcaaaacactcagaagaacctttgaggccttcctcccagaagttttgttaaaacaatgaaatgagagcatcagactggccagtttttttactctagggccatggagctgctactttatgcaggatttaagctctgtattctaaatatcaaagagcatagtggaagagacagccttttctgataggattcagagactgcggcccttactatccaagagaagcttcctgcctgctatgtctcggggtgcttttcttggtgaccactgcactgggaccttagagaggagcaccaagatggcagatgggagttgtctgaggcacataggttctcttgcagagcaccttgggaaagggaggtagagtacgtgtgccttcgccatcactattcttcatttcgtcttagtggtgaaagcaccaacttactgcttcctctaagggactacctacttatagaatataagggtaactgagcacttggtcatagagaagaaaaataaggaatgatgtcctgggcaagaagagcaagagacctggtgggagagctgcacttgaccccaagaacctccttgcaggatggtgagaaagcctcctgtttggatgagcaggaagtggcacggtcagattcctctgtctgrcctggtcttccgcatgtctggtttcatctcacagaccaaatcaggactcacttgtctggaaaatggcctgagaatacctttctaatcccaaactgagggcccggaagtccatgcttagaaagtgattgatacatgttggttcaggtaacagaattttcaagcttggtttcatgttaaaactttttcttaatttgagctgaggttaaccattgacttagtcagtagaagctgatcatgtctttgttcttcatgtagtttataatgggaccaatggtttttatatcagcaagaaatgacatgtctataggatatgctccttacaactaatattttcctgataatttcagaaaaccaaatttttatctctaaaccgtaaattcatgttggcccacctgagctgagctaaccagaaataaaagttattttgcaaaagaaagattaaatttatcttatttttggcctattaagtctatatttcagcattgcatttaaaaaatcctgtattcggagaaattcatttaagaccatggaaaaaaatagacgtatcacaattgaggaaccttaaggagccgcatccttcctgaacacaaagggactcttcacatggttatgtgtctctacacttaactctgagccaatgagaagagttacgtttacagagagaggacacaaaattccattaatgctcattcctggtaaatcttaggaacaccagagaactgtttctggcaaaactttgcttccagaggaacagctgttacagtttggtgcttccttggaatttcttgagatatagcctgtcagctcttggtgaggaagtagcagagctacaccaatcaggaagacttgaaccctgcttctaagacttgctgggtgactttgggcaaaccatgtagtatctcagcactccaagatggtaggctgaaacactgtgtggataaaagagacccgtgaaggtgttaggtaaacttacatagcattagaagtcaaaggaaatactgcataagcctttactaaagggaaagtgtacccacaaaagaggccccagtagtggttctgatgaccaggatatgtagaagcagtgctgtagatggggaggcactccacgctccctcaggggactggtctccttacctgcggaggtctgagtgaccgtctgtgctgcctgcagctgcatgatgtcaatttggttgttcatctcggagtacttgctctcagcatctgtgagccgcgactccatgcgcttgctgttgctctccagctccatcacctgcatgaccacgctgacccagtccctctcctgcttcttgttcagttcactcagcaggctgctaaggttggcaacttgggccttgagctccttcacctcctcacagcagttggccgctttgagctgtggctgtgctggtgtcttgtgcttagagagcttctgcagccacgctgggtggctgacaaaggccacgatgaaaatgcagagccaggtcacagctgagagaggctttttcagcatcttttgtgggtttgggtgaggaaggctcttccttcaggggagtctggagatgcccagctgaggtctgcaaagctgcagcaggctgactgaaccttacgctttcactctgagggcctcgccactttgttgttttctctctttccttgctctttgctagcctttctcaaagcttgagtctctgacaggggagctgaatgggtagcctatagctttccttccaagcccgaatgctccacaagtcagcatcttaaatattgtttgctgcctgtacctccacccctaccatggctgcaccaggctttagcccctcccagctcatctgggagggtcaggtgcctgttgggtgaagtcagcggcaacttaggccagaggaggggaggagggagatggggcgagtctttctttccttgcctgtacagtctctgggctaagacaagaggactgtgaatttgtgtgtttccagtttcgcctattagattatgcccctgccagccactggctcaastctatcagcaagcaggacagggtcagaagaatttccaaattccgttcaaaaggttatataaccatggggtgagcgtaaggtaggcgaaagagacgctactcacccagggaggcctgttaatgtaatccatgctgtttatatgaggatctggtatattttgacatcctgctgaatatgcttttatctaggctgattattcccatctctgatcattatttagtattttataaaatccttactcaacctggatctaacactatctcacatttgaaatcttccaacttagaaaagttctagaaatagaagaatagagtaaatctcttaggaagccaaaaaaagactttgtagccacagggtttggacagttgtctttttacatgctttctccttcaacaaagagagggccagtattagcatataacacttgatattttgcaaggaggtgtcagaagattacaacagagatgaaaactcagcagtgccaagcatgtctgggattggtcacccatgcttctgtcagtttctaggcaggacagagaacaggcccatccttagcccgtggttcaaaacttggaaaatatattaaaatatagagaaaagaatccctgtcacctaataaatccatatctagagtctcatttccctctttctttgctggtatggtttgcaatttgaaattattcctcctctatttgtatatgactttgtatctaaaaaacatgaatattgtaatttttcatgtactatatatgaaggacaatgctcttttgaaaagaaatgtgaaaaacatggagtttcagcaaacatccttaaaataagcttttcactaagaatctatacaaaggttcctctgtccttaaaacagtaactctgtctttggaacatacgattgctgtttccatgttatggagccacycaggcagttacttgtactgttgtagtcagcgtgggtccttcccacataagcctgatgcctgacagctctcctcccatgccataatcccccagagctcttttccagtcagggcttctagctcctcagaaagtaatttctgttcaggcagctggagttactgaacaatttttttttttctcagaatcaaaaagcagtggaggatcaggtggatcagagtttgttttctcacatacccagcctcctttgcctgctaaagggtgaggatgttactgatacccttatagcaacttggcattctaatcaaaagattctgttgagaattggcactgtctgccagtctgctctctttttgcaaatgtctagcccagctgggcaccacagccttagctccatagcattcattttagtaacgagactctggccccaaatattggcatcctacaaggtctgctaaaaatagggattttcaagtggatctcctggccatcaaatgacactgagcttaaaccacatgccacagaagtgctatgtaccatacagtcatgtatagcaggggtccctaatccccaggctgcagacctgtacttgtccatggcctgttaggaatagggccatacagcaggaggtgagtggcaggtgagtgagcattaccgcctgagctctgcctcctgtcagatcggtggcagcattagatcctcacaggagtgtgaaccctgttgtgaactgcacatgtgagggatctaggttgcgtgctccttgtgagaatctaagtactgcctgaagatctgaggtggaacagttttacctcaaaaccatcccccatctccccacccccaccctggtccatagaaaaattgtcttccacgaaaccagtccctagtgccaaaaagattggggaccactgatgtatagcatcccacgtgaccctgctgccttggaactctcatgtaacagtgcagcagagaaagcacaaaagaacagtggaactttgtggagttctagccagcttttgtttattcttcccagtagctcacccaaacaggaaagtgttatgaattgattcttatatgtgggcagaaaataaattaatcattcatatttgtaccccatgtaacagtcccttttaggaaaggtaggaggaggttcgtaagtttgtattggaagcatctagcctttagcatgagtgtctggtctttgacatttattttctggaaacttatttctaacataaggcaatacttgaagacagaagacagaagctcttgaattgcataagctacccaaatgtcaatactcaccccccctccagttttgaggaaaaatagctaattaaggatatttctcatgccagaagattatctattttctaaaacatccacaaccttatgatgtcctagattctgaatatctaaatgaaggaaaaagaagtccttgttttgagcacagctaagccagtagagaaaaccatgaaggatgtggaggactaaaatggtattgccttctctgaaagaggcttttaaatccttcttctgcctttcagtgagcagagtgaccttaaaaatgggaattaactgacaaaatctggaaaacctaggttggatactgtttagattttccttttctccattttgctggtgttgaaagagggctagcttggtgctcctggaaaaggtgtttatgaaaattaagcttttgttcttaatgaaaaaagtcagtgaggttgtactcaacctggaggttctcaaaagacttcacagtgtttgggccgcactgccttgggctggcaccaaggtagtctgagggtcacagggcaggggagcacctaggggtggtctctccttctatccagagaggagcatcagatcccatttgcttgaaaatgccccgttggagagactgctgcccactctcagcttgtggaatgaatacatctcagaagaagctgccttgctgttagttttaattgtgtatctcaaaggaatatttcacttcttctgaagtctttgaaaaaaccacagcctgccatactctatacagccgttgaatatctgcctttttttttttttttttttttttgagacggagtcttgctctgtcgtccaggctggagtgcagtggcacgatcttggctcactggaagctctgcctcccgggttcacgccaattctcctgcctcagcctcccaagtagctgggactacaggcacctgccaccatgcccagctaattttttgtattttttagtacaggcagggtttcaccatgttagccaggatggtctcgatctcctgatctgttgatccacccgcctcggcctcccaaagtgctgggattacaggtgtgagtcatcatgcccggccacatatctgcctttctagcactccatcccattcctgtctcaactgaaagtccaagtccatcacagaagatatttccatcttttccctgagctttctaatttgccacttctatcaaagaatgtgtcctgaacctattagaagtcttttctctcaggccttctcttagagtcctgttttgttttgttctgttttgttttgtgacagggtttcactctgttcaggctagagtgcaatggggcaaccatggctcattgcagcctcaacctcccagtctcaagtgatccatccacctcagcctcccgagtagctaggactgcaggtatgcaccaccacacccaactatctttttttctttctttctttctttcttttctttttttttttttgtagtgatgggggtctcactgtgttgccagggctggtctcgaactcctgggctcaagtgatcctccagcctcagcctctcaaagtgctaggattacaggcatgagccaccacacctggccagagtcagttttaaattatggaatatagtaaaaaaaaaaaaaaagtctctctgatttctgtcaggactttatagctctgttagcctccactcaagttgcacaatccagcgattattctggcccagtgtctggcagtctagttagacagctgaactcttggacagtgtgacatgctaggatgggagacacagaggacaaggagggccttctagagaagtgatacctaggttttaaagaaaaaggaggaaatagccaggaatgggagaggatgttgtaagcaaaggtgcagctatgtgaaagacttggactagtgggagaatgtaagtagtcgagtgtggcctaagagtcaaagggaagaagaatggcagcagaagctaaagctggagaggtggaggggggccgtgcccggggagcccaggtgaggagcgggactgatcctctgtagacatgggaaggaatcctagaggtttttccctcttgttccattgttttcctgagttccaccaggaaagtggccttggtaattgccaaacaatttttttttattttttattttttttagagacatagtctcattctgttacccaccctggagtgctgtagtgcaatcatatagcttactgaaacctggaactcgtgagctgaagcagtcctcctgcctgagcctccaaagtagctgggaatacaagcgcacaccaacacgcctgcctgtttttaaatttttttgtagagacggagtctcactatgttgaggctggtgtggaactcctagcctcaagagatcttcccatctcaacctcccgaagtgctaggattataggcctgagccaccacacacagcccaaacaagattttttcaccgcaaatgaatgatttagaacgtgagaatttcttaaaattgtaatgcattcatattaaataccctgacggggtcatttggcattaggattaaggaggtagtacatatagcacttgagttcttaggcctagaagcagacaaatctggattctaatccctccctagcacttggttgctgtgtggccatggacatattacttctctgagtttgccaacctgtgaaatggagataaaaatcaaaactatctcataccacaggcttttcatgagaattaaataaagcaaagggttaaataaccaaggtatttttggataaggaaaataaatttggaagagttacactactacatatcaagatttatcataaagctgcagtaagtaaggcagtacagtagtgacatggatgaacaaatggaacagaattaaatgtccagaaacagacccacatatgtagagatacttaattttgtgtatttatatttatgtatttattcctttcctctcaagccatgtgatatagacacttgatttataacaaggtagcaccacagagtggtgaggaaaggactgctaagtcagctcagtagccttatgggggaagaaaatttttttttttccctcagtgatcctttttctgaaagaaaagactgttgatcgttacctcacaccacacacaaaagctcaagtccaggagatttaaactcttaagtgtgaacagtaaaacaataaaatttatagaggataacgtaggagattaagtggcttcctaagataagcaaagatttcttaagatagaaaaaacaccaatcataaaggaaaatattaagaaatgcaacaaaagtagtcattctgttcattggaagacacaatgaagagaatgaaaggcaagaaatatttctattatcttcaatattgtatatgtattatacccagagtgtataaagaactcttatcaaacaataaggaggaaaaaggtagcacaataaaaagattggtaaaagaagccaggtacagtggtgtgtacctgtagtctgagctactcgggaggttgaggtggaaggattgcttgagcccaagagttggaaaccagcctaggcaacatagagagactctgtctcaaaaagaaaaaaataaaatattgacaaaagatgtgaacaggcacttagttcacaaagatatccaaaaggcttataaatacatgaaaagctatcccatctcattagtcattatggaaataaaaatttaaatcataataaaatgccactgcacaccaaccagaagggctgaaatggaaaaggctgaaaatagcaaatgttgacagagattgtgaagcaattgggcttttcatgtcctrttggtagaaatgtaaattggtaaagccactttggaaaacaatctgtcagtatcttataaagctaaacatatccttatatgtaactcaacaattctgctatagatattttccagcagaagtgcaagcacacatgctccagaagacatggacaagagtgtccgcgtactacccctcgtaatagccaaacactgaaaacaatccaagtgttcatctgcagtaagataggtaaatggtggtatattcacaccgtgaaatactgttcagcaatagaaaggaaaagctgttgcgacgtgcagcagcctgggtgcatgtcacaaacatagtgttgaatgtttatataattaagctcaaaaactgagcaaacaaccccattgtgttagaagtcagagtagggtttacagacctctggggacacagaggggagcagtgattgggagggggctcagtgcctctgagctgctggcagctggttgtgttctgtttctggtctgggtggtaattacaaagatgtcttcactttatgataattcatcaaactgtacacttaggtgttatattctcctatatttatgtatacttgaattaggatgtttgtgtaaaaatagataatgcacataaaacacttgaactagtatctgacacatagtcaacgtctagcaaatatcaagtagtagtattgtaccaagtagtagtattgtattatttagtacacaattgttgtctcgtcataaaagtatttgctgactactctagtctaacataaatccccataaatccccatgtttttctctaagcactctgttctcttcatggtatttgccacaaaagcacttatttcagtttgtacttttttttttttttttaagatggagtttcgctcttattgcccaggctggagcgcagtggcgcaatctcagctcactgcaacctccgcctcccaggttcaagcaattctcttgcctcagcctcctgagtagctgggattacagtcatgcactgccatgccttgctaattttgtatttttagtagagagggggtttctccatgtcggtcaggctggtctcgaactcctgacctcaggtgatccgcctgccttggcctcccaaagtgctgggattacaggtgtgagccactgcacctggcctcggtttgtacttttttgtgtatctacttctctaacctgtaagctctgcgaaagcaaagaacatgtttctcttattttccacagtacctctagcatctagcacttagcataaagcctaagacaaaatgcatactaaattagaacttgtcaaatgaaataatgaatttcaaagagaaggttctcttccccctaaatatctattatggagacttacagtctctctccatggacgtttccagtgttttactgtggtgaggtcttcgctgtagggcatcacattctgtcctgcatggggtcagttttccttcttcaggtcttagtcatagaatcaaagaaagtgaaaactgggagagttgagatcctttgtttcaaccctctttttaatttttattttatttgtttatttattttgagatggagtctggctctgtcgcccaggcttgagtgtagtggtggggtctcagctcagtgcaacctccgcctcctggattcaagcagttctcttgcctcagcctcccgagtagctggaattacaggtgcccaccactacatccggctttgaccccattttttaaatcaataacttgaggtagcttccttattgtataatatattgcatacatattcctagacatcaccaggctgtgtctcatcacttttttttttacttaggaagatgatcagcaagaggaccacagagtatctgagatcaggttttctccctctcctgtttattccagaagccagtgtaaatgacatgtctgattacttcaacctgcactggccctaggggctgcatgcaacagctaatgttgacaaaatgaagaaagtaacatgtccccataaaaactgccttatttcgggcgggcaaggtggctcatgcctgtaatcccagcactttgggaggccaagacgggcagattacaaagtcaagatatcaagaccatcctggccaatgtggtgaaaccccgtctctattaaaaatacaaaaattagctggatgtggtggcacactcctgtagtcccagctacttrggaggctgaggccagagaattgcttgaactcgggaggtagaggttgcagtgagccgagatcgcaccgctgcactccagcctggcgacagagcaagactccgtcaaaaaaaaaaaaaaaacctgccttatttctgggcagctgtagtccccatattttatccccagtaacctaacaaagctcatctgtccccaaagggaaatcaaatgtccattatattgcaatttcagtaaatcacccttagctagagataagaccttgtcaggggttgcaggacaagatcacatgtccaccccaccaagctgttctctgaactacagagcttctctttgggttagacatctccaccctgacttaggcaccacaaactggaaaacaggcctggtcattctttaagaatgttagaggatttgtgccagttatgcctgagcaaccaattaatggcaagggtgactgggttttacagtctgcaggcaaggggctaaatgggcaaacaaaacccactctttgtcttaattctaaacacatgtttccagggtgccaatattgtgctgcttgaaagtatgattcctgcttttacagttgtttcctggcttccagaaaagatatgcggtccttttctttttctgtacctctgctggaagaaaaagcagtcagtccacagaggtgaggttttgctcacagcaaaacacattccaggctgggtgcagtggctcactcctataatcccagcactttgggaggccaagacaggaggattgcttgaagccaggagttcaagaccagcctgggtaacatagcaagaccttgtctctgtaaaaagtttagtggggcatgatggcatgcgcttgtggtctcagctactcaggaggccaaggcaggaggatcacttgagtccaggagtttgaggctgcagtgagctatgattgcaccactgcactccagcgtgggcaacagaacaagacactatctcaaaacaaacaaaaaaccacattccaaacttctatgttcgtgctgacttcagaagggccagtgtgcctgtaagaatctgtgtcctttgtagaaaagctccatgctgcaaagagtaggagaaaagagcaaaagcagaagcagtttgtatctttgctgtagccccattttttttttcaaatgcacttttagattcagcccaagaggccacatctctcaccagttatcagtagagcatgcatttacttctagctgctgtcaagacttcccccagggtcactgtaacagcttgctcttgcagagcgtcttatgaaccccagggaaggctcttcagtggagaaacctcgccatcagcgaggaattgtaagaagaggagagttctggggtttctcctaaagctggccaaaaggacagaggggctattgttacaaaacaagacccttctaaggggagaaacttgctgtatttcagtggtrtccctaaactcttctacaaaagctagcttatccttcagactacctggagatttaatgggactgctcttatgctgacttagagaaactgcttctgatttttatataacactgggggagggaaagaaagtgctagcagttacactgtgtcccagtgctctgaaaccttgaattgtatgctgcatcccaatttcagagatgttaaggtgtgaaaaaaatgtgtgtcttagaactgatgaaatctagtaggtgctgggctctgcctcatggccacctctgactgttcatgcagtgatgatatcagtaggggcaccactggtctctccaaacatttctggacttttcactggctgtgaatcctggtaatccagttatagagtgccacagttctcttccatgaggcatccattaccaagaaggtgggcatggttttttcttttccctgaacccagaatgggcatcattattcctacactgtggcccaactccttaatagagtggaagaccagctcacatctgcttctacaattaaatgtgaagagttacaagctgccagatcactaggtgccagcttgtttaagttttgtttcccaactttatccacataatggactgagtcagagttcttggacattcagaagccaagaaatcaggactttacccaaaatatcacctcagttttgagtcaagagagatgaacattagctttggagtcactctatcagcccaccccttttgctccttttccccatccttttcctgactgctgcttctttctagtagtctctctcrgagctctttgtttctctctggatgtgaagaagcagaaagggggagaagaacctgcaggcatcacaagaaaaggagcagtgctcattgttgtagaataaaaagataatggccaatttgtcaagaagtgttgacaagtaagataaagttggaagtaattaactggctgacatgctgggagcggtgtgcctgccaatagctccctaaatcagccagagccttggaaatgtgacagccattcatcatttttacaacacgcctctgacaggctcctcagttgcaaacctggccagcaaaagtcgtgtgctttgacattctggggttgtgcacctctctctgccttattctgggttgtgctaaggtacctgggccctatatccaaccaggagatgcctggagacggtgagtcaaatgggccagcttgccagctcatcgctgggcagtattcctctccgaggctgggcactaggattcccagagctgactttgtaaacttctgcaggacagttcacttagcatagagagtgctgaatgggagccatcagcagcactcctggtggcctggtatctaacaagtgctgctgctaaccagccatgggatctatcagtgggaggaaacgggtatgcagccagtaaaagcaattatgaagactgaatggagtggaraatacctgtgttatgtgaaaaggcagcatacaaaattgtatctatactttcatcaccagtatgtataaaatatgcatttatgcagaatatgcgcaggtaaaagtatcttggaaaggtgattatattacaatcaacttccctcctccatttttttctttttaaaaagtggtacttccactcaccaatcttgaaaagatgagtttttttgcacacgcgcccccattcccccacgcacttcctaatctcaaaaactgttaacattctaccctctttattctaagggctcacactttctcacatacagatttagcgtgtcctctaggcattgtgacagacaaaccatttaaactgtgaccagacagaaacaaggatgaagacatagtaagaattctttttatttttaggccactctgagcctgagacatcaggaatcttttgttttgtttttggagacagagtctcactctgtcacccagtctggagtgcagtggtgcgattgtagcccactgcagcctcacactcgtgggctcaagtgttcctcccgccttagtctcccaaatagctgggactgcagacacagatcacctcacccagctaatttttaaattttttgtagattcgaagtcttgctatgttgctcaggctggtcttgaattcctgtcctcaagcagtcatcctgtctcggcctcccaaggtggtgggattacaggcatgagccaccgcgcctagccaaagaaacctattttgactgtctaaagctggccacctctcttgcaccaaacttttttttatcttggtgccttaggtccccaagagctccaagtacaccaaatgccccagctttgaaaccttgtaatggggccagccttctcttaatatataaagttctttttcctaagttccagccctgccagacccagaggtactgtcttcatcatctgattctggctttgtttcccttcacttcccctcctgtctgcattccggcagccctcccaaccttctgccccgtcacttttcagatgttttcattttgcttctgtctgccctgctgtcctttctcttctacattagtctgttcattcttgagttccccagaccattctcctgttcccagattcccaaggtagcttcctgataaagacatcaaggcctagccaaccccagatcttcctggccctagaaggaatcagactatttggttgttaatcctgcgttgggcacagagctaagcctcagtgctgggagaagtgacaggagaatctcaagcagttaccactccatgagagaaactgcttgatacagtggttaggacccaaagcagtgtccagggtggcctcagtgtggctggtcaggccacttcagtcagacctgccacagccccatcagctgtgatgcatgtgtcaccagcctggcgccaggggaattcagagaattctcacttgacagggaaccaaatgaaactcagactgtggtctgcactagaaatagacaggagaaagaaggtccacagccatttgggaagccagtgggtgtgttytcatacattcctgatgggagcgctggggaagcctgagcgttgccccagctgtgcctgcagatgctccttgctgcctgaggactttccgacaggcgccgccttgtgtggaagagkcttgcatcactttgctctgaaccccagaggtcacgcggcaccaagactgagggatgagggcgataaccaagtgggccactcaaggaggcactgccatgtcaagttactgtggactcagcatctgtccagaagcctgtggagccgtgactgagggcacttccagagacaatgttctccaggtttctcttcaggtggcaggaaaggcgtttagactgctttgctgtgggtcagcattaagtccttgagcagttaatgacccactatttcagtcaatctcatcctcctccaataaaaggcagtgagggggctgggcacagtggctcatgcctgtaatcccagcactttgggaggctgaggcggttagatcatttgaggtcaggagttcaagaccagcctggccaacatggtgaaaacacatctctactactaaaaatagaaaaattagctgggcagtagtggcgcgcacctgtaatcccagctactggagagactgaggcatgagaatccttgagcctgggaggcagaggttgcggtgagccgagattgcgccactgcactccagtctgggtgacagagtgagaccctgtctcaaaaaaaaaaaaaaaacctgctagggagagcctgagaggaaagggctatggggaggcagcaggcgccactgcccacgtgagctgctctaccgtcactcctgacagggcctttgccgggggaagtgtctgcacagctgaaccacccgctgctcagctcgcatgcttgccctgccttgggaacaaggtttctggatagtggggataagatgttcagcgtaatggtgtgatgtttgctataggaaggcagcaaggcaatttcttagtattagttctgctcagctctagaaaatgttttccttgattgccaagaactttcccagctcaattcaaaactcgaatttgatgaaaggaggctctgcaattcagcctcctttaatcagaattcaatcttgggctggggtggggagagtggagaatgaatgagaatgaatatgtctgtacagcggcctccttctgcccctgatacccagattcaccatgttctcctttccgcctgtcttcgttgtcttcctaacgccaggttcagtttgtgggctctggattctattatgcggataggcagtttctgtttgttctacagattcacaactgtatgatagcaactggatgttataactggaaactggagtagaataccaacataccccacacccatgttagggaggcagtgggaatcactagtttagaaaattcttgggactcagttctcttttccttttggcctcagtaggcgtcaagaggagatgggaaatctgattgacctgtcatttctgcacactgttataggcacgttgctgacaagcctcagtttctttaaacttgtttgtgttcagatcttttccaccagaccagcatcagcagggtctggtttgtggtgttacgtactcctcttctgttgggctggagctttgaacagtttgccctttataagcctgcagcattaatagggaaagactgaggggcacccaagggggtgtttatagaatgggctttataaaactcccagctgccccgtaaaacaagagttcctcgctaagggggcttttgagcaaaggtgatttcttcacaggagccgaacatacagtctctgccttcagtctcataaaaaccacatctcattagaaaagggacataattcaaaggacggctttgtatcacccaggtaggcaggagatctgggacttagtggctgtgaactcctgcattttcacagagacttgcttgtcctgcactttgcagcctgaactataagcctggctgtctttgaaaagcctgctgtgatggcatgctgacttgtcacgtggaaggctggaggcatattagtagcttctggaaggaaataaaaaatgtgagatgggagcttgggagtaagagaggaatgttagtgaggaagttaaaatgaaggcacaggagggctcccttctcctgcacaatgagttctagagagagagttaatggaaacatcccacccattgctcacactcgttcattttacagctaattcctgggtgcctactgatgccaagaggagaaagctaagacaccgcctgtccctcccattgcagagcttgcagtatacccttcattattacttaagatacttttttctctttacctcaacatggcactaaagatacttttccgtggtaacatttttaagagaaagtcaccttttaagggaaggcaatagcctgtgacctactgggctgtgttttcttcatatataaaatgagaatattaataatagtttcacagggtcgaaataatacatagaaacaataagcgcagtgcctggcacatatggtgagctctcttcttattttggtatcttcttcttgtatcttcttcttgttgcctcccgtgatggagtgccagaaggcatggaggaagaagaaaaaattaagatcccaaacaagataacagactctcttgatcaccaggattaataagcctgctgacttcactgtccagagcatccacatccataattagtattctccagcagytttagaggcgtgcatgggaactcctcagaaggaaataagagaaatgtagcttagggagaaagtcctgtaggaaattaaagtgaaaaagggggaagaggaaataaatacacaggctgatagcagctggttcactaaaaatctctttattctttgaacaatcaagagagtaggtgtggctgggcgtggtggctcatgcctgtaatcctaacaatttgggaggctgagacaggcagatcacttgagctcaggagttcragaccagcctgggcaacacggcaaaacttcatttctactaaaaatacaaaaaaaaaataataatgtgtgtggtggtgtaggcctttgagaggctgaggtgggaggattgcgtgagtccagggggtggaggttgcagtggcctgagatcgcaccattgcaccccaccttggataacagaaccagaccttgttgtgaaaaaaagagagtgggctaggcgaggtggctcacatctgtaatcccagcactttgggagaccgaggcggacagatcacctgaggtcaggagttctagaccagcctggccaacgtggcaaaaccccatctctactaaaaatacaaaaatkagccaggtatgctggtgggcaccagtaatcccggctactcaggaggctaagacaggagaattgcttgaacccaagaagcggagggtgcagtgagctgagatcgtgccattgcactccagcctgggtgacagagtgagactcggtctcaaaaaaaaaaaaaraaaagagagtggatatggacagtgaccttcttaccttcaggttctcaaatcagagacaaagaaattaatttctcagagcgagagtgttcatttttcatgagtttagtcaaagttgtaatttttttttttttttttgagacagagtcttgcttttttcgctcaggctggagtgcagtggtgcgatctcagcaacctccacctcctgggttcaagtgatcctcctgcctcagcctcccgagtagctgcaattacaggcgttcgccaccacgctccactaacttttgtatttttagtagagatggggtttcaccatgttggccaggctggtctcgaactcctgacctcgtgatccgcccacctcggcctcccacagtgctggggttataggcgtgagccaccgcgcctggcccaaagttgtatttttttttttttttttttttgagacagagtctcgcggtcacccaggttggaatgcagtggtgtgatctcggctcacagcaagctccacctctcgggttcatgccattctcctgcctcagtctcctgtgtagctaggactatacaggcgcccaccaccatgcctggctaacttttttgtatttttagtagagacggggtttcaccatgttagccaggatggtctcgatctcctgacctcgtgatctgcccacctcagcctcccaaagtgctgggattacaggcgtgagccaccgcgcccagccaaagttgtaattttttaatgattatgttcttactgctcaataagagcttatcatggatcccaaggtgcacccccaagtttaatggccactggtaaaggcctggtcccccagtgagcccagcctgttgccctctttcctgcccactgagctctgtctgcagcctgacctgcctccacacattcagatgggaaatattatacagataagtcataggactctccctctctctttttttttttttttttgagatggagttttgctcttgttgcccaggctggagtgcagtggcacaatcttggctcactgcaaccttcccaggttcaagtgattctcctgcctcagccttcccagtagctgggattacaagcatgtgccacaacacctggctaatttttgtatttttagtagagatggggtttcaccatgttggccagcctggtctcaaactactgacttcaggttatcctcctaccttggcctcccaaagctctggaattacaggcatgagccaccgtgcctggcctggactctctcttaaaggagttaaggccatatgtttttacatttttaatttgcaaagctatgctggtcagtccttagaggtggtatatcaaggctgtagctgtattaaggtaaaatttgtttctctttcgaggtccctaatcactacttcctaattttgatcagtttgttgtaaaactcattttttatgcrctgtgataattgggagagtggattaggaaaagacttgtatttgtttttgtttttgttgttttctcctcggaatgaatcgagcttcggtaatgttaaaatttaaaaataggctggaggccaggtgcagtgcctcacacctgtcatcccagcagtttgggaggccgaggccagaggattgcttgagccaggagattgaggctgcagtgagccatgattgtgccactgaacttcagcctggataacagagcaagaccctgtctctttaaaaaagaaagaaagaagaaaagaaaatagaatgttttccagagcacaagattgaagacagttgttagaactcctggattttctttttcttttttttttttttgagatagagtctagctctgtcgcccaggctggagtgcagtggcataatcttggctcactgcaacctccacctcctgggttcaagcaattctcctgcctcagcctcccgagtagctgggattacaggtgcccgccaccacgcccagctaatttttgtatttttagtagagacggggtttcactggattggccagactggtctcgaactcctgacctcatgatccacccacctcggcctcagttttttatgtcgtttcttagagttagtttcttctggttcaggtgaagaacactttatcttccttatcagaacaattttttactcctaccaaggccgcccggcgtgtgtggtgtggtggtgtgcgcctgtaatcccagctactccagaggctgaggcaggagaatcacttaaacctgggaggcaggggttgcagtgaactgagatcacaccactgcactccagcctgggcaacaagagtgaaactccatctctcaaaaaaaagaaaaaaaaaaaagaaaaggataggattgaaataaagatggccttcatcccaagaatccattgtaataatacagggaccatatcattaaaatatatagactatatactggctttcttttttattattattatttttctttaatagagatggggtctcactgtgttgcccaggctggtttaaaactcctgagctcaagcaatcctcctgcctcaacctcccaaagtgctgggattacaggcatgaaccactgtgcccagccactggctttcttttttcctgttttcttatgcttccaaaatctttatttggcttcaaggaactagataatcccaaatctatacctagtaatattattagtacagtttacccagccccatgtgattgggcacaaagcccagtacctgatttatggggccaagtggcattgggaactgcttcccaatgaacctacagtggagtaggtccctttagacttgcttttcattcttagcttagaaaacctcatatagggcttcctaagggaaaccatcatgccgtggtttcactctgaaattaaaaacatctccgaattttgtagcaggctaacttatggagcatattctggttcattgccttgcttagtaccagctcaagaagcaccagccgcatagcttccccaacgaatctggagcctagaaactggatactggacactcgaacagttctactcaggaaacattgggaattcgcagtgatgacttcctagtcctaacttaagtctccaccgtaggtgtatgttatttctgcagacaagcatatcactgtgttttagcagcttttatgcttggacaaacacaggtgaaggacctgcttagcaattgcatgttcattgtttaattccccgaagaaccctctgaaggaggaggtgatattagccctgttatatagataaggaatttacattcaaaaaagatgagttaaatatgtcctactatgtacctaaaaaaattaaaaattaaaatttttgaaacgacttatttatgatcacacagcttataagtggcagaattagacctccagaaagttaaacccaagtttcaatccttttgtatacatttatgcatgatgattgggtttttaccatcacatgtggtgagatgtgtctccctcaaacttgttatcacgtcagcatgtgatcagtctgacatggggaaaaaccccatcttctgactccaaatccaaggctgtttcacccycaacttttccttaacaaagaggcataaggtgcttgatttactgtggggactttcctgattcctgtgggccttggggaaaatccctgcctttcctgggctttagcttccccgttagtgaaacaggtctgataacacctctcccttcccactcttagggatgcatggggtcaaagaagtgatggattggaaagattatttgaaaacgctttgtaaacatgaggcattagattattactttcacaaatgttagcttctttagatttctgggcaatttcctttggttttattggaagaaatgtggtggaatttggatttttaaaaataatatttataacagcaatttcttgccatattaccacattgaactcaaatcctggaatttcccaaaaccacttaaaaattaattctggtcaagcagacagtttgtactcaaagcagtaaactggatccttgctcattaaaccagtctagactcccaggttgatgtgtcacattttgctccctacctttaaacagatayaatcattgtggtcttgtggatttctcaagcgagctccttcaccctcccctctttcccttccttccataactcaggcttatatttagtattgagcttagttgcataagttcctacaggaataaggatctaagcccccatggctactctgttttcaaggcctcctagcagcctctgatgaaccaactgcaggcaccaggcctcccagtggcactgcccagttgtcccagtgtggtaacagtcctccagcctaaagatggcatcagcagagcagggtgtcattagtgaaaagcttctctacagtagaggccagttcaagaaactctagatatggtcccttggcagccttctgcaaagggtggaagggaacagcccctgaagagggtctagggaggcatctgaatttgaagggggtgggctctgtcagaacggtcagcagggctgcattgccacagctcccagggttctgtcattgacgtgcatgccccaaccttggtgccacctgtgtcactcacagagtctgatggttttgattaattttgttattcctactactgaaggcaactgatgagaagttaagacttagaagttcagaggagccaggtgctgtggtgtgtacctgtaatcccagctactcaggaggctgaggcaggaggatcacttgagcccaggagtccgagaccagcctggacaacatagcaagacccggtctcaaaaaaaaaaaaaaaagttcagaggagtctcatatgattgtgtactacaacagggataatttcgtatccaaggtttctggtgtttcagaaacagacacatgttgcctgcctgccggcgtctgagaggaaaccagtctatgctctttttttttttttttgagacagtgtctcactctgtcccccaggctggagtgcagtggcacggtctcggctcactgcaagctctgcctcccaggttcacgccattctcccgcgtcagcctcctgagtagctgggactacaggtgcctgccaccacgcccggctaatttttttgtatttttagtagagacagggtttcaccttgttagccaggatggtcttgatctcctgacctcgtgatccaaccgcctcagcctcccaaagtgctgggattacaggcrtgagccaccacacccagcctagtctctgctcttaaaggaagggccacagagcagcaagatgagtgttcccattactgacccccagaatcatgggaggagagcacaaacctctttcagatgaaacgatttaaactgagctttctggatggtaatagataattgatactctttcagcatctgcaagacattgtcctcaaagtgctggtgaaccatctgcccacaaatgacccccacatctcctaccctcagacctgttgagtgtaactaccttttccctttgttttctcagcattaataataagctacagcagccggaggcagcggccggagtgttagaatatgccatgaaacactttggagagctggtaagcacctcattctttttggaaaagcaggaggtagagacttggctagggagttattggccctgaccttcagaaagttactttccttttctgttttttctccaattcataacagtctgatgctgacttaccagtcttcaggatgaaagagataaactgtgtctgtagggactctatttctttcttttttttttttaattatactttaagttctagggtacatgtgcacaacgtgcaggtttgttacatatgtacacatgtgccatgttggtgtrctgcacccattaactcgtcatttacattaggaatatctcctaatgctatccctccccgctccccacactccacgacaggccccggtgtgtcatgttccccatcctgtgtccaggtgttctcattgttcagttcccacctatgagtgagaacatgcagtgtttggttttctgtctttgcgatagttcactgagaatgatggtttccagcttcatccatgtccctacaatggacatgaactcatccttttttatggctgcatagtattccatggtgtatatgtgccacattttcttaatccagtctatcattgatggacatttgggttggttccaagtctttgctattgtgaatagtgccgcaataaacctcatgtgtgcatgtgtctttatagcagcatgatttataatcctttgggtatatatccagtaatggtatggctgggttaaatggtatttctagttctagatccttgaggaatcgccacactgtcttccacaatggttgaactagtttacagtcccaccaacagtgtaacagtgttcctatttctccacatcctctccagcacctgttgtttcctgactttttaatgatcgtcattctaactggtgtgagatggtatctcattgtggttttgatttgcatttctctgatggccagtgatgagcattttttcatgtgtcttttggctgcataaatgtcttcttttgagaagtgtctgttcatctcctttgcccactttttgatggggttgtttgattttttcttgtaaatttgtttaagttctttgtagattctggatattagccctttgttagatgggtagattgcaaaaattttctcccattctgtaggttgcctgttcactctgatggtggtttcttttgctgtgcagaagctctttagtttaattagatcccatttgtcaattttggcttttgttgccattgcttttggtgttttagacgtgaagtccttgcccatgcctatgtcctgaatggtattgcctaggttttcttctagggtttttatggttttaggtctaacgttgttaagtctttaatccatcttgaattgatttttgtataagatgtaaggaagggatccagtttcagatttctacatatggctagccagttttcccagcaccatttattaaatagggaatccttcccccattgcttgtttttgtcaggtttgtcaaagatcagatgattgtagatgtgtggtattatttctgagggctctgttctgttccattggtctatatctctgttttggtaccagtaccatgctgtttggttactgtagccttgtagtataatttgaagtcaggtagcgtgatgcctycagctttgttcttttggcttaggattgtcttggcgatgcgggctcttttttggttccatatgaactttaaagtagttttttccaattctgtgaagaaagtcattggtagcttgatggggatggcattgaatctataaattaccttgggcagtatggccattttcacgatattgattcttcctatccatgagcatggaatgttcttctatttgtttgtgtcctcttttatttcrttgagcagtggtttgtagttctccttgaagaggtccttcacatcccttgtaagttggattcctaggtattttattctctttgaagcaattgtgaatgggagttcactcatgatttggctctctgtttgtctgttattggtgtataagaatgcttgtgatttttgcacattgattttgtattctgagactttgctgaagttgcttatcagcttaaggagattttgggctgagatgacggggttttctaaatatacaatcatgtcacctgcaaacagggacaatttgacttcctcttttcctaattgccttttatttctttctcctgcctgattgtcctggccagaacttccaacactttgttgaataggagtggtgagagagggcatccctgtcttgtgccagttttcaaagggaatgcttccagtttttgcccattcagtatgatattggctgtgggtttgtcataaatatctcttattattttgagatacgccccatcaatacctaatttattgagagtttttagcatgaagcgctgttgaattttcttgaaggccttttctgcatctgttgaggtagtcatggtttttgtctttggttctgtttatatgatggattacgtttattgatttgcatatgttgaaccagccttgcatcccagggatgaagcccacttgatcatggttgataagctttttgatgtgctgctggattcagtttgccmgtattttattgaggatttttgcatcaatgttcatcagggatattggtctaaaattctcttgttttgttgtgtctctgccaggctttggtatcaggatgatgctggcctcataaaatgagttagggaagagtccctctttttctgtttattggaatagtttcagagggaaggaatggtaccagctcctctttgtaccactggtagaattcggctgtgaacctgtctagtcctggactttttttgtttggtaggctattaattattgcctcaatttcagagccagttattggtctattcagggattcaacttcctactggtttagtcttgggagggtgtatgtgtccaggaatttatccatttcttctagattttctagtttatttgtgttgaggtgtttatagtattctctgatggtagtttgtatttctgtgggatcggtggtgatatcccctttatcattttttatgtgcctttttgatatttgattcttctctctctctctcttttttttttttttttttttcaggcagagtcttactctgtcgcccaggctggagtgcagtggcatgatctcggctcactacaagctccgcctcccaggttcatgcaattctcctgcctcagcctcctgagtagctgggactacaggcgcccgccaccaagcccggctaattttttatagagatggggtttcaccgtgttagccaggatggtcttgatctcctgacctcgtgatccgcccacctcggcctcccaaagtgctgggattacaggcatgagccaccgcgcctagcctctcttttcttctttattagtcttgctagtggtctatcaattttgttgatctttttcaaaaaaccagctcctggattcattgattttttgaagggttttttgtgtctctgtctccttcagttctgctctgatcttagttatttcttgccttctgctagcttttgaatgtgtttgctcttgcttctctagttcttttaattgtgatgttagggtgtcaattttagatctttcctgctttctcttgtgggcatttagtgctataaatttccctccacaccctgctttaaatgtatcccatagattctggtatgtggtgtctatgttctcattggtttcaaagaacatctttatttctgccttcatttcattatgtacccagtagtcattcaggagcaggttgttcagtttccatgtagttgagcggttttgaatgagtttcttaatcctgagttctagtttgattgcactgtggtctgagagacagtttgttataatttctgttcttttacatttgctgaggagtgctttacttccaactatgtggtcaattttggaataagtgcgatgtggtgctgagaagaatgtatattctgttgatttggggtggagagttctgtagatgtgtattaggtccacttggcgcagagctgagttcaattcctggatatccttgttaactttctgtcttgatctgtctaatgttgacagtggggtgttaaagtctcccattattactgtttgggagtctaagtctctttgtaggtctctaaggacttgctttatgaatctgggtgctcctgtactgggcgcatatatatttaggatagttagctcttcttgttgaattgatccctttatcattatatagttgccttctttgtctcttttgatctttgttggtttaaagtctgttttatcagagactaggattgcaacccctgctttttttttgttttccatttgcttggtagatcttcctccatccctttattttgagcctatgtgtgtgtctgcacgtgagatgggtctcctgaatacagcacactgatgggtcttgactctttatccaatttgccagtctgtgtcttttaattggagcatttagcccatttacatttaaagttaatattgttatgtgtgaatttgatcctgtcattatgatgttagctggttattttgctcgttagttgatgcggtttcttcctagcattgatggtctttacaatttggcatgtttttggagtggctggtaccggttgttcctttccatgtttagtgcttccttcaggagctcttgtaaggcaggcctggtggtgacaaaatctctcagcatttgcttgtctgtaaagtattttattcctccttcacttatgaagcttagtttggctggatatgaaattctgggttgaaaattcttctctttaagaatgttgaatattggcccccactctcttctggcttgtggagtttctgccaagagatccgctgttagtctgatgggcttccctttgtgggtaacccaacctttctctctggctgcccttaacattttttccttcatttcacctttggtgaatctgacaattatgtgccttggagttgctcttctcgagaagtatctttgtggctttctctgtatttcctgaatttgaatgttggcctgccttgctaggttggggaagttctcctggataatatcctgaagagtgttttccaacttggttctatttcactccccgtcactttcaggtacaccagtcagacgtagatttggtcttttcacatagtcccatatttcttggaggctttgtttgtttctttttattttttctctaaacttctcttctcgcttcatttcattcatttgatcttcagtcactgataccctttcttccagttgatcaaatcggctactgaagcttgtgcatgcatcacgtagttctcatgccatggttttcatctccatcaggtcatttaatgtcttctctacaccggttattctagttagccattcgtctcatcttttttcaaggtttttagcttctttgcgatgggtttgaacatcctcctttagcttggaaaagtttgatcatctgaagccttcttctttcaactcatcaaagttgttctccgtccagctttgttccgttgctggcaaagagctgcgttcctttggaggggaagaggcgctcttattttaagaatgttcagcttttctgctctggtttctccccatctttgtggttttatctgcctttggtctttgatgatggtgatgtccagatggggttttggtgtggatgtcctttctgtttgttagttttacttctaacagtcaggaccctcagctgcagttttgttggagtttgctggaggtccactccagaccccgtttgcctgggtatcaccagtggaggctgcagaacagcgaatattgcagagcagccaatgttgctgcctgatcgttcctctggaagcttcgtctcagaggggcacccagccgtgtgaggtgtcagtcggcccctactgggaggtgcctcccagttaggctactggggggtcagagacccacctgaggaggcagtctgtcgcctctcagatctcaaactctgttctgggagaaccactattgtcttcaaaggtgtcagacggggacatttaagtctgcagcagtttctgctgccttttgttcagctatgccctgcccctagaggtggagtctacagaggcaggcaggcctccttgagctgtggtgggctccacccagatctagcttcccggccactttgtttacctactcaagcctcagcaatggtgggcacccctccgccagcctcgttgcctacttgcagtttgatctcagactgctgtgctagcaatgagcaaggctccgtgggcgtgggaccctctgagccaggcacgggttataatctcctgatgtgccatttgctaagaccgttggaaaagcgcagttttagggtgggagtgacccgattttccaggtgccatctgtcacaacttcccttggctaggaaagggaattccctgaccccttgtgcttccggggtgaggtgatgcctcaccctgctttggcttacattccatgggctgcacccactgtcctgcacccactgtccgacaagccccagtgagatgaacccagtacctcaggtgaaatgcagaaatcacctgtcttctgttttgctcacactgggagctgtagactggagctgttcctattcggccatcttggaacctccgggactctatttcaactgagataaatcatgagggtagattcgaatatgcaataagcactgattttatcaaactcttagcatgtgcctggccctttgctaagtgtttatatacttcatgtaatttggtcctcacaacaatgctatgaagtggttactgctgttatcacattttacagatgaggagactgtggtcccagcaggttaagaactggtctgagctgacagagtgaataaatggcaaaaccaggacttgaaccagggcagtctgacattagagccaaggcatttgcccctgatctgagttatctttgtgggagcttgcattgtgtctaggccacagttaatcctcattagatacttaggaagacaccatggccagttctttagaaaatatatgctatacagccgggcgcagtggctcacgcctacaatcccagcactttgggaggccgagatgggcagatcacctgagatcaggagttcaagaccagcctgaccaacatggagaaaccccatctctactaaaaatacaaaattagcctggcatggtggtgcatacctgtaatcacagctactcgggaggctgaaacaggagaatcgcttgaacctgggaggcagaggttgcagtgagctgagattgttccattgcactccagcctgagcaacaagagcgaaactctgcctcaaaattaaataaataaataaataaataaataaataaataaataaataaataaatgctataattgatatctgacattgaggcatttttgtgttcgttattgcttacatagctacttccctactgccatctttggcctaccaatatttaaaatgtttctgttattctttgtggtcttggcagggcattttgataacttctaaaatacataaagcatcaacttaatcaacttagtattgaattcccggaaggtcaagaagctctaggtccatatatttgatgaggaaccttttgttagtcatgtaggttgcttactgtggtttgccttgatcaggagcccaggatgttaaagtgagaaaaattgggaatatttaacaggcttttgtttgatcatctagcattttgcctcacagaagggctagtaaattagaatgaaacgtttaagggaatcttttgccatctttagcacatattatcttttttttttttttgagacggagttttgctcttgttgcccaggctggagtgcaatggcacgatcttggttcactgcaacctctgtctcctgggttcaagcgattctcctgcctcagcctcccaagaagctgggattacaggcatgcaccaccacgctcagctaattttgtgtttttattagagacagggtttctccatgttgatcaggctagtctcaaactcccaacttcaggtgatcctcccacctcggcctcccaaagtgctgggattacaggcgtgagtcaccatgcccggccttagcacatattatctgtaactagactaagacagcatttctccagatgatggcaaagtgaaagaactgtatctcatccatccttgccacaatccttgtttgcagagagaagaaagtagggcgagagggcacttcatgtactccacctagatcaagatgttctctcctttgatatccttagagcttagatcccagaaagtgctgattgagacaaggactccgcagacatctggtattcaggtgatctgccagcagatggtttataccccatactcagaatgccagccttcaatgaaactttctccatcttcaggttccaaaggtggccattagctccaggattattgctaaacccgtggtggattttctgttatatttaggtagctgaatcatattaagcttgacaatggtttgctttttcttggcagagcctgtgctttctcagcaaaatttatgtaacagcaatctcattagaattttgtgtgattcattgcttaaaccttatagtttctgcaatctattgcaattcaaaatatcctaccctctaactgacccactccatatgctgccccctctcccctctgcttgttcatgctgagtgtatgccacacattagtcaccagctcttttttttttcttttccacccagtatagaaatttgaaatgagaaatctaccagtgcttttaaattttacagtttttgtagtcactcttttctaagtttcctattttgtatttaggcataatagatattattttggacaggcttgaaaaatgaagttgagatagtttgccttacgtggagccagatacgctcattttgacaaactccactgatgttgggcaaagactttatggcagcagaattagtctaggggcagcagagggcaccggctctgccagaaagaaccagaccagggaaagtaggtacaagggaacaatctccagcataaatgacctcttttcagaggttcaagaagaaaagattattttagacagcttagcagagtagttgttagtctacatactgcacaaacatcagttttatttagaaaggggaagagggtaatgggagaaactagtgtgggccctgcattatatcatacaaatttcactgcagaatcatattgttgttaaagaaatccctagagagccactacccttgcctgtgcaaaaatagtcatttattgagctgatgatgaagtagcccaggagagaaactgagatggagggcagacagaaagcatataaaacagtctcctgatcatttggagagtcatagtctgtaactttcagactgtagcacctcctactcacgtggacaacaccctctttcagcgtggcacaccatctgctagggtaatgcaatccctcctttggcccctgacactggtaaacctgccaagcactgagcaggagggaacattggatgggagactctagaagaataggggaaagactttccaaaaaattttaagtggtggtgttatattttaaattattatttcctgaaagtttaaaaatgtgttaagaaatgcagagaatcaagaggttttaaaaagtgagttgttttcctccagcaaacatgcagatgaggcctggtctttctggccccatcaggaaagcagctgccatccctgtcaagtagcccagtgtcagcactccagcagatcggagcgatggcacctttgaaacagctctggtgctctggtcgacgttttcttctatccctaaatgatttcccctgtcctcgtgtccgcacatcctggtgtgttctgatgacccatgtgtctgggaaggaaataatgggggaggagtatggcctgacgtctgctctcagataatcccaggatcattccatccatgtgccaaggaaccagtatttccaccttccccaagcagcactcctccagattgtctgaagttgtttttaatccaagcccagacgtaactgtgataggtgaagtgtcatgcgtacagcagcacattaggaaagagagtatgtggattaaacaatgtgatcccttcttctgtgtacctcacagcagtctttctttcccatgtaacaggagatccaggctacctggtatgagaaactgcacgagtgggaggatgcccttgtggcctatgacaagaaaatggacaccaacaaggacgacccagagctgatgctgggccgcatgcgctgcctcgaggccttgggggaatggtgagcttcctagaatgatggcatgtgtggctgcaagagacttcgtctctttgatctttggatttgaaaggaaggcttcccccacacggagttctcacttcagactcattttgttccacttgatacttctcaggaatcatctttcacttttggtgtttttctctctccattctatctcagctgctaagtaggaaggccttcacttaaactttataatgctctaggacaggacagccttgggggtgctcctgggatctacttctcctgtctactctcctgatctttactgacccagtgaagagctcatattcttacttggcaaccttgatttttaaaattagctcttgcagatgtttttaggaaagaagaacagtgactgccctcttcaggtgcttcacctatatcggatgcttactgtgtgtccagcactatgccaggctccaaggaaacaaaatacacaagaaaacaggcctttcctgtgaggttgatgagacagccacgtaaacagagggttattatagcctgagaggatgttgataatgtrtgagccatgctaccttgaaagcccaaaggaggaagcagggtgattttgcagtacttcctggaggaaggactgagagttaggagataggtaaaggagaaggtaggggggaaacaggtactccaggtgcaagcaacagtaatgcgtaactgagaacatttggctaggttttggtttggagagttgcttgggaatgttgaagggaaaaaatggcctccattctgtttccaacaacaagtgcaacttttaaaaaatagttaaaataaaatgctatactatcattgttaaactgtttaattgcagttttaaatgactaaaacaggccgggcacagtggctcacacctgtaatcccaaccctttgggaggccaaggcaggcagatcatttgaagtcaggagtttgagaccagcctggccaacatggcgaaacctcgtctccactaaaaataaacaattagttggacgtggtgttgcaggcctatgatcccagctactcgggaggctgaggcaggaggatcacttgaacccgggaggcggaggttgcagtgagctgagattgcaccactgcactccagcctgagtgacagagcgagactctatctcaaaaaaataaataaaaataaataaaaaataaatgactaaaacaaagttccatgctacctcccgactagtaggttatccctactttctctggaacatgatactgagggtccactgttccttcattcagccagtaactatcacgtgtgtattcattgctagtgtctgtgccaggccctagggacacagccgtgagcaagacagttacagcccctgccttcccagagcttacaggacagacaaccaggctgtcgtaatacattgtgataccatcaacaaaggagcccagggggctgtgggtaataggaagcaccctaatcagccttggaagataccgggaggaaacgatatctaacttggacctgtacaatgaggagcacagtatgggggattttagtaggcctttttgttcagattcttctctgtgaccccctgtcttcagaaataaggatgtacctttcctccaggtatagggaaggcatctctcacatgagggccttatgacctccttcaggggaaggtcaaaatatttttcctagatgttatgacctgcttcagggcataagggcaggggagagtcagagtaattttttttttgctgccattttcttaaaatattcagtatgccaaggtgtgctatatttcagggtagtatatcctgacccccatcacagggatgtacattgacggcaatgtgctgtttttaccattttgcactctgctgttttcacttaacaagtctaggccactgttccatatcagcacctgtagagctactgcctcatttttttaatagctgcatgatatttcatcatatcaataaatctagtctatttaatataggcaaatttttatttgtttagacatttcctgccttggaaagtttaagaatattggacaaaatcaaagcaagtcttctaaaagaatgatctttcactacatgtagtctttctgtactaccttagcctcccttgtagctgagactacaggcacacaccaccacagtgggctaattttttttattttttgtagagacggagtctcacagtgcagtctaggctggttttgaactcctggggttcaagcgatcctccctctttggccttccaaagtgctaggattacaggtgtgagccactgtgcacagccttcttttttttttttaagaggcaggactttaatctgtctctcagtggagtacrgtggtgtgatcacagctcactgtggtcttgaactcctggactcaagcaatcctcccacctcagcctcctgagtagaaggaactacagaaatgcaccaccatgcctggctaatttttttaaattattttttgtagggatagggtctcattatgttgccaagtttggctgttatttcttaatataaagttattactacatccccaagatagaagatgttataatgttttgcatgaaaatttaatgttagtgaacttagccttaggcattggatcatatatatatatatakagagagagataatattccacaattatttgaaagtggcttgtctgatttaaccatcattaggaagatttttatttatttttatttttttatttataggaagtgttatttatttttataaattaacattaaaaggctgagtgtggtggctcacacctgtaatcccaaaactttgggaggctgaggcaggcggattgcttgagcccagaagtttgacactagcctgggcaacaacaacaacaacaaaaattccatgttcatttacctcaataaatttaggaagcatgtcttttmaaatccgctttatttatttatataactaaagctgttgttgttgttgttgttgttgttgttgtttttctcagtccaacaagtatctaaagctgtattgtccaatatggtagcctctagccacatgtggcttttttttttttttttttttttttttttttttttgagacagagtctcactctgtcacccaggctggagtgcagtgctgtgatttcggctcactgcaaccttcacctcccagggtcaagtgattttcctgccccagcctcctgagtagctgggattacaggcatgcaccaccactcccggctgatttttgtatttttaatggagatggggtttcgccatgttggccaggctggtcttgaactcccaacctcaagaaatccacctgcctcagcctctcaaaggtctaggattacgggtgtgagccactgcatccggccttatggctatttttaaattaaataaaatgtgaaattcagttcctcagtcataccacattttaggtgttcagtagccacatgtggccagtggctgctgtattggacagtgcacatagagaacttttccatcatcacagaaagctctattggacaacactgatctaaggcaaaagaaaagtatgttaataagaattattcacattatttcaaaaacaatttttctagtttcatatcagctgtcatacaatcatatcttgttatgagaaagataaaacgagatggaagtgttcttaaaattcaactctaatcaattcctaaaatactgcaatgtttcactgttgccattggatttacatataaatatcacagcctggcattcaaagtctttcctattatggcaccagcccgcttcttcagcacatttctctgtgaacccttctctcataatctgagctctggccaaattattcactcttctccaagtcctacattcattcgttccattctttgaattgccctcttcttctgcctctttttctacttttgaaatcctctccactgtttcttccctcttgaaacctctcctggccccttccccttccactcctctcctttcacattaaagatgaccacttttcctagctgggttagtaggagcagattggatacattggaagagacttgagatgtggtttcctccaattcctttgtgttatagttgaagaaactgaggctcacagaagttgagaaaaccgagctgagtgatatcgatctcctgatgttgccgttctcagtcccaaatacctctgacctcttgggttctttcccgttttatagttacccataaagcgtaagtggctagtaatgctgaccaaaggatttaagaatgtgggagactaaaagaggttttaaaacgagtcgaaagaagcagaatatttttcctgatcatatgcaggtttctgatacggtttattcagtcaattctgtttagagtgcaatttctaaatttcttttgtgtgcgtatatcctgaatatgcctgaggcagatgttcatcagaggtgacatgaagaatgatctggagttaacagtgagctgagacccttcccatttccccattcttatctgcctccaggaggctgtgagagctaggcaacccgcaccccctgccctgcccagccctatggtgcaggcagccacgcctgcagccaaagtgaactaaagtgaaccccctcctcaaactgttccccacacagctaggtattgagaacagattcctcgggagtgagatcataggccctcaaccctaagaggagccatggagccattccaaatgaaagaatacttcctaagctttttatttgttttaaatcttcagggaccatgcyatcttctctgtatcgttccaattttagtatatgtgctgccaaagcaagcactttctgcgttttttgccagaacgctaggtgagaaaatcaaagtctcagagggtgcaccttttacccagtcctccctatgtgtagtgaaaggtatcagaaaaacatatcctagttgttgccccataaacaatctcatgttttttatttatttggttttgcccctcacccaaccgcccttgagaggtaggactcggtatattctgcattattttttgtaacaaatgtttgtggaagagcaatgctcttgtctgtgtactgaccaagctctgacagctgttcccacacagctgcatggtgaaggccgtgcgaagttcactgctagggcttgcccttctgagttgctgttcctacattgctccctgctttgtctcttggggtaacaatttgtgggatttcagcactgaacttgcttcctgctctagatgaaaagaaaaactacatccttggtcctgtggcacagaatcagctgatcctgaaaaaataatagagggaggctgagttaggagggacagcttgcatgaaggatgcattcatccaagttgcttgtgttcaccagctgtaaattttgaactatagggttggaaggaccatttggagatcatgcagctttctcttctacctctagtcaggatccctacaaaaatatgctgtgcagatgagctgtgcctctgctttaagccagtggttctcaaactgtgacccctggtccagcagttttggcgtcacatagaaacttgttacaaatgcacattctcagcccctatcccagcactactgagtcagaaactcagagggtggagcccagccatctgaaggagccttccaggggattctgatgcacttagtagtttgagaactactgctctaagggaacccctagcagggcccaggagtgaagatttctaagtctcggtggcagaaaaccaacacagaggtttatcctkttcccttaatggagcttcagtaaatgcatagggcatcatggccaccagttcctctttttggtctcagctctgtattgagccagagtgcttgtgtccctggttttcttgatcatgtgccagagagacaacaaagttaatatctgctgtactgcgatgctggataatggccctgagtacctctcctagacgtggtccacagtcagcttcttggtgagctcagcctagattccttctgcagggattgacttcagcatctttatccccgccctcctacaccaccttagagcgcagagcagctcatgttccatgaggcttctgacctgggccacttagaacttgtgcccttcctcatgactccacctccagtgccaagttaaatcatcctgcagcatgtctttcagaaagcaggaaaaattaaggagtctcctagctgcatcttgaagctcacatgaaatcagggactcggatttgcataatagccgagtttattttttttcactgagaagcgaaacatgagagggagtttcaacagtcaatagcaagaccctattctagggcttccatgttctcttttgtttattggggtgtcttaagcaccatttatatctcaatatctcatagtcctccttcacattcagcaattgtgcaaaattctgagaataagcagcatctagccttctggtagatgtgaccattgtggagcctttcttctgtacagattgatttcatctgggtttcatttcagactgaaaccattggtataatacttttaggagccagttctccctatagctttgagcccaaaatgaatgtccagatgcgtctcttcagattgctttctctgtaggcctgccaaagggaaagagcccagaattctttggcataggagagaagttatttaatatttatgaagggagccagatgttcaggacatttcatatcacagagttaggcatggttcctatccttgataaactcacccagaaaaattacgagcaccgggtcatagaaacaacaaatagcccattgattctctattatgtgacctagtagaatgtgcttttttattaaaggtgtccagttcctgtgtagtcctcacctaacccaaggggcaggagaggaagattggtagtttaaggagatttggattaatctgactatataattcattttcttcaggggtcaactccaccagcagtgctgtgaaaagtggaccctggttaatgatgagacccaagccaagatggcccggatggctgctgcagctgcatggggtttaggtaaagcttccctcacaggcaccctgtgaaggatggggtgagtgaggctaggggctcgcatcagaagagtaaggtgctggctctaggtggagatccaggtctatggaagggtaaaaatggtctgtatccacctacttctacaccttccatctgtcctttctacctgatgatttttattaacttgttagacatggggaaaattggatcttcgtggggaggccaaggaaaacggtgcacaaaatcaaaattgagatttagtgggtgagaaatacacacttagcacactcacacagagtactgatgccagatgcttttccccatacaccaagccattgtcagcagacaccagtggggtgtcaagtagttcatttctgaccctatctacttggaaatagcatcagatcccacaggttaagggctcgtcccaaaatatcgccccacttcagatgccaatcacaagttccaggttgtgatttgtgtttctcactgaccagctgtaaatcagggttcccataaccctcctcctcaggtttgataatttgccaggacagcgcacagaacaaaaggagacactttacttacatttacttgtttattataaagggtattataaaagatagaggtgaacaggtacaatgagggaaggtctagaagggtctggagtgcagaagcttctgtcctgtggtactggggtttaccttcaccctcccagcaccttcatcaacctggaagctcattgttcaagagtttttattgcctttcattttcaacctcttcacctttcctggatgtcagtggacagggctgaaagttcaaacccgataattacttggtctttctggtaaccagccccatcctggaaggggagaaggagggagagacaacataaggcaaagtttaagtcacatgctactcaaagaaccaatctctttggcaataggtttggatattctgtaaggttagtggggtcatacacctacacattcagcagggtactagggtatgcatctctgtgtctccatttacctcttcagttgaaagcagaaataagagatgagaaggctgggtgtggtgactcacacctgtaatcccagcactctgtgaggcttgggcaggaggatcacttgagcctgggagtttgaaatcagcctgggcaacatagtgacactccgtctctaccaattatatatatatatatacacacacacacacacataattttttttttttgacatggagtctcgctctgtcacccaggctggagtgcagtggcacgatctcggctcactgcaacctccgcctcccgggttcaagcaattctctgcctcagccctccgagtagctgggattccaggcactgccaccacgcccggctaatttttctatttttagtagagacggggtttcaccatgttggccaggctggtcttgaactcctgatctcgtgatccatcctcctcggcctcccaaagtgctggaattacaggtgtgagccacagcgcctggccctaatttttttgttttaaagagagatgaggagaagtctctttaggttcctgcatccagctatgcctaaagtcataaagtcatctctataattggccttctcaataaataaattttttcttaaaccattctaccttatcagcataatcaataggggctcattatgaataataaggaacactcctatcactcaggaaatgcagagggttttcgatagctctataccaggcactagggacaaagaccaaacatatttcttcttataccacagtaggatttggctttggttgcctaaagcaagttactgatttattttcctctcttataaatgaaatctagaggtaggcgtttccagactagtattttggctctattatcattagcctttttccagatttctgctttgcatgctcagcctgtgcctccattttaaagttcacctcatgatctagcatggttgctggagctccccatgtcatgtttttatcccaagcaggagtaaagggagaggacagttgtctatctccttttgttaatatttcttaacttatattttagaagtttcccaatatatataacagtgaagattatagtataatgaacccccatctgcccttcaccttttccagcaattacaaacattttcaccatttattgtctctattctcctctttgctgcccaattcttacccacctcactcctactcccagagttaaagcagagatttcttttcaatccctgcagacatgtcaatttctgacactgggccccagctaagaggattatcaatatgtgttccagagatggtcttgataagaagggagaggatatgtagagtgtccctggtgaaaagcttcacctgtggagcccagaggaaagttacataaccctctacctccattctcttcttctgtccctcttgagtcacagagcttataccttttcctttcatgagctctgggctagatccggaacatttttcaaaaacaaattgcttcctgaggagtcattgttagctatttgcttgtgcccagaggcatagagaatggatgagccgatggtctggagtgagaggcaggaaaatgccttgtaaaattggcagccctgtagtttgcagctaatgaagctgatatcttttctgcagatggtcttggaaatcctggcatttgatacatactcaccccaccaggagaagtgaatacctcttcccggatgcagctatttcccctgtctaatatgacacagagagcactgtgctgtgacctagcccatctttttgttataatggagtcgcttaaaatatttatctcctccctcctgaggcaaagatattgccagaatgaaatgggcaagctatttgtctaatcctgtcccctatcatctgtgtaatggctattttcaattgtttrgaggaaaatgtaatttcccaacataccattgaactgtgagctgtctcagtagtaaggaagaaagcaattttgttgcacctggagaaacctgagagagttctctaggataatgaggtgctgcattcagcccacttgatgtgcagacttcacactcatgcacttcccctcatctgtcaagatgctccctgggcagccatggagtcctgtgtttggaagacagatgtggctttttttgttacgtcaacctgcatagtgtgtataggggctctgcaggattttggtacatgaggctcaagtttatttgtcttgtttatatcccaagctaaaggaaaataacagtggcaagacctatttgagatgctgcctttagcccaaccagccaacccccttgatgctttctgtctatgtgtgtgtgtataggtcagtgggacagcatggaagaatacacctgtatgatccctcgggacacccatgatggggcattttatagagctgtgctggcactgcatcaggacctcttctccttggcacaacaggtaaaaacctacatgcacccagatctctcagtgaggaaaagawtgtagtgcttctaagcccacggtgctttggtaaagaagctgttgtacttcaggtctgatgtttactyggctctgtgagtacatttgaatggttttgattcattgtactcagaagactgccagcaggtcagctggggctacttattgttctgagggggacaaatgtgttctggaagctactgtctcggttgcttttggagttagcttgttgggtcatcattgtatcccttgttgtagagagaagctgtatttcaccaaaaggtaggattcagagagccagcagtctcactgtgcagcagaaatcagtcacaagggtcttctggccatgcaggcatgtcacacattgattaccttccgaggaagctagtacttacttgcaaatagtatgctgacttgcagaatgaaataatgaagtaatcccatccaccctgtcagacacgagacttagatgaggtgcccgggtaaatgatctgagcacttaaggcattgggacactataattaaccttaaacattcaaaaacgggaaaagctctgcatgaggggtttttaattgatggcacagaggaaactcaaactgcagtgctgtggcgtcccccaggctgtcatttgtgtgatgagaaccaagatcttggttgtctctgtcagagacacaagagttcccgttcatgtggacaggattgggcatctctgccaattttagagacactccctcataaggacagagggtgcttggaagccagagctaccacctggagccattgaagtgtgtgcagaatctattttcataaacatgcccagcaagaaaaagttaaaagagggtagatccccaggctgggcacagtggctcacacctgtaatcgcagcactttgggaggccgaggcagacggatcacttgagaccaggagttcaagaccagcctgcccaacatggtgaaaccctatctctactaaaaatacaaaaattagctgggcgtggtggcgggcgcctgtaaccccagcatcccagctacttgggaggctgaggcaagagaatcgcttgaaccaacatggagaaaccctatctctactaaaaatacaaaaattagctgggcgtggtggcgggcgcctgtaaccccagcatcccagctacttgggaggctgaggcaagagaatcacttgaacccgggaggtggagactgcagtgagccaagatcacaccactgcactccagcctgggtgacagagtgagactgtgtctcagaagaaaaaaaaaaggtagatccccagttatgtcctcttgagatgcaagaacccatgattcggttttacagcccacattcccatgcccttgccacctaagattttgtgtgttaccttagatagatgttaaagttttggatgccatacatttctgtcttcgatgagaaattggataatacctcctctcaagccattcagttctgggaaaatgcccttcttcagcgaatttctcttttcatccctggaatttaagtgagacagataacttctgtagctagttggggtgccctaaaataaccctaagctcccaagtccagagctcagtcccaagggttgtttctcttctagtgcattgacaaggccagggacctgctggatgctgaattaactgcratggcaggagagagttacagtcgggcatatggggtaagtgtcaactattctgcacattgtcatttttgaggcttatttccatacttttttcagaatgggctattgagaacttacaggctgctggaaacatgcctgttttctctgatcggcagataccctkacaccagaaggaatgatttaaattaatcctgtcttttggattgttcgtgcagtaattagtttggaatgcgatttgcttccatcaggccatggtttcttgccacatgctgtccgagctggaggaggttatccagtacaaacttgtccccgagcgacgagagatcatccgccagatctggtgggagagactgcaggtgagcttggtagaaagccccagttcacccacctacccctaccccttccaggacctgggtgagtgcccccctccaccctggctcttactcaacttgcttttcctgcctcctccaccagtgtattgcttggcttgcatacaaagcagaatactcaaaggctcctcacctaaacttaagctgtgagagaatgaccaattttccagtctcttcttattctcttctctaggaattaaaaaaaatgttttttagtaagtgacacctgtgaccagtcagttaggaatcataacctcaaaatcagtggttctcaaccttagcagcacagtagaatcacctgcagagctttttaaaatcctgatgcccaggctattccccaggccaattaaatttctggggagagactcaggatcagtatcttttcaggttcccccagatgattccaccagccaaagctaagaaccactgctctaactacacttggaggccacctgcaccagcttttcagatggggttgccttaggttctcattggccaactcctgctatttatagctacttaggtcagagtcatcctgtcgcctctattgagactttttttccactgcagtttccgcttgtagagaagaagctttcccaagtcctccatcagtgttttcattctcacattctgatcattttaacatgagaaactgtcactccaggtctgggagtcaggagtctaaatgttctgggaaggatggccagttatcccattccttgagtgggtaggataggaagttcatcagcaaaagaaaaaagagagaaagcctttaccactccagaaaccatttgtctccctacctatcataatccatccccgcaattataaaccatttcctctcaactagatccccacctaattgctaattccaaattctcgcttcagaccaatcgaagtttgtgcttccaggcgtctcagtaggctgcgacaaaaccttttgactccaaacacattcctgcctaggaagctcagggcacattcccctggacaggaaagagcaatgggcaaaggaacatctatgaatacagtcatttatggctctgaaatgagcacatacagttcttttacatgttttattagtaattatgaaatgcccagtgaatgttttgatggaaaattgtctcctgggcaccagaaagaattccacaaataagcatttcccacttgatttgtacacaccccaattctttgaaatgcctataataaagagtttctacagcagagatctgatgaaccttctgacagtctgacaagtgggacttgatccaaatgtagacttagaggagaggggaggcatggaatgagtcctgggaagagagatgcctgtctgactttactgggtccaggacactgccaccaccttaagccttcgtgactttcctatcttgaggcagcaagatgctttttggcttacaggaggccaaattatttcagcatctgggagaacctaactattggtgagaagtcacaaaaaacaatcactcagtgtacttttttctgttattttaactttcgaaatcattgttgtcacacttcatgggatggaaaaatgtggtccaaggcctgaaagtaaagcattacatttatagtggaaatttggctcttgtggatggcttgctgtcaaatgaactgctggggctagaaaactgccattttgtggtcaaatcatttaaattaaaatccccaaccagtattatagtagtggaaaaatacatgtttgttacttttctttggagttgcaccaatgcttttggttcctaagaccctcccatagggcagttagagaggtcagccttactggcgctgggtctcttctagccttgggttctccagtcaggctcagactgcatcttatcatagctaaaagcctgagatcattgtcgctagacttttaagtttatctccatggaggacagctccatgggttcatggaatttaccatgaagcagtagatctcaggaactccccttctgagtctgacttcttatcaacaaggatgaaaaaggagttcacttggccaggcatggtggctcacacctgtaatcccagcactttgggaggctgaggcaggtggattgcttgaggtcaggagtttgagacttagcctggccaacatagagaaaccccctctctgctaaaagaaaaaaatacaaaaattagccaggcgtggtggcgcacacctgtaatcccagctccttgggaggctgaggcaggagaatcgcttggacctgggaggcagaggttgcagtgagccaagattgcgccactgcactccagcctgagggacagaatgatactccatctccaaaaaaaaaggagttctgcctgcttctgctcccaaagttctgggattacaggcatgagccaccatgcctggccttctgatacattttaacttccctgcaagccacagccaaatccactgtgaaacacaacggagatttgctgatagaatctcaggttaagggtactgtgagtgaaatacccttaggcagccgtccccaacctgactctctatagttgttagatgtaaaattagcttaagcccctttgataattaattcacttttttattattttattttatttatttatttatttatttatttttgagacggagtctcgctgagtcccccagtctggagtgcagtggcacgatctcggcttactgcaagctccgcctcccaagttcacgccattcttctgcctcagcctcctgagtagctgggactacaggcgcccaccaccacgcctggctaattttttttttattattttttttattttttagtagagacggggtttcaccgtattagccaggatgatctcgatctcctgaccttgtgatccccccacctcagcctcccaaagtgctgggattacaggcatgagccaccgtgccccgccttttttcttttttttttttaattataaagaatttgtggccaggcacagtggctcatgcctgtaatcccagccctttaggaggccgaggtgggtggattgcttgaggtcaggagttcaagaccaggctggccaacatagcaaaaccccgtatctactaaaaatacaaaaattagccaggcatggtggcacacacctgtagttccagctactcaggaggctgaggcagaagaatcgcttgaaccttggaggcagaggttgcagtgagccgagaccgagccactgcactccagcctgggagacaagaacgatcccacctgtaatcccagcacattgggaggctgaggcaggcagatagcttaagcccaggagtttgagaccggccttggcaatgtggcaaaaccccatctcttcaaaaaatacaaaaattagccagatgtgatgtgcgcccatagtcccagctactcaggaggttgaggcgggaggatcgcttgaacctgggaggttgaggctgcagtgagccatgattgcaccactttactccagcctgggtgacagagtgagaccctatcaaaaaaaaagaaagaagaatttctaagtgtaactaaatgaagcatttccccttctgtgtatactttttgatctgagactagtagaaatgaagaagaaagaatctaagatgccaacatacatggcatctcaacagtctttttttttttttttttcagaagtcttaatggaggtttaggctttaataacttcagaaatataaatgctaccaacttaaaaacaatgtcacttcaaaaatttttaaacttctttacatttaattcatttttcaactttgaatgatacattttaaatttaatatctttatcagtgatagtcatcttcaaccagaaagactgaaacaaaattttaaagttgaagatgtattatgtgttattcaccattcacaaaataaattgaaatcaatcatttaatttatttaatcctcaccgtatccctatgaaactggtactatttttattccaccctacagatctgtcagaggttaagtgatttgcccaaagtcacatagggtagcaagtgacagaggcaggattcaagctccaaacccatgctataccatctctcaaactgctgagacgcccctaagggcaggggtccccagacccggggccggggaccggtgagtagcctgttaggaaccgggaggcacagcaggaggtgagggatgggcaagctccacctcctgtcagatcggcagccacattggattctcacaggagcatgaaccgtattatgaactgcgcatgcaagggatccaggttgcatgctccttatgagaatctaatgcctgatgatcatctgaaaaccatccccccgccccccacccaatctgtggaataattgtcttccacaaaactagtccctggtgccaaaaaggttggggactgctgcctaagggtatttcactcacagtacccttaacctgagaaagctgagattctatcagcaaatctctgttgtgtttcacagtggaattggctgtggcttgcagggaagttaaaatgtatcagaaggccaggcatggtggctcgtgcctgtaatcccagaactttgggagccgaagcaggcagatcagttaaggtcaggagttcgagagcagccttgccatcatggtgaaacaccatctctattaaaaatacaagaaaaggccgggcgtgctggctcacgcctgtaatcccagcactttgggaggccaagacggttggatcacgaggtcaggaattcaagaccagcctggccaagatgctgaaaccccgtctctactaaaaatacaaaacttagccaggcatgatggcacacgcctgtaatccccgctactcgggaggctgaggcaggagaattgcttgaacccgggaggcagaggttgcagtgagccaagattgcaccactgcactccagcctgggcgacagagcaagactctgccacaaaaacaatgtatcagaagacatatctaatcttcacttctgaatgttccagggctgccagcgtatcgtagaggactggcagaaaatccttatggtgcggtcccttgtggtcagccctcatgaagacatgagaacctggctcaagtatgcaagcctgtgcggcaagagtggcaggctggtgagtgacaaccacccacccacatgggcaggtagggccccatggtgtccctgggctgtccagttctgtctataacccagtttctcttatttttaaggctcttgctcataaaactttagtgttgctcctgggagttgatccgtctcggcaacttgaccatcctctgccaacagttcaccctcaggtgacctatgcctacatgaaaaacatgtggaagagtgcccgcaaggtctgtatcccaatgcatccagaacagaccaccttctccagaatgctcgcctaatctgcttcgctctgcctctttaaggccagaaaagaaacagtgtttaaaccacctactcacaatgtcagggagtctcttcctgttacaaagctatttggcctgatttcatagagtgaatcatagttgaggagatggtgtgtataccattgatcaaaccratgaatgtgatcacagttatatgtatttgtatctagaaagtgctgggacatagaaagggcacactttctacccctaagagaagatggactgtttggtacaaaaaagagcagatttgtaaatacacagactagaactttcacaagaccaatttgggtttttcagacctctgtctcctctcctgacatcagtttggattcaaaaggaataacatgcagggtataatgctgaaaccaggagggaaagttatcttgaagccaatgtagaattcttctgactttatgtacagacaagcccttgggaaatagatgtggctcctggtttgggggtttttttctttaaacaatctgcctggatgatgctgaggactaataaacagtaggccctggaggcaaagtcatcacctgctttggcttccccttcctccttcttaaaaggaagagggagtctcactagccttctctccccattgtgacccccacagtgaagtacctgagatgagagaggaataaaacccagccactggagcctctgctgtgggaagatctcataaaatagaagttgtgtttctgcagaaggcacacttaggagatctggggactgggtctagaaattgactaattttatacatgactgaatcagagtggcygtgaataccacccagagtgggatcagccagcctgtacccaggcacctggtctttgggatttactgcagtaccaatgacctaagtttccttcttcaaatatgcagcttggagattttatttgtttttttgttgttttgttttatttttcagtctctgtgagcctcccaggccagagcatttctgattcaaagcctgacctcctccaggcaaatgagaaaaacagaaggtgctggatctgagtatagtctggtttccctcctatgtatagcctccaagtctttgactgtcttgcctaaggcaggccgaagaagtcttttgggtaatatctcaagcaaggagtggcttctttcaacataagaccccagcccaacttctccatggaatagtctttcttagtagcccaaattctgtggaattaaaaatcaggaacctatttaaagtgctgggacttcaagcccagaactagagatgtcatatcttcatagttaaggagctacccaaggaaaactgactacttaataattgtgctactgagcaagacactcactgagccttactttcctccactgtaaacaagaatcatgctctgcctcgcctgaggcaaaggaaagtatttgtgggaaaagcagaccctgttatcctggaaggcatcaggctatgggtatatgtatcatgttttcctagacaagacacttcacagagtccagagacaggctggtccttctgtaaaatttcactgagccaaggccattgttcttgcccacaaacccacccatgcaatctagaaccagaatattgtgcctagctaaaatcctgtgggtctatgagaagccccttcttccaagtgacaggtccttcatttataagagggaaagaatcacttttcccttttttcatttcctggggatggagaaaacaaattttaaatagaaaatttccaattccttgaaaataagttgccttgtactatacagtagaaagatactggattctcttatgctggataaacgaaatattgggcttcaaatccaaacttaatacccagcctccccagctttggcagtttatattttgttcagctccttattaagtccaccaaagagtttaaacccagtgtctggattgttgatgacaggtagcttatgggctctgaaaagcacctaccatcagagttcctagtttagctcctacctgcgtgacgtatgcaatgatcacactgagttatcacctttttggcgattgagtttttttactaccgcctcccaattcttttttttttttttttttttttttaatcagatttaagccaggtgtggtggctcacgcctatgatcccagcactttgggaggctgaggcaggcgaatcacttgaggtcaggagtttgagaccagcctggacaacatggtgaagcaccgtctctactaaaaatgcaaaaattagccgggtgtggtgatgcatacctgtactcccagctactcaggaagttgaggcgggagaatcgcttgaacctgggaggcagaggttgcagtgagccaagatcacgccactgcactccatcctgggtgacaagagcgaaactctgtttcaaaaaaaaaaaaaatcagatttaagactggtcaatgtagttctcctagaaaaaaaaaaaactaaagggtggttcacacctgtaatcccagcactttgggaggccgtggtgggaggattgcttgagcccaggaatttgagaccaacctgggcaacatagcaagacctcatctctactaaaaattaaaattaaaattaactgggcatggtggtgtgtgcctgtagtttcagctactgggaggctgaggtaggaggatcacttgagcaaaagtgttcaagtctgcagggagctatcattgcaccactgcactccagcctgggtaacagagtgagagaccctgtctctaaaggaataaaaatttaagttaaaaaaattaaaattaaaggaacatttatcacttcccaagtgtgggatgctattgtagttcatttttcaaagttggtggtgagtaatggatccctgtgaagacagatgtctgagggagacaggtgtcttgttaagtgttggaacatctgtgtgcctgccctgtcctcatgcatggattagctgcttgatcaattgtttgtcatgtcattctggctctgggttaacccagtctcttcatgccaattaattccttatattgaaaagcatctgaggttggtcctggcccccaagctagggagtttcattttcttcaaggccatcatcactaacatgttttttgtttgtttgtttgtttttttgagacagggtttcgctcttgtcacccaaactggagtgcagtggtgtgatctcggctcactgcaacctctgcctccaggttcaagcaattctcctgcctcagcctcctgagtagctgggattacaggcagccaccaccacgcccagctaatttttgtatttttagtagagacggggtttcaccatattggccaggctggtctcgaactcctgacctcaggtgatccacccaccttggcctcccaaagtgctgagattacaggcgtgagccaccacacccagccttttttcttttcttttttttttgagacagtctcactctgttgcccaggttggaatgcagtggcacgatcttggcccactacaacctccgcctcccgggttcaaacaattctcctgcctcagcctcccaaatagctgggattacaggcgcgccccaccacgcccggctaatttttgtatttttggtagagacaggtttcaccatgttggccaggctggtctggaactcctgacctcaggtgatccacccgcctcggcctcctaaagtgctgggattacaggtgtgagccactgcacctggctaacatgtttttatttaaaacaaacaaaaatacctcttatatgatttaccataaggagaactgttatttatctgaagtcttgattttttccttcttctgcagcacagaacacattgcctctttttcacattctctcatataatgtttcctttccctgtgttaatgcatttagattttgccatttttccatttgagcttttgatgtttgtacattctatctccatccttgaagccctttattattatttttttttctatttgtgggttttcccccctctagaaaaaccagaaaagatttgtttttccctttaaaagtgatatggaccgcacttatcaagatgctggttcaactggatgtggcgggcttgtacagtagtcccagatctgtgattctgtctctgcccttcctcagttcagctgtctgttcctgactcacatgccctctgctcactttgtatacaagccggtagtataaatagatctagctgctttaggatgctctggagattttgcccctaagtcaccctgttcaaccagatgtctgctgagctaatatcttctccctattccctgtgaatgcatgcgggttttcactccaaatctgtgttcttatttgggtgctatatgatttttaaatccatagtttttgctccgctggactgtccaaggtaccctggtgttgtaaacaaataccaaagttttattagcctgaaacaattcccaaaagcctaatatcccccagggtaacatattgatagtgaagtaagcagttgtttcaaattactttgtaggaatttttatttggggtagccaggcatgaaactttgccaaggcttataaaactggtaattatagttggcaaaggagagccaagacttgagttgaataagtcatgaatctttttgaaaagcccagtctctcccagtatcacgccctggtcctctgtcctatggggtcatcattctgtgctctagggtattctgtttggagaggggttgactcatgcctatcagatgaacggtagctcccttcctctgaagctgggccacaagccaagtggctctctgtgcctttgtcctgttacagatcgatgccttccagcacatgcagcattttgtccagaccatgcagcaacaggcccagcatgccatcgctactgaggaccagcagcataagcaggaactgcacaagctcatggcccggtgaggtccccactgacctggggcaagtcatattccagccctgtcatcccagcagcttctgcagcaaggaggagttcaaggcttcttgggtggctgattgctgacatctctctttccttttccagtagggatcccaggcaaccaccaaagcatactgctctcaaagtctctgccacttgctttcctaggttcagcagcccaagagcacccatgtgctgttctcctggcgtctggttttagagtccttgttttcaaatgtcagatatgctgcccctcccttttttttttttaagatggtcttgctgtgtcacccaggctagagtatagccttgatctcctgggcttaagcaatcctcccacctcagtttcccaagtagctataggcacgtgccaccacactggctagttttttgtagaaatgaggtctctacaaaagaacaggcatagagcctgcatttcctcctacaagtttaatgttgcccaggctggtctcaaactcctgtgctccagccagcctccctccacagccttccaaaatgctgggattataggtgtgggccactgtgccactctgtgctgcagatttgatatttgacttcagagaagtgacttaacctctctatgcctcagttaccaatataaaagggatagtaacagtttctatttcctagggtggtataaagtagtgtgaggattaatgcaaagagtacaatgccaagcatttcaagcagcacttggaatacagtagcagtcagtaaatgtgggctaatctcattacaaagaatggaggcaaagggaaaagtaagggagaagccatatagcaatcaataaagaagtaactctcaacaactgtcacccacaaaaaattgggtttggggtaggtaagtccatacagacctatctgtaccaggtacatggtttatgctgtcattgagagacaaaggtcaagatggaaagatggtatcttaaaaatgtattccaaaagcccatctcctttcttgcgtgtggctgaaaattttgctagctccttcacattgcctcttgagaataagaggaaataccagaagggcttcagtgtcccctaacaatttgtggtcctcttaggagggctgttttgaggagggaatgtcatgggggcttgtttctctgcttccagatgcttcctgaaacttggagagtggcagctgaatctacagggcatcaatgagagcacaatccccaaagtgctgcagtactacagcgccgccacagagcacgaccgcagctggtacaaggtgatcagaagcaggccacctgtgagacccagcaccctggctggctcgtgtcctcctgtgtgctcgtggttacagctgagcttctgcggagctaggctgatgctgtgaacttactccttgagtccctggagcctatctataagaggcccagggagcctgcatttccccctacaagtttaaytaatacagaaagattattggagaaatacttgttacaccattattatgtgtatgtggtgttggggattgctgctgtcttacagactctgagctgcttgttttcctgggagcatctggacacatggttaatctctggagtgacatcttcccttaggtcatctgttcttgttcagcgtttttctgatttgcatccttgcctgctcctcagctaagaacttaactttctttgtttttattggaaagatccaagtaacatcctgttatgttacaggaaacttttgaaagagataaacagaattagaaaatatataaaagatgtgattgatggaggggtgatttttggaagtgtatatctttggtgagaatatactttcttatttctttttgagaggctttctggtaactacttggtgtggcagatgtcattgacatctttccagtatttccttggcttgccaatactttgtgaattaatctctctgaaatctaaacttgtatctgaggactgcagaagcacttataatacagatcttacctttgtttaggcatgcttcattctggtttgaaaaatgtccattttgtcataagagtaatactctctctaggacagcttgcatgtccaaagctggaaaatacatccggtaaacactattaactggaagcttattaatcagagttgtattctaaccagagttactttcattcattaagcttttaggaagtaagcaaatcacaagaaaaaagttggtttcaggaactttagttttagtttttaaaagcttttcctaatgtgggtcccttttgttttatgatgtattctaccatcaacgtcatggccctgtatgcatgccaggactgtttgtcttgttcaccttgaccccaggtcattgccaggcacatagcagatacacaagagatattcagtgaataaatgaaggtatgggaaaactgaaacctgggtcattgtagaattcttactcatcaagtaaaggttagttgtgatcaatctattctccttagttgagaaaacggatrcacctgtgttcaaggtttttggcaaggcatacaaacgaatttcccaattattcagaaagttcagctattaatgggtcacgtagtgtcctactatcactgcaaagttaccatgcctggaagcaaactctgcctcacactcgctaaaccaagtggtggtacgctgtagagtcattgccgctcagaaccccagagagagtagtattcctttatccaaataagcaccagcggttcttccttcaagcattgagcactggttctctgtcaggccgtgggctaggtgttgggaccaggcagatgggtgagattctttctctgtcaggctcctatgctcttcatgtcttcctttgtccactatctggtgacctgtcaaaactttgctcccttgaaatattgtgatgactgctgcttgcccccacttctgcttgccatttctgctctcccctaaatgtacactttatacccagtgcagctctgctttctgggtgaaagtgccagccctgtgcctgctccaggcgtgctttgctggcctcgctctcactcctcgcctgcmtgtatcccctgcacggtcacattcatgggcttgtttcccgtgaaccaatctgcacatctctggccttattcttcccccttgccaagtagtccccaccgctgccttcttgtttccctccttgcccttctgcagctctcttycagacctaccccaaatccctcttcttgacaaagctttccaaatgcctgtccttgctactcccattgtgccttgcagagtacctaggtcttcaggtttgtgcgtgagctcccctaggaggccgggagatcccttgaggcaagagctctctcctgctcctcttgctgtgcccttctcgcagtgcactcatagtacgttatatagttagtgctccacaaagtgagtggatcatgttgaatttagtaaaacagccatttctgagtgtctccttgaagtgtttgctttatggacacacagaacaggcaggagcagctgttcctcagcatcgaccttgcgctcctctgagccctgctgttggtcacagctccagtgtctgtccttgcctttctccccaaccaggcctggcatgcgtgggcagtgatgaacttcgaagctgtgctacactacaaacatcagaaccaagcccgcgatgagaagaagaaactgcgtcatgccagcggggccaacatcaccaacgccaccactgccgccaccacggccgccactgccaccaccactgccagcaccgagggcagcaacagtgagagygaggccgagagcaccgagaacagccccaccccatcgccgctgcagaagaaggtcactgaggtacccttcccttcttccttattaacaaccaaccaaggtgccaggctctctgagaaatggaatcgttgttaagcttaaaaggaacctgaggctgtatctgaagtgccagatggagctggaaaatactgcctatctaccatccagcactgcctgagatagggctttgtgtgtgaatatttgtgtttggggagctgacgcagcctctatgctgaagagcaagctccttgtcaagcttccctgtggacgagctcattctctacgtgctgcacctgtgtgtgggtggctgtacacagctgcgggtccactctgaggatggggcttgggaggtccatcctctgcctttttctctccacttccacttcttccccttccccttgggctgtcagttcagaatgcgccagggccgctggcaggcccagagatccgggtgttcagagcctcagctccacctcctccctccatcctgttcaggaagccactgtcagcccaagataataacagttatgatacagttgccatttattgagtctttgctatgtgccaggtaatgattaaagatttttcatgcattaaccgatttaattgttataaccaccctttgaagtaggtacagttagtatgctcttatgcccattttacagatgagaaagcagaggcaagagtgtcgctaacacgtgtgtgttccaacaggatctgtccaaaaccctcctgatgtacacggtgcctgccgtccagggcttcttccgttccatctccttgtcacgaggcaacaacctccaggatacactcaggtatcagagaagggaaggatgcaactctggtaggccatgttaatggcaagacctagaagtcacacgtaaaagtcctctttcccttcctgaccctgatcaggacacccaagatcgatgtatgtgccttttttctgcactgcatttaaggagtaacagctgactgggccccacctgtgtgggtgaaacctacagagagtgaggaggagaagtggagtgagaactctccatgtgtggtttattatggagggattattaacccatctgttaatcacaatatttctttttttctgaccaccctgttgcctattgaagtcacagtatttctaaaatccctcagcaacttggagaggtctaaacaaatgactcaaatcagttaacccagagggtaaaggtgacaaggtccacatcctccttcatttgaggatctccagccagctaagagccaggtgtccctgttgcctctgccgtacagcgactcttacatgtgcagacttgtggctttctaaaggttatcctggctcgtctgtttgatgtttgcatacatgccatggtgacccctcggtgacctgggatgaaatgctcatttgctcagggtgactcttacggtgttcagtcaagagcactgccacccatcacagacacctgctcccatgggaggccaaacacatttgagagttactggttggagtccctgccagctctcttctcaggagccttrgagatgaaaaacaggcaggcaaaaactgggaaactaaattttctgtgactttctcatttctttttcagagttctcaccttatggtttgattatggtcactggccagatgtcaatgaggccttagtggagggggtgaaagccatccagattgatacctggctacaggtgaggatacttggttacaggtgaaggtgkctccaagtctctcttctgtgtgtctyctcttacaagcatgctgtgttcagtgtcacaaggcagtgtgtgttaatacagtgctaaggaagtagggctcggtcccagtgtcaagtgtccatattttctttattttcttttagaaactaaagggaagggaatgaaccatttcagagcatcaaccgaaacaagttaaaagaattgatctttgcctagaagaataactagttgtttcaagtctcatatgctacatactgtgtctttttgaataccaggttatacctcagctcattgcaagaattgatacgcccagacccttggtgggacgtctcattcaccagcttctcacagacattggtcggtaccacccccaggtatgtggagactctgggcagtttctcatctaaccactggtttggtggtcagcctttccaaaagctgccctggcgacacaagcgcaggaactgggagccatgtgttccatcctggcccaggagggtctgtccagccagccgtcccagagggcccgggagccttgctaaaaagaaagcgttccctcgaagactgagccccttcctggtagtctcaagcagatgttaatgtcacactcaccacttgttttgttattctccttaaaattcataccagctcttccccaacccacatttcctttatagatgtttcttctgtttttccctcaggccctcatctacccactgacagtggcttctaagtctaccacgacagcccggcacaatgcagccaacaagattctgaagaacatgtgtgagcacagcaacaccctggtccagcaggccatgatggtgggtcggagccactgtggggcttcatagaccctggtcccttagctgrtgggcgcaagtgggattgtttttcttcctcgcattggtgctgtgcacttcctctgactgctggaaatagtacctcctgtgtctccaaaacagacctttctgaggttagctgattcttgrtgcttctctccttcttctcttggcttcaggtgagcgaggagctgatccgagtggccatcctctggcatgagatgtggcatgaaggcctggaagaggcatctcgtttgtactttggggaaaggaacgtgaaaggcatgtttgaggtgctggagcccttgcatgctatgatggaacggggcccccagactctgaaggaaacatcctttaatcaggtatggggtaaaaaacacgaaaggacataaccctgtagaaatattctgccactaaaaaaaaatgaaatgagaaaagtttttatagaatgaaaggacgtgacccaaggcctttgtcagatttcttttcctctggcctttccactgactttaataaaacgagctctgatggaggtcacagagcataaaacatcagaaattagttacagggacccttctgaattttaactggaaaagcccaagatttctcaagaggtcatctcgtctctcctctcacccttccttccctataagccatgctgctggtttggaagctccagggttggaggcctgcacctatgctcttgctttctccagccccctgccagtgttttcaggccacagcgggctcctgaggaatatctgcagtcagcctggggattttgcctcctgggttggttgagactttgataacttgaaaacgtgcctgctttctctctcaggcctatggtcgagatttaatggaggcccaagagtggtgcaggaagtacatgaaatcagggaatgtcaaggacctcacccaagcctgggacctctattatcatgtgttccgacgaatctcaaagcagctgcctcaggtaggatcttcaggctcctggcagggttaactgtcattatagtcctttctgttttactgtctatgaatgttctaacactcattccaaagcatctggttttacttctgctttgggacaagtaattgttattagcaatccactgaaaaatacttaaattgcgtttaaattcytccctggaggcagaacactaaatcctttggtaattatttacagctcacatccttagagctgcaatatgtttccccaaaacttctgatgtgccgggaccttgaattggctgtgccaggaacatatgaccccaaccagccaatcattcgcattcagtccatagcaccgtctttgcaagtcatcacatccaagcagaggccccggaaattgacacttatgggtaaggaccattgtgcacttctgtcacccacttctccctcctacactggctgagaccccttccctcttctgaaattactgcttgccattcccactactcacctatcatagctacatctctcccatgctcattgagaggaaaatagagggcaagcaaatttctcattatgtcctcaggacttagttcattcatgtagttgggcttatgtgaagcatgatcacacataaagggaatgacaaaggcatgcaaggcagagaagtaacagtggaaggcaggtgttggagactgatgaggccagggaggaggcagctgggtgcaagcagggaaggtgctagctcctctgaaacgggggcttctggctcttgaaatttttttctttttttttttaccatcatagtctctgtggtaaatgattgtgtaaaatgaacaagtggattctcacagtgagatttgttaagcaagtgggctctggaatttcccttggggtagagtgttacttatgggggatgttttagtgaggcctgagtgctgtggtggcactttgaggcctctcgctttttttttttttttttttttttttgagccagagttttgctcttgttgcccaggctggagtataatggcgcaatcttggctcactgcaacctccacctcccaggttcaagcaattctcctgtctcagcctcccgcgtagctgggattacaggcacgcaccaccacacctagctaatttttgtatttttaatagagttggggtttcaccatgttggccaggctggtctcgaactctgacctcaagtgatcagcctgtctcagccttccaaagtgctgggattacaggtgtgaaccactgcgcccagccacctcttgctcttttttttttttttttccccaagacagagtctcactctgttgcccaggctggagtgaggtggtgtgctctcggctcactgcaaccccacctcctgagttcaagcgattctcgtgcctcagcctccctaatagctgagattacaggcgcatgccacacaatcagctaatttttatatttttagtagagatgggatttcaccacgttggccaggctggtctcaaactcccgacctgaggtgatccgcccagcttggcctcccacaatgttaggattacaggtgtgagccaccgcgcccagcctcacctctcgctcttaataatgctcaatgtttcttaaatgcagtgattattcaccaacaccaattaatcatggtccacaggtgattatctctgcatgagctgttgtcttctgatacaaaatgtgggtcaggctggttcttggggtgtttaattaaagagagtttaagaaaggaattgtttccagaggtgtaagcaaagctaagagaatcaacaaggagcgctcatgaacaagcacaagtgagaaattgttactcagccctcacccacccccacactccagaactgaaagagcaaggagcccagctagaaccgtcaccatgccagagaggccatctagcagagtctacagtccagagagagtggtagcttctagaactggggccaggctggtgatgggggacacataccctgacctctccctctacccatcctctgacctcctgccagtacccttccaccattggccacgcccaagtgggatcccaggtgatgcggcttgtaggagtcaggcttctcagaacagaggaggacagagtgggtcggaaaacaggaatgatcatttccatgcctaaccgttcctggtcctcaaaaacagattttgttttgttttaatttgaacaacactggtcattgagaaccataaaaggcaaagccactcttttcattaattctaaagattgttttttctttttgtgaggaacgtgtgattaggtaaggcatatgtagtctgtgggatctcttgaatgcagtggtgctctcagctgaagagctgaggacctctgatgtacactcaccgctcccactgttccttacaggcagcaacggacatgagtttgttttccttctaaaaggccatgaagatctgcgccaggatgagcgtgtgatgcagctcttcggcctggttaacaccctyctggccaatgacccaacatctcttcggaaaaacctcaggtattcagaaaccctgaaatggcaacaatttgagaagtcttctggttttttcctacatttgtctcrtgtagtcatgtattatatcttaacaaaaaactataaaattagggagccaggcatggtaactcatgcctgtagtcccagaaactccagaggttgaggcagggggatggcttgagcccaggagttcaaggctgcagtgagctgtgattgtgccactgccctccagcctgggtaatagagcaagactgtctctttagaagaaaaaggctgggcatggtggctcgcacctataatcctaatattttgtaatgccaaggtaggaggatcacttgagcccaggaattcaagaccagcctaaacaacatagagagaccccatcactatttatttaaaaaaattaaaaaggtgaccgggcacggtggcccatgcctataatcccagcactttgggaggcccaggcaggtggatcacttgaggtcaggagttcgagaccagcctggccaacatggtgaaaccctgtgtctactaaaaatacaaaaattagctgggcgtggtggcggccacctgtaatcccggctactcaggaggctgaggcacgagaattgcttgaacctgggaggcggaggttgcagtgagccaagattgcaccattgtactccaggctgggcaacaagagtgaaactccatctcaaaaataaataactaaagtaaggaaaaaaaaattaagtggccaggcatggtggctcacatgtaatcccgacactttggaaggctacagcaggaggattgcttgagaccaggagttcaagaccatcctggacaaaaaagtgagaccctgtctctacaaaaaataaaaaaatcagctgggcatggtggctcatgcctgttgtcccagctccttgggagatggaggcagaagaatcatcttagcccagttggttgaggctgcagtgagacaaggttgtgcctctacactctagcctgggcagcagagcaagaccctttctctcaaaaaataaagataggctgggcacagtgactcacgcctgtaatccctgtctctacaaaaaaaaaaaaaaaaaaaagctgggcacagtgtagtcccagctactcagggggctgaggcaggagaatcacttgagcccaggaggtcgaggctacagtgagctgtgatggggcaactgtgctcgagcctaggtaacagcgagaccctatctcaaaaagtaaataatattttttaaatgttttaaaaatgaaaaattaagttataaaattttataatttataaccaagttcttccagagtttttagggtattttcattgggaaatgcctttaacaacctccaaagaatccagcagggagcaatttgtggcgggtagactggagagtctacagatgggatgggtctgaccccttgtgggatgaaagccaaacctttcccatcgtccgtattctggcactcctcttcctgttaaaaccatgagaattcacttgagaggtattttagtcacttgattgttcccccaaagccatgagtttcttgggcaggttgaggagacctgtgttgctttcactgcaccatcagtgcactgtctttctgtgatgccttattcttcacaaagcatccctcaacacacacttcacaccagcctgctgcggcgggggctcattaaaaatagtcarggccgccgggcgcggtggctcacgcctgtaatcccagcactttgggaggccaaggagggtggatcacgaggtcargagttcgagaccagtctggccaacatagtgaaaccccgtctctactaaaaatacaaaaaattagccgggtgtggtgttgtgcatctgtaatcccagctactcgggaggctgacgcaggagaatcgcgtgaacccaggaggcagaggttgcagtgaaccaaaatagtgacactgcattccagcctgggcaacagaacaagactccatctaaaaaaaaaaaaaaaaaaaaaaaatagggctgggtgcagtggcttaggcctgcaatccagcactttgggaggccgaggcaggcggatcatgaggtcaagagattgagaccatcctggccaacatggtgaaatccgtctctaccaaaaataaaaagattagttgggcatggtggcacacgcctgtagtcccagctactcgggaggctgaggcaggaggatcacttgaacccaggaggcagaggttgcagtgagccaagattgtgccactgcactccagcctgggcaacagagcaagactctgtctcaaaaaagaaaaaaaaaacagtctgcctgtgttctgagctgctcaagggtatactctctttacggtacactaaccctgcttttctgtgggygccagcatccagagatacgctgtcatccctttatcgaccaactcgggcctcattggctgggttccccactgtgacacactgcacgccctcatccgggactacagggagaagaagaagatccttctyaacatcgagcatcgcatcatgttgcgggtatgtgatgcggccacgagagctagtgccccttccgtggcagggaatctccgtagcgctgcttttctcattcctctctgtatgtctgtcactgaaaaatctctttgagagaatcagctttgaagaaggtttaataaagtgagtcctaaagcagataagcttgtaagaaactgaaggacccttaagctragaaattgttttcaccatcctagggaagactagacagataaatattcggcaccatatatttactaatgtatacaaagcactggccatatggagaaataatgtttagtagatgtgtaagtaataagaaagagaattgcttgttttccaaaaccttgaaacttccagtactctcatctgcacagaaggcctataactgaggtgaagtctcgtgtttttcccttatgccttggggttccagtggtcatcaggttagagtggtcacttcgtttctccttttgccatgttcttatttcccttctcctttggctatgatggggaaattagaactcagctctgcctggaccccaagccttgtttcttcctggacccaaactacatgtcttaggctgctctcttactgaacagttgtgtcctgatgcagatggctccggactatgaccacttgactctgatgcagaaggtggaggtgtttgagcatgccgtcaataatacagctggggacgacctggccaagctgctrtggctgaaaagccccagctccgaggtaggccactgggccctgcagacctgcgctctcctggaacccccactcgcaataggatggccctcccatctgttcatgtgcacacagcggctcttctttgctgtgattggctgtagagcgtgtccagacttttctaacaaaaatgaaatgggtgagcaagacaagttcacagagttagaatgagtagtttaatatttcctccagaactctttatatattaaagaattaaagatagttgtcttttttatatatgttacaaatttcctattaacttagtttttaaattttgctaatggtgtgttctttggtttggagtttttgtttggtttggtttggtttttgatacacagtcagccctccatatccgtagcttctgcatctgtggattcagccaactgtggatagaatattttttaaaaatatatataacaataagaaatgtaaatttttaaaaatatagtagaatgactgtttacattgtataacattcacattgtattaggtattatatgtacccaagatgatttgaaatataagggaggttgtgcataggttacatacaatactatgccattttattaaaaagttgtttttggctgggtgcagtggctcacacttgtaatcccagcactttgagaggccaaggcaggaggatcacttgagcccaggagttcaataccagcctgggcaacatagtgagactccatctctttttttttttttttccccgcccaggctggagtgcagtggcaagatctcggctcactgcaacctctgccccctgggttcaagcgattctcctgcctcagcctccccagtagctgggattacaggcacgtaccaccatgtgggttaatttttgtattcttagtagagacagggtttcaccatgttgtccaggctagtctcaaactcctgacctcaagtgatccacccaccttggcctcccaaagtgctgggattacaggtatgagccaccacacctagcctgtgagaccccatttctacaaaaaaattagccgggcatggtggtacacacctgtaagcccagctactcggaaggatcatttgaatccaggagaatgaggctgcagtgagccataccatgccactgcactccgtcctgggtgacagagcgagaccttgtctcaaagcaattttatatatatatatataaatttttttttttttttttagagacaaagtctcactgtgtcacccagcctggtcttaagctatcctcctgccttggcctcctaaagtgctgggattagagacatgagccaccacgcccggcctacaccattttatataaggcacttgagtattgcagattttgggatccgatgggggccctaacttagagatatgactgtacaggcattttttaaagttagaagttaccaaatttttaatccttttctttaaagtttcttcctttggtttgtttttgttttttttgtttgtttgtttgtgtgttttgttttgttttttttttttgagacaaggtcttactctgttacccaggctggagtgcagcagcacgatctcggctcactacatactccgtctcccaggttgaagtgattctcctgcctcagcctccagagtacctggaattacaggcgcgtgccaccatgcccggcttttttttttttttttttttttttttctcgagacggaatctcagtctgtcacccaggctggagtgcagtggcgcgatctcggctcactgcaagctccgcctcccgggttcacaccattcttctgcctcagcctcccaagtagttgggactacaggcacccgcctccatgcccggctaatttttttttttgtatttttaatagagacggggtttcaccatgttagccaggatggtctcaatctcctgacctcatgatccgcccgcctcagcctctcaaagtgctgggattacaggcgggagccaccgttcccggccactcttttgtatttttagtagagacagggtttcactgtgttggccaggctggtctcaaactcctagcctcgagttatccgcccttctcagcctcccaaagtgctgggattacaggcatgagccacggtgcctggcctcttcctttggttttatatttagaaaggccctctccaccttgaggttatttttttacctatattttcttatactagttacagggttttttttacatttaagtcttaacccaagtcagacactatggtacacacctgtagtctcagctacttgggaggctgaggcaggaggattgcttgagcccaggagttcaaggctgttgcacattaagaccacacctatgggcggggtgcagtggctcacgtctataatcccaacacttggggaggccaaggcaggtggaatgcttgaagctcaggcgtttgagaccagcctgggcagcgtcgcaaaaccccatctctacaaaaaataaaaaattagccgggcatgatggcacttgcccattgtcccagctacttaggaggatgtggcgggaggatcacttgagccaggaggcaagggttgcagttagctgagattgtgccactgcacaatctgtaactcagcctgagtgacagagccagaccctgtctcaaaaaaaaaaaaaaaaaagaagaagaaaaagaccacacctatgaaaagccattacactccagcctgggtaatatagtgagatcgtctcttaaaaataaacaagaccaggcacggtggttcacgcctgtaatcccagcactttaggaggccgaggcgggcggatcacgaggtcaggagttcaagaccagcctgaccaacgtggtgaaaccctgtctctactaaaaatacaaaaattagctgggcatggtggcacgtgcctgttatcctagctactcaggaggctgaggcaggagaatcgcttgaaccagggaggcagaggttacagtgagccaagattgtgccattgcactccagcctgggcaatagagcaagactctgtccaaaaaaaaaaaaaaaaaaaaaaaaaaattaactaagtttggaatttaaggcgtaactttatttttttaaacatgactagccatgaccacactgttggccaaataattcatcctttccctgctatttagaagattttgtttttattgaacactgaattttttttaattttattttttgagagagagtttcgctcttgttgcccaggctggagtgcagtggcatgattttggctcacttcaacctctgcctcctgggttcagtgattctcctgcctcagcctcctgagtagctgggattacaggcacgcaccaccacacccggctaatttttgcatttttagtagaaacgggatttcaccatgttggtcaggctggtctcaaactcctgatctcaggtgatccacccacctcggcctcccaaagtgctgggattacaggcatgagctaccgtgcccagcctaaacactaaattctacgtgtccttggatttctttctagggctcctcttctgtttcattgctctttcggcctgtttctcaagttccatggtgttaatacaagtcccttctcrggggctatcgtcatctattttttttcttgaggctgttaacatctttatactcataaggggatatccttaaactgatatttttcatttactcagatctttaagtctaacacatttctaattaagtttaattcaaggcatagttcattgttagaattgtgaatgaggtctttataatgttatacattctaaccagttattgatggactgtaagaaaacaactgattaggccaggcacagtggctcaggcctgtgatcccagcattttgggaggccgaggcaagcggatcacttgaggttaggagctcaagaccagtctggccaacatagtgaaaccccgtctctactaaaactacaaaaataagctgggcatggtggcgggtgcctgtaatctcagctactcaggaggctgaggcatgagaaccgcttgaacccgggaggtggaggctgcagtgagccaagatagcaccactgccttccagcctgggcgacagagcgagactcggtctcaaaagtacaaaccaaagacagcttattagagtataattatgttgaaattaaagtttccagaaccgtagttcacatgcactcctgtgttctaggtgtggtttgaccgaagaaccaattatacccgttctttagcggtcatgtcaatggttgggtatattttaggcctgggagataggtgagtaatttaatttggtttttttagtcttctttctccattgtagttttcctgaatggtttcatttggttttccaattaaatatatggctttttggtaaataaatattggtattgtatatgtaaggtctcttttacaacattagccttagttccctattgattgtgatgccatcagaagaatacatcaaactaaagaaaaggaaaaatagttcaagctgggtgcagtggctcatgcctgtcatcctgggaggccagggtgagaggatcacttgagcccaggagtatgagaccaacttgggcaatagcaagaccccatctcaataaagccccacatagttcaaggatactactttctccttagtctggcttaatgtattaaaagctgtattgcagggcaggctcattggctcatgcctataattccagcactttgggaggctgaggtgggaggatcacttgagcctaggaatttgagaccagcctgggcagcatagcaagatcccgtctctacaaaaaataattagccaagcatggtggcatacacctgtagtcccagctctttgggaggctgaggtaggaggatcacttaagtccagaaggtcaaagctgtagtgagccgtgattgcaccactgtgttccagcctggtcaacagagtaagactctgtctcaaagaaaaaaacaaaaatactaaatcatattgattttattgattcaagaaacatttgtcagtcaccactgtgctaagataaatcattttatttctgtaattgaaaccaaccaaagtagatccttctgatatttttgcataataagttttgtccaagtgtactgactgaacatgtaatttacgaatgttcagaaacggactcacaagaatgtaaaaaagactggttctctgatgtctactgtttttctcctggaatcatgtctcatgcaactatttgagagtaaaaataattttaccccacaaaaatagtagatttttgtttttaaaagtctagcagaatatctgttgataaaagccaggtggttgccgggattggctcagggacttaaggagatgagaccctgttacggctgctcagtaaaaatgatagagccttgtcaccagaaggtgccagtgctgccagaaatgacttattaggtcaccaaagacctcagaaaagcacagtatctcagtacagtgggacaacctgtgattcacacataagcccacatttcagcaggagttggcaaactgtttctgtaaaggaccagttaataggtcgttttaggctttgtgggccctttggtctctgtcacaactagtcagctctgctgtcgtagcatggaagcagcctggaacagtacttaaacaagggagcgtgctgtgtgttccagtaaaactggacttgcagaagtggaggtggaggggctggattggctgagggctatcgtttgccaactcctagcttacagtatcacgtacttattgattttttcatccgttatctctgttgatccctccctgatctgtcttctgtttctcaaagacacccatccaacctgatgctggaccgtctgagtgggaagatcctgcacattgactttggggactgctttgaggtgaacacatgttctagaaccccaacctcatcttcccgggtgatcacttttccccctcctctgacactgtaggcagacttaagcccaaactgccttactcttaacccctgctggccctaccaaggctgtagttaagtcagtctaagaaatgaaatctgggctcttagttggactctaaccccmttggagcaagggctgctgttcccatgccctctgagtagagtaggcccctaccctccataccacctgttgcccaagagcctggacacgatgcacvtttgtcttttttcctttttgttttctcttcttttctgttgttcgtttctttttttttttaagttgtctttcaaatccctgtgacaagtcctctcactaaacccaagctgcttcctttccctgctataattaaaatcagtgcaggtgatgcagaggaaagccacctgctccacctggctccaggtaaagaaaataaacattgatttggcttttcccatttattattctgtaggttgctatgacccgagagaagtttccagagaagattccatttagactaacaagaatgttgaccaatgctatggaggtgagtggatatcgggaayragctgcttccaaatgggatcaggacagttacagccttctgagaacacgcttgttagagcccatcagttctccaaagtgcctttgtgatttttgtagcagttttctgttatttcctrttgtgttagaaatgacctatctatgaaaggcttaccacttcacttctgacctggtttcctgtggatcacagtcctgccctgattccttctcctaagacattctcaccctgatacgtcaacatggcctgtgtctgcttcctaagtgagggtaacagaccccctcggcttgctttgggtggagagttagtaactcctgtggtgagtggctctgtcccatttctaggttacaggcctggatggcaactacagaatcacatgccacacagtgatggaggtgctgcgagagcacaaggacagtgtcatggccgtgctggaagcctttgtctatgaccccttgctgaactggaggctgatggacagtgagtatcatcaagtgcctgggagctgagctcagtggctcacacctgtaatcctaacattttgggaggccaaggcagaggagttgcttgaggccaggagttcgagaccagcctgggcaacatagtaagacccctttctgcaaaaactgaaaaaattaggcatgtattagtctgttctcacgctgttataaagaactgcctgagactgggtaatttataaaggaaagaggtttaattgactcacagttctgcttggctggggagaactcaggaaacttacaatcatggtgggaggggaagcaaacacwtccttcttcacttgggggcagaagagagaagtacagagtgaaggggagaaaagccccttataaaaccaccagatctcatgagaactcagtcactatcacgagaacagcatggaggaaccatccccatgatctaatcacctcccatgaggtccctcccacaacacatggggattacaattcgaattgcagttcaagatgagattttgggtggggacacagccaaaccatattaaggtgggtacagtggcacatgccggtggtcctacctgctcaggaggcagaggcaggaggatcacctgagcctgggaggttgaggcacagtgagctatgatcatgccactgctgcactctagcctaggtgacagcgtgagaccttgtctcaaaaaaataaaaaaataaaaaatttaattttaaaaataaaagaaaacaaataaaaaataaaatcaagtgtgtggaagctggggttggcagcctcccaaattagcaatatccagcacataacattttacaaacctatgccccttcaagcctgcagcctgggatacattgcagagctattgcattacatttgcacagagtaactctgacacctggaaaagaacttcaagtatttttattaactaaaacagaaaatgccattatcaatttagatactaaaatattcttcagtattaaccaagtatcctagtgatttttctctgggctttatatagagtagtaagctgaaattttaataagaaacgcaaacagttatgatttgggacagcagtatcttcatctaccctttgttctgccaccttaggggatgttcaccaaaagagcttctaatccattgaaattaaatcatactttgaccttatattatctgtattacattgtctaagtccaaatcaacagtatagagtgtccccctgggtttcacatcccatgctaatacccacccacttattcctgagtaatatgtctgtcatctctttttttggggctatagctttacgaacaattatatttttatgactggaagaaaataaccaagtttctttcaagtcaaaatttgaagcatgtttcartactctttatttctctccctagcaaataccaaaggcaacaagcgatcccgaacgaggacggattcctactctgctggccagtcagtcggtaggtgcatccacgggaggtcgcaaaggctctcccccttgtgcagagtgtttgtagagtggggtgggcttcagtcggtgggtgcatcccgcaggacgttacagaggctctcccccttgtgcagagtgtttctagagtggggtgggcttcagtcagtgggtgcatcccgtgggaggctgcagaggctctcccccttgtccagagtgtttctagaatgggatgggctttgttattgacagtaggaggcataacttaaagtggtaatggctactgaacatgaaggaagtaaatctagttttctcgtggttcttgacagtgatagttttgcaaaggtgctattactgctagcttatcacctgataagcatttaattgaacttcaaatacttggtctagaaatatttactgagcaccaagcagctaayatgttttttatttactgtttcacacatggagtgggtacctgaagctctgagatttttatcaaactatctgattttaatctatctgtaaaaacacagtttaaagtatgtctgaatatcagctcactaatggtgtctgggttggaataattattaacagtattaccttggtcctcaagcattgataatagctcagaaatgggaagatggaagcagcagaaatttatttgcgttgctgggaggaaccctggaaccacatggaacagtgtttctaggagcgcgactcacagagcaggggtctagaagacttgtgtccctctgagagccagagtcctttttgtgtgtggaaacctctcaggagtgtttgagtcaagctgtttaacttttattttatttgtattagtttccagcacacacagcattgaagttactggttttggggggtttttttgtttgtttgtttgtttgtttgtttttgagtaaaaytgtttaactttgtttagccctcccctcttccccgcactccccatcccaccccttttttccttcgtgacatttagcaacaccctacatagttcatactttgggaattactgttagggtgtaaaaaagtatatcttttcyacaaatgtttacagagcacttacaactagttaataaactaagccaaataatgtctaggggtgcaaaaagaaaatgtgaggtacagtggtcgcctgaagaagcacagaaagcattacagaattgaccataacctgcgtgaaatagtcagagagcaggagactctgccgtggagcctgcgggtgctttcgtgtggagtagggctgtggagattcagaaaaggggacttcactgtgaaccgtagctgcgaagagagcacttgggttggtggcatctaaccatcacttcacctgacaaagggtaatttttctttctttttttttttttttttcttgagacagagtctcgctttgtcacccaggctggagtatggtggcgcagtctcggctcgctgcaacctctgcctcccgagttcaagcaattctcctgcctcagtctcccaagtagctgggattacagacgcatgccaccatgctcagctaatttttttgaatttttagtagagatagggtttcaccacgttggccaggctggtttcgaactcctgacctcaagtgatctgcccgcctcggcctcccaaagtgctgggattacaggcatgagccaccccaccttgccaaagggtaatttatccttattggatgggtggaatctgatgggtagaaaggaaaagggtgtttcaggcaagaaattgggatactggcttataatgtcatacatggacactgtgacaggatttgtgaatgcctgaatcaccaggctcataggacacacagtctctgggggagcttatactggtggctggtctcaaacgaagtgtgctgagacttactggcttcattctcagggcccacctccctaacaattctcaagtggctactatatgctgtctgtagcatacagaagggaactaggacagccagttctgctggcaccagatggtggtggatttggttgtttagcttaaaagttaaattccagctgggtgttgtggtgcacacctgtaagcccaggaggagcacttgagcccaggagtttgagactagcctgggcaacacagcaagaccctgtctcaaaaaaaagaacttccaatggatcattaatagaagtataactatcacccgggtgyggtggttcatgcctataatcccagtactttgggaggcccaggcaggcggatcacctgaggtcaagagtttgagaccagcttgaccgacatggagaaaccccatctgtactaaaaatacaaaataagccaggcatggtagcgcatgcctgtaatcccagctactcgggaggcaggagaatctcttgaacctgagaggcagaggttgcagtgagccgatatcatgccactgcactccagcctgggcaacaagagcgaaactccgtctcaaaaaaaaaagaagtataattatcactaccttcattcagaaggtctgtgatgtacaaggacagcattcaaaaaacttcataattctgatttcagactcttctctgctaaaagccataatcagtggagggtgaacctaacacctgaggactttttctacccagagctgatatgaaaattcctccaaggaataacatttcaaccttgtgtgtgacacattccgaagttaattttctttatcagtttttgtccaaacacattttgtcacgaggcttttgacctgttcttattcctatgagtttattttgttaatgcaatttgcctgaaaatccatgtttcaattctgakaagcaccaaattttttcaataattattaactcacatttgaaaatggctttacagatttaaaaattttttttttttttttttgcaaatggagtctcaggctggtcttgaactcagctactcaagtgatccttccacctcagcctcttgagtagctgagattacagctatgtccagcttaaaactttgaaatacataaagagtaacataaaactttccttctcttttcccctttagggtaggtagggcaggcgttaaaggaatagagtgcgtagagaattagatgctaacaccaacagtggctttttggtgtttgaattttctgttaattgatttcttttcccatagaaattttggacggtgtggaacttggagagccagcccataagaaaacggggaccacagtgccagaatctattcattctttcagtaagttcagcctctgaggaaccgcaccartgactagctcattaagaaaatagcagctgtgttataccctgagaggggtcaacaagatgaagcaacaaaactgcctttgagcagaaaaggttccatgaatttctcattatattctgaggacaaagacggacatagaggaaggattgcttaacacttacaaaagtgaatatttgagaaaaacagggcacccattgaacctgttgtattgctcccattcttacagttatttctacttttgtgtattccagttggagacggtttggtgaaaccagaggccctaaataagaaagctatccagattattaacagggttcgagataagctcactggtgagtgtgtcatgtgtttacttaaaagggacataaaatctgagcacactttcctctctgagtggtggtcagccccatgtccagtggtgttagtgacgagctttggcaccatgcagctgacaaagagtgtctttgaggtcatcagttaaacattgtctctgattcttctttctgatgactgataacagtacttaatgttagtttaatctcatttaactcaggaggtgaataaatttcttttgggtccaaaatcagccaaattcagagaagtgttttttaatcatgtcttttttttgtttgtttgagacagttttgctcttattgcccagtctggagttcagtggctccatcttggctcactgcaacctctgcctcccaggttcaaacaattctcctgcctcagcctcccgagtagctgggattacaggtgcacgcccagctaattttttgtgtttttagtagagatggggtttcaccatgttgggcaggctggtctcaaactcctgacctcaagtgattcacccaccgcacccggccgaatttttctttttttcttttcttttttttttttttttttgagacagggtcttgctctgtcacccaggctggagtgcagtggtgcgatcttggcccactgcaacctccaccttccaggttcaagtgattctcctgcctcaggctcccaagtagctgggactacaggcatgtgccaccacactcggctaattttgtatttttagtaaagacagggtttcaccatgttggccaggctggtgttgaactcctgacctcaggtgatctgcctgcctcagcctcctaaagtgctgggattacaggcgtgagccaccgcacctggccaaacttttcaaatccaactatgatggtatccttcatcttcatgtctgacgataagctgttggcatagacagttaagcccacagggaacaagaagtgcatcgattgccaggaagagagtgaaatgtttttgttcctcctgtgctaggtcgggacttctctcatgatgacactttggatgttccaacgcaagttgagctgctcatcaaacaagcgacatcccatgaaaacctctgccagtgctatattggctggtgagtggggctctcaaagtgactttgttaaaataagcaatcaggtcccaagcctaggccccaaagccagagtagcaaaaagagatttggtgaggtatctgtaaagggcagttagagctcagatctctttaaaaattcatatttactgcatgtgcccattgttataaaaaaagaaactgagaaatatggatgcatacttggaaggcaaacactaaaattaaaattacattaagataagtggttcaggagaataggcaaggcttgtttgtttgtgaggggttccttttgggttttgctgtcagtccagtgcagagatacaggaagggcgaaggaaagaaaaagctagagcagtgacagagagaaggagataaaaagacagatttatgatctgggagtctaacctcaagggccactctggggtgtgctttgattaattgcccaaggcatgcttgaaggcagmaacttgagagagcgggcgctggggaagtgtccttgcgggacctcggtgggcattagccttgactggaaatgatgagtgtgtcccatgcaattagctgtgggagagctcagggaataccctagggttgtcagaccttggccttttcattttcaagttatctgtgtaaacctttgaagaagctcaaattattaaaatattccttttctttctgccttcttaggtgccctttctggtaactggaggcccagatgtgcccatcacgttttttctgaggcttttgtactttagtaaatgcttccactaaactgaaaccatggtgagaaagtttgactttgttaaatattttgaaatgtaaatgaaaagaastactgtatattaaaagttggtttgaaccaactttctagctgctgttgaagaatatattgwcagaaacacaaggcttgatttggttcccaggacagtgaaacatagtaataccacgtaaatcaagccattcattttggggaacagaagatccataactttagaaatacgggttttgacttaactcacaagagaactcatcataagtacttgctgatggaagaatgacctagttgctcctctcaacatgggtacagcaaactcagcacagccaagaagcctcaggtcgtggagaacatggattaggatcctagactgtaaagacacagaagatgctgacctcacccctgccacctatcccaagacctcactggtctgtggacagcagcagaaatgtttgcaagataggccaaaatgagtacaaaaggtctgtcttccatcagacccagtgatgctgcgactcacacgcttcaattcaagacctgaccgctagtagggaggtttattcagatcgctggcagcctcggctgagcagatgcacagaggggatcactgtgcagtgggaccaccctcactggccttctgcagcagggttctgggatgttttcagtggtcaaaatactctgtttagagcaagggctcagaaaacagaaatactgtcatggaggtgctgaacacagggaaggtctggtacatattggraattatgagcagracaaatactcaactaaatgcacaaagtataaagtgtagccatgtctagacaccatgttgtatcagaataatttttgtgccaataaatgacatcagaattttaaacatatgtatatgagtggcgttttagtcataattttgatcagttcaaaaaggaagcatttactctcttcagcactcagccttcagtaaacactctgtagtagggatgacagaggacgtaagggtgtacgtgacatggtccctttcctcagactgttcccaggccagacaggtggagacagcatgccactgaagtgaacagaacttaccccggccaagtgctgagaagaggcatgtatgggccacaggtaggagcgtgtattccaccgggtgagcctggaaagccccatagaaagagggacatttggcatgggtcttaaagaggggtgggagtctgtcagatgaaccaaggggggggcattctcagcagaaaaggaagtgtgaggcactgctgtaaaagcaaggtatccatagcagtggcaagtatcagttggaccatttgaaatcacaggtacgtggaccatttttaatatacaaaactggcattttcttatggctgcacctcatagttcagcatgtctggctcagtggtcagtggggaataaagggagtaacaggaaaataataggaactaaaggaggcaggaaagcagtacggggccggggccagaccggggcctccctcagttcagcagcaaggagtatgaacctgatgctgtgaagttttaaaacggagtagtatctgagtggtgttttttgtttttgtttttgttggagactgggtctcgctctgtcacccaggctgaactgcagtggcacagtcatggctcactgcagcctcggccccctgggctcaggtgatcttcccgcctcagcctcccaattagctgggactgcagatgagcacccccaccgccaactaatatttgtatattgggggaaattcacccccgatatttcacataggttcttttctatattccctaagtgtcagccggtctgagaaaagggacagagtacaaaagagaaattttaaagctgggtgtccagaggagacatcacatgttggcaggttccatgatgcccccctgagccataaaaccagcaagtttttattagtgattttcaaaaggggagggagtgtacgaatagggtgtgggtcacagagatcacgtgcttcacaaggtaatagaatatcacaaggcagtggaggcagggcaagatcacaggaccggggcaaaattaatattgctaacgaagttttgggcacgctttgtcattgataacatcttatcaggagacagggtttgagagcagacaaccagtctgaccaaaatttattaggcgggaatttcctcgtcctaataagcctgggagtgctatgggagactggggcttatttcatccctacagctttcaccataaaagacggccgcccccgaagcagccatttcagaggcctaccctcagggatgcattctctttctcagggatgttccttgctgagaaaaataatttagcgatatttctcccatttgcttttgaaagaagagaaatatggctctgttgtgcccagctcaccggcggtcagagtttaaggttatctctctcgttccctgaacattgctgttattctgttcttttttcaaggtgcccagatttcatattgttcaaacacacatgctctacaaacaatttgtgcagttaatgcaatcatcacagggtcctgaggcaacatacatcctcatcagcttatgaagatgacgggattaagagattaaagtaaagacaggcataggaaatcacaagggtattgattggggaagtgacaagtgtccatgaaatcttcataatttatgttcagagattgcagtaaagacaggcgtaagaaattataaaagtattaatttggggaactaataaatgtccatgaaatcttcacaatttatgttattctgtcatggcttcagccagtccctccattcagggttcctgacttcccgcaacattttttgtagacaatggggttttgccatctttcccaggctggtcttgaactcctggactcaagcaatctgcccccctcagcctcccagagaagccactgtgcccagccctgagtggtgtttttaaaaggcaactggtggccaggtgcagtggctcacacctgtaatcccagcactttgggaggctgaggcaggtggatcacctgaggtcaggagttggagagcagcctggccaacgtggccaaaccccgtctctgctaaaaatacaaaagttagccaggtgtggtggcatacacctgtaatcccagctactggggaggctgaggcaggagaattgcctgaacctgggaggcggaggttgcagtgagacaagattgcaccactatgctccagcctgggcaacagcaagactccgtttcaaaaaaaaaaaggccgggcatggtggcaggcgcctgtaatcccagctactcaggaggctaaggcaggagaatcacttgaaccgggcagcaaaggttgcagtgagccgagatcgcaccactgcactccagcctgggtgacagagcaagactgtttccaaaaaaaaaggtgaatttaaatctcaatggtgatactaataacagttctaacactcacagctagaaagtcacatacctacttggattttctgttacagtcctaaaccatgtatcacctatttgctccagaaaatatggtcaccataactttcctggctccagatgaaataactctcagtgactacagtgatgttactattcatgaacgataaaggtgtgagaatgataaaggcaggaaaatggtggccatcagtgataaagatatattctttaggatataagagtctggattaaggtctttggtgaatccgataggttttaagttatatctaagcaaagccttctgggtgtgttgagacaaattatcaaaggcagaggaggagctagtggaggcctttaaatacagtttagtccagccaggcacggcagctcatgcccgtaaccccaacactttgagaagctaaggtgagaggattgcttgaatctaggagtttgagaccagcctgggaaacatagtgagaccctgcctctacaaaaaataaaaaaattcgttgggcatggtggcatgggcccagtctaccctggatgctgaggccagaggattgtttgagcccaggagttcaagcttacagtaagctatgattgtgccactgcactccagcctggatgacagagaccctatctctaaaaataaatacataaacaaggatgaagatctttatgatgatccacttaatgaatagtaaatatattttccttaaaattttcgtaatttattgtaagaatacaatacatacacacaatatgtgtcagttgaccgtttgttatcggtaaggcctttggtcaacaggaggctattagttaagttttgggggagttaaaagctatatgtggattttcgactgctcaaagggatgggagcccctaatcaccagatgttgttaacaggttaactatttttttcttttttttttttttttttttttttttttggagacaaggtctggcactatcacccgggctggggggcagtggtgcaatctcagcttactgcaacctccacctcccgggcacgagttatcctcccacctcagcctcctgagtagctgggactacaggtgcatgccatcacactcggctaatttttgtattttctgtagagactgattcttgccatgttgtccaggctgatctcaaactggtgagctcaggccatcctcccacctcagcctcccaaagtgctaagattacatgtgtgagccactgcgcccagccagttgtattttttaagaatcaaggctgaggccgggcatggtggcttatgcctataatcccagcactttgggaggccgaggcgggtggatcacgaggtcaggagtttgagactagccttgcccacatggtgaaaccccatctcttacttaaaaatgcaaaattagctgggcgtggtggtgcacgcctgtaatcccagctactcaggaggctgaggcaggagaatcacttgaacccgggaggcagaggttgcagtgagccaagatcatgccattgcactccagcctgggcaatagagtgagacttcatctcaaaaaaaaaaaaaaaaaagaatcaaggctgtagtgtcaacttactaagtttcaaatatcaactgcatctcatagtacctttgtgaccttggataagttacgtagattctctctgcttgtctcctctgaaagtgtgggtaagccctaccttgtgaggctgtctgaaagacaagataatccatggaggagcatttagcacagcctgactgacatgtggtattaggttgaaccacgtgaaataggtcctcaaaaatactaaatgaactaggcgtttgtcctgccagagtacctgtgtacctgaagcacacacacggaaaaagtgaaaagcaagtattctcttaactggatatgctgaacatttattgaagacttaatgggtggaatgaattgtattaagggcatcccatctctaatttcaggagagtgaatctatctcttgagctgcctgataattcggtgcctccctcacaagagctcttccaggagttcacttcacaaatgtgtactgagttcccactctgtgttaaccagaatggttccagcgatgtctgcaggaaacaacgtctgcttggaggagttcagagggtactggagggaggaagcacagttggagctagacgctttcttcaggagcttacctgtaaagggcaagagagagatgatggcagttggaaggagatgtgggagccagtgttttttccttttctcttttagttgggaaagatgtcagtgtacttgtaggctgttaggaatgaaccaatagagagggaaaagatagatccagggggcaggggaggtgtaattaattacaggagtcaagaccaaatgggtgaggggaacacagaaccagccagagcttgggaggaggtgactttaaatatgaggctgggccgggcacagtggttcctgcctgtaatcccagtgaggtgggaggacggcttcagcccaggagttcgagaccaggttggtaagatgcagtctaaaaaaaataagccaggcgctggtggcgcacacctgtaatcccagcacttcgggaggccaaagcaggtggatcacttgaggtcaggagttcaagaccagcctggccaacatggtgaaaccccatctctactaaaaatacaaaaaaaaaaaaaaaattagccgggcattgtggcacacgcctgtaatcccagctacttgaacctaggaagcggaggttgcagtgagctgagattgcaccactgcactccagcctgggcagcagagtgagactctgtctcaaaaaaaaaaaataaacagggcaggcacggtggctccgcctgtaatcccagcactctgggaggtcgaggcgggaggatcacaaggtgaggagttcgagaccagcctggccaatatggtgaaaccccgtttctactaaaaatacgaaaaaaattagccgagcgtggtggtgcacgcctgtaatcccagctactcgggaggctgaggcaagagaattcgttgaacccgggaggcgggaggttgcagtgagccaagattgcgtcactgcactccagcctgggcaacagagtgagactccatctcaaaaaaaataaaaataaaaataggctgcacgctgatgactcgtatctgtaatcccagcactttgggagagcaagagtgaaactttgtcccaaaaacatggttttttttgtttgtttgtgacaaggtctcactctgttgcccaggctggaatgcagtggttcgatctcggctcactgtaacctccacctcccgggctcaagcctcagcctcccgagtagctgggattacaggcatgtgccaccacgcccgactaatttttgtatttttagtatagacagagtttcaccatgttggccaggctggtctccaactcccgacctcaggtgatccacccgcctcggcct

SEQ ID NO: 95213 - DNA, 146044 bp, Homo sapiens
gagaaatgttctataatcttattattacattttagtgtttagtggccctgtgtccttggacaatgaactttgcaagtgtttcttagctttattttcccagcttaggagagatagaaagcctagaggggattggagtggaagaaatgcccttccctgagatgagataatgatatggtaaggttttctgccctgaagagtagggctttgttgtagataatcttctgggtatatttcacagtggttactcttccctacccatgtaaaaccttaagatgatctttctcagtttctcttcctgaaaacctgatgatgaaacaggagagttcccttattctcctcacaggacatgcaacaggggtgtggcttgcgccttcggtggccctgctactcaaactcctagggggagcatgcagatgggtaggtgcagaggctgtgtggagcacttttgggctttggccccatggcagcatctagggatgggtgtctgcgactcccgaagcccaagtgggcatgtgttacagtgtgctttttcagctttgctgtctgcagacagcttgtgttaatcagctcaatagaccctctgccttattgcaagggcagagggccagtgtgacagctttctgtatcctgagctcttacccagtgtgttggaaaaatcggatcacatgtgggctggaaggatcagtgcaaagttttattgagtggtgggggtggctttcagcaagatggatggggagctggaagagggggatggaatggaaatgtggtcttcctcaggagttgggctgcccagctgccagactcttctctaaccgcccccggccgaactcctcttggcatccagatgtccctgctcttctttctttctctgccatgtcgttctgccgttgctggtctgccggtctgctggtgtctgctggtgtgttcttctgcttcgctcaaccttcagctgcttgcgtctgtgcctgctaaggccttaggtttatatgggaacaggatggggggcatggtaggccagagcagtcttggaaaatgcaacatttgggcacgaaaacaggagtgcctgttctcacttaggtctgtgggcacaggcctgagggtggagccatctccagggacactgtccttttttacccaatacttccctggcccccatcctgtgtgagtgagattcttggaggtaaaactataaaaagtgtggaggcccacctgactatgatctccaggacttcctgattgtgatccccaggagtttctccctttcactctagtccacacttagcctccagcaattccactatgccaattccaaatgaccactgaagcgttcctaccagtttatggcttcaacatcttctgctccagataaacatacctcaactctggctctggatttgtccatttctccattttggaggagaggggaattgccttgtaactttagttctttattgagcccaagtaaagttgttgattttcagctttcttgctttaaataaatctaatcccaacataatttccaatcttttgcatgcattttcttctttaaacttccattattttctgtttcttattttctaaaatttcagtgttatatacctttggtgtaggtttaaaaaattcattttattgagtccttaatgaactcttaaattttaggattctttttagtatgtctttgaaaatctgctttttgtttcttgttgtttggatatttattttttctttgagcctataatttattatcttgtttaccctcttttatatttttggcctactttctgggatatttctttaactttgtaattcaacttttctatgaattctgttatatattttgttaccatattttaagtttcaaaggactttatttttagtcatctgaacattccttttgttcttgcttcattggattgtgtctcagtccatgtgagaatattaattatggtttttattgaagatttcttatgtttcctgcattatcattttttcctagagttgatttctgtgtgtgattatttgcttgttttgtctctactttcatgttggagactctcttcaaatgtctagggatccttgactctcccctcatatttaagaaggaggcctgaaaaagaggccacgaaactcggtgtaggcagagcttatacactaatgggtctcactagagggtgttagacagggatttggccattcgattggagatctcttaaacatatcagaatctgtaggtcttctcttttgtgctggtcagtctctagagatttaacctcccgttttaagccagttggggaataagatctagatgtttcaactgctcctttttaaagatttccaacaaacctcttagtttgtttcattcattacctccatctccagaggtcctaggtgccttcgtttctgagcctttcaagaactctctagtataaattagcttgattcttgttggcttctctctatgctcctcaattttctgtgcacgtggacacacacacacacacacacacacacacacacacacacacacacacacacagagttacttgaaggcccagacctttctctctcctgataagtcagttaacacttgtttaattgctttcctgcttgtgaactttttgacatcctttgtctgcttttgtattccttcgttttttcttgttcttctgaatctttttcacttttactcctttactcttcttttagtgaggtcacaatagggagtggagataaataaatgcatttattcagataaactatatttataacctttctcaatctacaaccttatttaccttggtgttgtaattggttgtgaaacaggcatcattttatgcttttgactggccattccaagccattctgacaagaagaacttgagcagagactgaagattggccttttaaaattttatctcaaatcactgacaattctgtttaatctggactcctgcctttacatttttctactacacatttatagagttttaaaagttgtttagtccctgaggaaatcctgtttgtgtccgctaagcatactcagatgcagaagtataaaagaatacctaagctacttactataagtcatacaaacaagatggctaaatatcaattaaaatattttatttaaaacattaaaacttgggggttcatacttttccttaaacagtgatgccttggcaatagactgaataagtttgaggatctcattataaaaccaagcaacaattatttgttgaagtgcctgagttgatacctggaggaacatgaagaaaatgtgaaatattgttcttgctcttctcctagacacttagccatgccctgtggagtcctaatttgatcaaaagcacaggcttttcatttgatacataaaactaaatccccttcctgcctagttggtgagacatagttatatatgaaaaatactagcaatacaagacaacacaacacaactaagtgtttaatcatcagtcagagccagcaaatactatgacatcagaacaggaggtcaaagagagtagaagcagataccacaaatatttattgagttctcataaagtctgtgttttaggtgtcctgggaacacattattgaatgagaactttctagataacttggcttggtcttgaataatgcactggatttatacatggggagaaaaagaaaacaaaaacaaacacacatcacatgagcggatcacaacactgtgacagaactgagacctgtgtgtgatatagtttggctctgtgtccccacccaaatcttatcttgaattgtaatctccgtaacccccctgtgtccagggtgggacctggtgagaggtgattggatcgtgggggctgtttcccccaggctgttctcatgatagcgagttctcacgagatctgatggttttataagtgtttgacagttcatcctacacacacattctccctcttgcctgccaccaagtaagacatgccactttgccttccaccaggattgtaagtttcctgaggcctcctcagccatgtggaactgtgagtcaattaaacctctttcctttacaaattacccagtctcagtggtattctttatagtaatgtgagaacggaccaatgtagtgtgacttggaagggtgagagcgatgacctgattagatttggtgctcatgttaagaaaaagcagggaataagtttggattgttgggtgggcagaagcccaccaaggtaagagaattcttagtttgcagaagaaagaaaaacagcacattgtgtcacacagatcttttgatgtaaagcatgactttaatgccttcttatgatattatatagggaaacatttacatagccccttcataactgtaatatgccctagttttgtttgtcagtttatttctttgttatttactctacaaatagtccttgaacttgaggaagaaaaatgggaatggtttgtgttttacttaaattataagatcaaagatggcagatgatttatccaaagcccaggcaagtaggaaaagcccccccttcccttccccttttccaggatagaagagagttggctggttactttgcaggacttaagatgatcttcattttaaagaatctgtatcagcctccactgtggtaagatgtgactgggatttcaaggtttcccctgtctctactgatttacctaagtaggacagagatttctggggcatgcctgccggtggagggcagtaggtcactcaactaagagcacagtattgttgagaaaatgacactaaagtggtcatctgggatgctacttcgcttttggtaaataactttgcatcaacttctcaagttccacctctcagtggagacggatgctagacaaaggtaccagacaccgcagcctggtcggctgaacaaatggagttatagccttagattttgttttcgtgatgactaagctgaccaggtttcttctttgtccttgcacactttatgcttgacgagatgcttaagcaaatagaataggcgaccgctaggaggtacccgagctatgcgtcggccgccggggcgagcagaaatggctaacagcgactctctcggctcggtgggtcaaggcgggtsgtgcttttccaaggtcggggttgcgataagcttatcgcttatcacaagcaagaagggcaagaaggacgtctaagaaccaacggtcctttaatctaaaaggccgcgcgcctccaaggcaatgtgacatcttgaggtctagtgtttgggcaccagctgcctgcacatctggatgcagcacttcctttcagggaggaggcgaggcggaggaccccggagtgcacgcacctcctcgtgcgcgcgctcgcttgcgcccgtgaacgtgtgtgtgtgtgtgtgtgtgtgtgtgtgtgtgtgtgtgcgggcgcgcgcgcacacacacgggccgcggctccgggaccggctaatgggggtgggggcccaggaaggaataaatctccgccagcctcctcgcgcctggctgcgggttaatatccaaccagctagagaaagactagggtgacggcagcagggtgacagcctgggcacaccggccgcttgtcgaaggatcaggatattagccagtctccgccacactcagggactgatatatttctattggcggggggctgttggtttttattgtctgccgttatctccaaagaacaagggcacgagtgaggggtgcgcgctctgggcgagtgtcgcggctcggatcgggtcgaaggaggcaattttgcgggtgggggagggagggggagaccttgatttccaccaatccccgggcgtttgtctgcgaagtccggggcgcagcggaaggctgcggcgcgccgctgaattaactgatgagagcgagttcttttcttctccgggaggggtggggagcgagggtcccggcgggcgaggcggaggagcccggggcaggatagcggtcccgggccgccgtggaaatttccaaggacttggtgcggcgcagagagcgcgtctcggggcggggtgggggggkgggggttgcctggcggcgcagcagcgcgggaggcggcgaagggcgcaggagcatcgctcggaggggacaaggggacgccacgggccacatgtttaggagggagccgagccttctcccggaccctcgccgagggcgaccgtgatgctgcagaaccggcgggagcgactcgccgccgccgctctctgcgcactcggagaccccagcgcccgccttctgcaggggaagcgaccatggccatagatcgtgacttcacccccagccacttcccctagaaagaaatccttggaaaagttgcatttgaaaaaatccttgcgctgacctttggggccgacggggcmgaagaagcgtgcgtgcgtttgcaagtaagagaaccaaaggtgtgtgtgcatggggggctggcggtgggggaccctccgctgccacttcgcctagctttgtgctgaggccccggcccccgcccctgggacgccggggctgcgatgagcccctgcgggcgggcccggcgacaaacgtccagaggggccatggctgtactggcgtggaagttcccgcggacccggctgcccatgggagccagtgccctctgtgtcgtggtcctctgttggctctacatcttccccgtctaccggctgcccaacgagaaagagatcgtgcagggggtgctgcaacagggcacggcgtggaggaggaaccagaccgcggccagagcgttcaggtactcctgccctcgcggctcctcccctctagcgtcctttcctccccgagtgcagaggacagggtcaccggcgaggaccgccttgcaccgtctcgcagaggcatccctttcatccgctcttccatgtcctttccctccatttgtgccattcccaacctggagactttagtcagggttccttccccacccctgatccccagagatgtgcagacacctgctttgcgcatgtaaagactcgacgcatttcttcccaaagcggagttttatttaacaatttacggataaacaaaacagagggaaggagaacccaggataacttagtctcttgcacttaataagaatttacctcttgggctctgcagacatttgaagctgtagggaacaagaagcaggtaaaaggcatctccccgaggtggagtgcacagtcggtaacataagtccccaacgtcggagtgatgggcagtggaaacatggacggatcccgcagctttgcgcagtgtgcccacagcaagtgcatagtactgactgacgtctactaagagacgatactgtgcaatttttgtgttgaaatctcgaacagctktctagtattattatctcatcttgttgaccacaaattgattctttagaaggatgagtaacttccccaaggtcattacttttgacctgtgggtgctggatttttcatcacttaaagctccaaagctcccagctctttttattggcttaggctgtggatgcctctggaagatgggagatgtactttaagtaggcacctgaagtcagaaaacaaacaaaatgcccaagccaggttggaaatcagaactctgaggatcactcagaggttgtagatccgcttcctttctgggaattttagattaaatgtctaaaaataagttacggcagcaggggttgtgtagttagattggagggaaggcagagctgcttccccttcctctccacctccccaggcatgttgagggaacacacgggtgcttccaccactgcgaggtgcccctttcacctttagtctctggggctgaagatgctgctgttggcttcttcctgtgattgtagtggtctgggtggttggaaatgatctcctctgctctgtagaggatctttctaatcagtgcaagggcaggtgagttctaatgtaaacatttttcactgcagttatttacaaatattcaggagcatctatacatttttaaaaactttttaaacatatggtttccatctccttctcaggcctcctcctggaaagaggattaaaaagataacagagccaatttgtttagaggaaggcaactgcattctccttggaagggaggactttccttctccctttttagaactctaccatcattgaatttaaaaataacctcactcttcctaaaagtatctaagggttaattttttctttccttcacagtattgattgtgggactcaagagcaggcaaaaggcatcacatccagcaattattttccctaaagacagaaagcactttcatttcaagtgatctaaggaaatgagttaagaacttcccattggtttgcaatgaaagagtccatttttttaatataggaggaggaataatgaagccctcttagaggatagatttcttgttggaggatacagtcaagtggaaaatgcttcaaattctgagacacacaggctgatagtttctgagacacatttgttccttgctttctgtagcctggagtaattttcagtgtgtttggctgttatctggtctggtctctatgtgcagagaattacttattaaaatccacacactatgaaaactacctaaacacatatccctcaaagttagtggctgtaaaaccatgtaaaaggcaccattgcttattgaaataagtttgagcttcagagtagaattctgaatttctacactgagtatgctgtgactagataaacagcagagaatctttggcaagttagtatattttttgagtcctggctttcttgtttatctacattgcagagttgttagaaggtttacatttttaataaaaactgatgccaagtatctggtacattgtgtacccagaaaatggttgccttataattgttataaattatatttctggtatatgttacaacttaaataaggaaatctgggcaacccatgagaatttggaatgtttctcctgccagatttacaggtaaacattattggtccctacccctctccccagccatgtacacttaacgctaatgaacagggacaagacattttgaaaggtaggagaagtttcatggtttgagttaattattttttacctgcacatttaatgttctttaacatttggattgtcagtatatggcagtagtgtttatttgttaaatattagaccagtcagtcagaagccattatcatgttaaggagacacaactttgacaaacaagcatctgtttttctccagtctgaaacatcttctgcataaatacagatatatgcacacaaatgcacaaggtgcacttatatgttgagatataggtgcatttattcacaaatcatggaatggtgtcatgtatgtataaaaatatagatgtgtatacatacataaatacaaacatttgcaatcagtcaattaaacaatatttcatgagtgactactctacatcagatatgtgttaggccctgggggatagcagtgaataggatggatagattgcctcctctaagagctttcctcctagtagaggatgattgacacacaaataaatacgatgacttaacatacggttaaattctgtgaagagaaaagggagtgtttcactatgtttataaacaccaaaatttaagattttattttgccctctgtgcttccatttacttttgtaattttcttcttctagctcagtacttgatatgtactgaattctcagagaagaaccttgtcaaactgcgaaggagatggcaggaagaaagtaagaaagctgtaagagttttgaatagaacaggaagttttcctaatgtttatgtggtgatagaaagataaaggaatcaatagatcctattatagaaactttcttaattcttgttgcttttgattaagtgatactgtgggaaatgccaaaccaaagcagtgtttgtttcttccatcagatcctcacccatttcatttgctcctcagaaatgaacctgaattcagaatttatgtgcaaggctttattcatggcacctgacatggtaacaataatagtaacaattaagctaacaagttattaggtgcttattatctgcctgacactatgctagtatgtattgtctcatttaatcctcataagaatcttgtataaattgatatatcattatccacatttatgaaaatgaacatgccctggtcttcaagggagttgctataatcccatggaaaagacagataatgtatataattaactaactggaaatagggccatcaaagacaggaaacatagcagagtgaaaaccttatggatttgggagctgtcagaacatggttggaattctggctgtatccctttctagttgtgcaatcattggtaagtccaatctcagagcttcagttcctccatttgtaaattggggcttgtaagaatgtcttacaagtttgtggtgaaaattacatgatagcatatagacagcgcctggaatgatgcttgccacatagctctgtttaatacgtgattgttataacaatagaaacaccagtgaagtgctggggatgttcccagaacatgacatttaattctactgaagggagggaaatcgggtttcagagaggaggtggtgtttggagtaagcctccaaggatggtagggtggcatagtggtaagaggtgaggatagaagtatatgccaggcagagagaacagcaaagatcaaggcggagagatttggaagtgcctgatgtgtttactgtatggaaagttattaagtcacccatggagaccaccatagaaaagtgggctgggtggtaggacgaagccaggagtctttgaatgtatttaaggtatggctcattagaaatggacaaacatcaaggatctaatggtactggctgcatgttagctatcagcagaggtggcacatcactgttaccagtgggtttgggaagtagaatagaggttaatacagtgaagtggttgttttgaaaattctgtcgactcattgggtggtaaccgttactctaagcagtcaagtcctttctttttcaaaattttgaacaaacgactgttttcagcagttccacctttatgtggcctctttatttccctatttttgaatccagggatgttaaaagctcaatttccataattgtcctggtggcaggaaaagggcattgggagtggaggggaggagcataggtgcagccatctgtacaggtaaaatataagtttagtgtttgtaagttgggggtttatggaattcactttgaaaaggtagtttgggaaaaagagggtttaataagttttgatgctyaagaaaatatgctacagttatgttgcaaatttacaaatgtggaaaaaaatctcatcagcaataatcacaatagcaaaaatcaatcactaacccttactggatacgtaaaatataccaggcctagttcttagcacttatatatgtttttttttccccaaagcaaccttataaagtaggtttgtgtatgttccttgttttatagatgaggatatggaggtttagacagatccatgaacaaaatgatggagtttgatttccaacctggagctatttaattctaaacctcatgcttgttccctgctcatttgggataaatgaagcaatgctgtatacatctctctcatgatttggctctgattacttctccaatgtcatctttcatcagtttttstttttattctttgctaatattggaataattaaaaataggccaggctatattggttttgctcgagccacccactccacctggaatgacttgacttgaaggccacatcttcctgccttttacctggccagttccttctcatctcttgacagtgcattatagtgggtaagagcaaaggttctgaagtcagctgtgttcaaattctgattccatcacttgctgtgttcttgagcaaatcagccttcattgctcatttctctatccataaaatggggcttcttataggactgttgtaagaattagattagataatgtgtttaaaatgtttagaactatttccagtatataattaatgctcagtccttgttagttcgcctcaaggtggcttcccttactccttcttcccttcccaggctgtgcttagaactcctcctctctgttttctttataccatgcatgtatgattgtaatcctttcagttattcaaaatacctactactctgtgtctaccactattactgtaggataggagatgctgggtctgtagctgtgaactgaataaaatttttgttttcttggaatttataggataatgatgagagacagaaaataaacagagaaatatacaaataactggtagcgacaggtgcattagtgatgatgtattaaaaatatgagtgcacttgcctgccttccctgctaaattttaagtttctcacagacaggaactgtgcctcattcttagttgcattcccagagcccagcatggtccctggcacactaaattttgcttagatatcatgtgaatgaatgtttaggaaggtgtggaaccagatagccacccaattggtcaacaaatatttaatgagacctactgtgtgtccagcactctggcagtgtagcagatcagaggagtaagcatcctttgtattctcaaagagctcttactctagagcagaggttcttaatttcaaccctcctgacattttaggctgcatactgctttgctgtggagtgctgtccggtacattgtagaatgttcagcagcatccctggcctctgtccactaaatgagacaaccaaatatgtctccagacttggcaaaatacctcctggggggaaaattgcccctgactgagaaccattgatttgcagaaacaaaacctgccctatcgacaggatttaagaaaccttgaaagtatgcgtaattaagaactaaatttggaaactacaatataaatgctttgactgtttagagaaaggaggtgtctctgtgggctcaagttgttggagaaggcctcctggaagaggcctgaatgaactgtacttgatagacaggtcttggttagggagggtcaggagaggggaggcgttttaggatatttatataagcaaccgtctctgttgaaagtaatataacagctgtttaagattttcactaatgttccccttaatccctggtgagaggggtccatgctctgtgccctatactttaaggggccacatccttctttttctctggtttcaccctttctcagtgaggcagggtgttaatgggatctttctagactctggaatttcctgcccaaatgacccaactctacttctgcagcctgcctgcctgcgtggggcattttccccaatcttcttcctgagagtggcttgcccccctggtatgtacaatcctagtccacacatcagagggggcaaggaacggctaagggacagctctttgagggagacattgtggaaggatctttgatttggtkctgtggggcccacatatgcaagtggtataggcttgccctgtgtccccagattgcaggaccaaacttcctggagtttcaggagtctaaatttgaatttggcattccagattgttatgcagatttgtttgtccagggaggagaatagaacatgttttatcggtttgttggtttgatgataacttctcaatattagatacagttgtacttttgttctctgccttgcaaatggaggtggttggagagtttttggtctgtactgtataatcaatactcgagtgaaaaattatagtgggttttttgtaacttgggagtctatcagtcttctttgagagcaaagtgttttaggaaactagttggatcaattgaataattatgtaagttagtatagaatgtggtcagttagtcttttgacaaagttgtgagtcatcttggaaataatgatactatgtatcattaatgcactcttcatgatggatttgatagatttctggtaaaataatctattttagcttctcattctgacctggctctatcaggagctgtgtgaccttgggcaagttacttaacctctctgtacctttgttgcatcatctgaaaaatgagtataatgtgctaatctacttcataggtttgtgatgataattaaatcagataaagaatgtagactccataaccatcctcacttggctgggtgggatgataggaagtttgttcccacctggaaaatgtctggactttggagtcccagagataaggatctaatcctggttctgtcatttatcaactttgtgacattgaaaaatttacttggtcttgctgagccttagccgcaggtggcaatagttaccttgagaggattagttgctggataagtgctaattattagtccataatgaggagaaaatccatgtctttggacaaattctgtgcctattaattgtactttcagtaaaagaatatctgacaatgaaatgtgaccttgtgacacacgctcttttttcacagagttagtgctgagggtgctgtactatggccggcaaaattttatggaagacagcagagcccagcaataaatcaactgatttcaatcattcattcaaccacatttgctgaatgtctaccatgtaccagttaggtgctggcaatacagtgatgaatacaagaacgtggtccctgatttgttaatctaattaacaaattttataatctaattaacagcagttctcccatatctgtggttttgttttccatggcttcagttgtctatggttaatttggtccaaaatattaaatggaaattccagaaataaacaattcataagttttaaattgtgctctgttttgagtagcgtgatgagatttcactttgtcccactatgtcttgcctgggatgcgaatcttccctttgttcagcgtctccacactgttgacacttgctgcccatgagtcacttaatatccatcttggtggtgggatcaccgtgcttgtgttcaaggaacaccgattttattttaccagtggccccaaaatgcaagactgatgatgcaggtatattgttataattgttctattttattattakttattattgttcatctcttactgtgcctaatttataaatcaaattttatcataggcatgtatgtataggaaaaaataggaaaaaacggtatatagggcttggtaccatctgaagtttcagacatccactgggggtcttggaatgtatcctccacagataagaggagattcctagtttcattccttaaatcagtaagaaaccaagtaacatggggttccaaggcttacagtttgactgttttggataatgataatgagttttgaaggaatcgacttttatccctttctgttgaactgtcttctagctgtggcattgcatgagagggaagcagccaagaccgtaagagctgtgtcgctctaattaggtgccaggaggaagtggaaatgaattcagagccacacattctccatttttcagatcttaaacacagaagacactatcagagatttccaggtgaccacaatgagaaaagggcctttcgtcccactacatcttgcctgggatgcaaaatctttagtttgtttccattattgataaaataaacatatatagtacatgattttatgtcccccatgttcatttaaacaatttatagtgtttattatttgtctgattttggaaagaatacatatttactatagaaaacttttaaatgtagtaaaaaagaagaaaaagcctgctgaaattccctcactcggaagtacttattgtaaacagtctcttttgtgtatgtttgtttgtgtgtattactaaattgtatgtattttgtatatttaattttatatcctcttttattcactcaaaattatacctttagaattttctcatataattaaataacttttaatttataaacttgtgaaaaaatagctttataattttttattttggaaaaataattatttattgtccaagtattaccataaaaatactttaaaaaaagattatgctgctgacaaatttatgttagactttttctttaatgatttcttcatatgtagttgttgtatagctgagcataggaaattaaaaagcctctttaaagatctgtactgtctygaggttgatatttaaaggataaaagcaacactattttcatttgtaaaagtaattgacatttaacaaacatcgctaatattttggtttatattcttctggatcattcaatgccaatgtgtgtataaatgaaacaaaaatataatgaattcaacagtacattgcaaatatttttctagtaatagtatatgcagtctacatcatctcttctaatgrctgtaagattttccattgttaggatagatacaaatgtatttaattaatatactgttattggatatttatgttgtaatttctcacttttatgaataaagatgtggtgaycatccttttgtatacatcttaaacacttacctgcttataaatttctagaattaatcttttcacactttttagtttgaagcgccagttctttttttaaaatctttttaaaatttttgttccttgagtttattaacttaaaacgaatgctactacaagcatttcttccatgccactaaactttagcccagacatacattttaacgcttgcataattttctgtcatatgaatatcmttaaatgtatttaaccaatgatctttgttggaaatttagtttatctactatttttatgatcatgaataacactgtcatttgatgactttaagttgtcttaattctatattggttttttctttctttttttttcaacttgtattttaagttcaggggtacatgtgcagtatatgcaggtttgtttcacaggtaaacatgtgccgtagtggtttactccacagatcatcccattacccaggtattaagcccagcattcgttagctatccttcctgatgctctttcttccctcaccccaaccctgacaggtgtgttgttgttccccacaatgtgtccatgtgttctcatcgatcagctctcacttataagtgagaacatacagtgtttggttttctgttcctgggttactttgctgagaataatggtttccgactccatccatgtccctgcaaaggacaccatctcattcctttttatggctgcatagtattccatggtgtatacgtaccacattttctttatccagtctgtcattgatgggcatttaggttgattccatgactttgctattgtgaatagtgctgcagtgaacatatgtgtgcctatatctttataatagaatgatttatatttctttgggtgtatacccagtaatgggattactgggtcaawtggtatttctgcctctaggtctttgaggaattgtcacactgtcttccacaatggttgaactagtttacactccctccatcagtaaacaccaattcttatatctggcatctttgattgttcatagaaaatctttggctttggctaagtgcagatttggggtgttgcctctttcagtgtgcaaagtgattgcataaatagatatactatgattgttagattaaattataaaatttcccttaggtggatttacaataggtcaggcaatgaaaaaagatccccatacaactggatatgtacagtggcaggtaaacccttcatttgggattgcagagacccagctatgaggaatttatgtagtgcagtggtacaygtgcttttatttttcatggttatcagctccattacagtacagctgataattagcatggtgttttatctccatttaaaaagcaatagctttctttcttctaggacttaagcaattaaataaaactgtgatttaaaaaggaaaatgaacttttacttcatgataaggtagagatttcaaggaaaaagaaaagtgtcctggataaaatagaaatactatgtttcacaactctaattttaagagtcattttcctatttactaaaattaaacgtcttcagcatgaatctgcagcagatcatacccacctggtgaagggtggaggygtcataaaaaggcacaaaaattccatgatgatattttgttgggtcagtgttttggtggtgaagtgttggtgactgtgacattgctcgatatcatctgtattgtgtccttctactcccttgcacttgtgtgaaatggctccacatactgttgctttggtgctttggggctagaaatgaagtcttgttgatatatgtctgtctcaagtccctggtcacagccttactaaatgtctaatgagtattggatgaataaaaacatcagattatctgaaaggctggtagacagctgtctgaataccttttagggacagtttcatttattgtctattattaagactctaggctctaaatattcactgctaattcatgtattcactccttcattcctttattcaacaaatatatattcgatgccttctatgtgccaggcacaatgctaattactgagaacagagcgataggccaagaggacgcaggccttcccccrtacagcaaacaagcacgcagcacacaatgggaaaggagcagcaacattctccagtctctccacttctttatatgggaggaaaaacaaacacaggtttgccktagctttcagaacttagctgtgtctgcctgtatttgattcagtccataaagggcccaaatctccactctggtccattcagtgtggtgcctgaatcgtgattgcgatggcagaggtctccgtctagttcagtggtatgatatctttggactcttgctaacctatgcaacatgtgaamtgctggagaggaaaagcactttaaaaccttgctgaaagatacatgagcccatggggaaacacaaagctcaattactggtagaatcaaagagacagaggcaggctggcttggaaggggattgctcactttgtaagcaactgttctcaactcaacctgccaccctgcaatagcaaagaagaggaagtggaggggccggcagcaagactctggtgagctgagtcagtaggcagtgagctgagtctcaatttggggtaaaaacacagtcactttattgtttcctaataactgctccaactatggcatgtgaaatctacctcctgacctccaccccgcaccccagttagctggctctaatgggtctctgaacaacttggccaggttttattaattttttattcactttgattcttgggacagtctcactctggtatttagctcagttttgtttattttaaagcacaatgaaaattctggcgtctaccasctccgcctgctcaggctctagaacctctaggcgcttgcggcagaaggcaagaagagcaatcgctgaggtggagcccactccaccctcctctaggagctgctgcttcagtttgggcagggaggaggggaatattcatagtccctttctctgttgggggtggctgcttccgcgtgaaccctgcttggctgcccagccttctaatggcaaagtgttctggttctttcacctggcgggcagccctcttaggtggggtcctgataaacactccatccacagggagatcccctatccttgccacgccaaagggctctttctctcccacccctctcagcctcaccatctatctttccgtctccctttccgctttctccatggctcagggacagccagagaaaacatccaggagtgcagtgcctggtgtgtctagtgcctggtgtgtctggtgcctggtgtgtctggtgtctggttgattctgcagactcttccttttcttttcttttctttctctttctctttctttctttctttctttctttctttctttctttctttctttctttctttctttctctttctttctttctttctttcttcctttctttcctttcttctctctttccttctcctttctttctttctctttctttctttctttctttttttcttctctctctctttcttttcttttcttttttttaggtctttctctgcacccaggctggagtgcagtggtgcaatcatagctcactgcagccctgctgggctcaaggaaacctcctgactcagcctcccaagtacctgggactgtaggcccagcaaatttttaatttttatctttgtagagaagggatctccctatgttgcccgggctggtctcgaactcctgggctgaagcgatcctcccgcctcggcctcacaaagtgctgggattacaggygtaagccaccgctcccggcttcacttctttacaggtgatttgtttggagattcctctacccctcttctgtgttggcagggagggaaagcccttgtctcccctctccgtgggggtggaaaggctgtggcctcaccacaaaagcatgccactcccaaggcagctccttccctagtataaatcagctgggtggtgccagractggtcctcttagaaaacctgtggagtggtaaacataaaagatggggtacttagcctattttggcctcagggtggggccttgactgtaattcccagataagagggaaaaatcctcacactttgttatacttattccccggataagtctttgaaccttcatgaagcttagttattgtacaccagctaagttccttttctttctttaaatagatgcattatagatgtacatagctttggggtacatgtgataatttaatatattcatataatttgtaaagatccaatctgttgtgtactgtttcttaaaggatctctgcaggtctatgtcatatggaaatgctcaactgagtccattctgtttcatcttaagcaagaaatcaaggtttcccattacaaatgagatgcccaagcccctcacctcctttttatggggcttaccgtgaatgtcttgaactgtttcttcaccatttagaatcactcttcactgcctttttaaaaatttcyttttcttcttgcttaggaagctcgtggtcagatcaacacacctcctagctaagcagactccaaatggggaatgatgaatgatgcccctctggctaggtacccccaactttgattctcttkgggcctccctcttcttcaggggagggaagaatccccattctcaataggtttttcttgctcccaattttcccttcatgttcgccaaggtgaagggcaattatagtgggggcgctggattgccagtcagactcttcccccagccctgctgagggccatatgtccaggggctctcccaactcatgcagcatactcagaagctgcatctccagccttggactgaaactataattctggcataaaatcccactgagcattctgttacaaaaggaaagaaccaattaagaagccagaagattgctcctcgtgtatcaggtgtcaaggtttataacttataagtagtccaaaaaattctctttggacttttaaaacagagatgcaatatggaaaattaagttcagatttaatgaacatttattgagtaccaactgtatgcaagcacagtgctagatgctttaatgcagattttatcagtcaatttaaccctagatcagctccatttttgagacaataatgatagtattttcagtaatagagttgctatttattttgtgtctgccatatgccaggcactattttcagcactctacacagtcttatcatttaacattcgcaaatgcaaaatgaagaagatattattatacttattttacaaagaaacaggctgtgaacaattatttacctaagggcagttaggcagtcagtaatgcccagagctagcatttaatgaatgcttactatgcatcagctcctcttttaaggatgtttgtggatgttaagatcatcattttcttgatggagaaactgagccacaaagagcttaaggaccttggttagggttacatagttagaaaatggtctgtctggctctgggactcgcaaacttccttactgtgctgaacctttgtggtaagatccacatttgcattcagggcttcaagtcaaagcctgatagtcccttatattgcagtgtcttactgcaaaggaatgaatcgcaaatgataaaatttcattttgtataggtgaattaacactttattctattttgatattgttaaaatcaaaggctgtttgtatcacccattcctcaagagccgtacaaataaagcagtgaggaaggaggatgtctctttttttcctctctctgcctgacatctctgattcatcccagtggcttagcttgagaaggaggcagggaaaagagggggaaggaggatgtctctttttttcctttttctgcctaacatctctgattcatcccagtggcttagctttaggattctttgctctcttaactatctagctctcacagcccacttgcttaattcccccttttatctgtaagaggtggaagcctagaaaagatgccagccataccatagtaagggagactatggcctgtacaactgagaaacaggagtggagcaatgaatcgtgtggagacttctgcgcacccaaaaagggaagtgattctttcatttctctccattgctgaaatctccatggactttcctttcggctacagtcactgtctctgaagtggaatctatgtgataatgttttgagttattgagagagaatccaatgtgtattttttttattaaaataattcacttgttgccttatgcaagtgtattaatcaaacataaargtcttatcagtttcatttcctagagataaataatgttaacattttgatgtctattcttccagatgttttcctatttagagtataattcattatttaaactgggatacctgagataaaatgccataattatgccgggacaacaggcacaaactaagactatttccaacaaactgrgatatataatctccttactgtgtatgaatttttacagctgtgtctacagaaatatctagatacactcaacatgtgttatacatggtgatgcacaacctctaagatgggtcccagtgatccccactcctggtattcatgcccttgtgtcatctgtctccgagtggaggctgcgtttagtgactcactactagaatagaataggatactatggaagagatggcacgccacttcagagattaggttatgaaaagaccatggcttccattttgagtgccctcgttctctccctatgggatcactcgctctgggggaaaccagctgccatgctatgaggccactcaggcagtctatggagagacccttgtgcgaaaaaactgcagttctggttgatagccagtgaggaactgaggccrccaacaaccacgtaagtgaactaggaagcgtatcctttagcttccgatgaccgcagccccagcagacagcttgactacacttcatgagagaccttgagctagagccctccagctgagatactcctggctctcataaactgtgtgagaaagtaagtcttggctgttttaagctgctaagtttgtggtaatttgttatatcataatagataacccatccacatttattaaataaaaaatcaaatcacgtaataaattgtttttaacaatatcctctttcccacccacaacgtctatcagtagataccccacttagtatgtgtaggacaaagcaatactgttttattttttaaagtagataaaatgtaaaatgattttagagttgaccataatgtttctcctttyctttttttaaataaaaaaaatgccttaaaaatccttggaaacatgttttttgctcctgcaattatctccacagagtagcttcttaaaggaaagatttctgggtcatgagacagcacatttagatttacactgatatttatgaattgtgttccaattgaagtcatctgttttgtgaccaagagtgtatgagaaagcctgtttttttttcccgatactgaatgttatcaactttaaacaattttgccaatatataggtgaaaaattataattgtattgatgagtgagactcagctctcttttcctgcgaggggcacattcatgtgtcttagccactttcttcttgggtggttcatcttttcttttttgatactaagtgttctttatttgttaagggaatgtagtagacgtttttgtcacatctgttgcaaatatttttctcartttgtcttatgactgcttacgtttatgtttgaattttttttccataacgactttaaaaattatcaggcaatcaacctcatcagttttttcttttatagcttttgagccttcgagtcatgaatcgtgcagcccaaaacattttcatctggtatttttatgatttaactttttgcatgtaaatttgagatctatctgtgatttgttttagtatagtgaggtagagatccaactttttccacaagatgttactgaaacaaaaacaaaaacaaaaattcacctctccccactaatttgtaatgccaagtccatccattctagataatccaatatgtgtgggtctatttcagaagtcccacttttcttccatagttgtgtctcacttgttcttttctaaagccataccatagctttatagtacattttaatatatgctgggccaatcactgtttctttgtcagaattttctgtgctattgtgtcatatttttctctcagatacaattaagattgttttgcaagttcaaatgattcttgttgagattttttatttgaatttcactcatttatatgttattattaagaactgaaacttcttgtttaagaatatttacttgtatatttaattcttattttattttcctaaacagagtatttagtttttttagaattctatcttttttaaatatttaatttaattttattttaagttctgggctacatgtacaggatgtgcaggtttgttacacaggtaaacgtgtgccatagtggtttgctgtacctatcaacccatcatctaagttttaagcccctcaggcattatctgtttatcccgatggacttttgactctaagaacaatgatttcaccatacagcattgcctgtctgtgaggggaattttttttttttttttttttacattaaggggtttgtgaatgtgaatttatttgcttgccctaactactcttatctcttctggattgttcagaggtgtttagttccctcattacttcaaggtttgctgctgcatattctcctcttgcccttcactataggttctcggtttgaaaggaaacacagctcactgtgagatgcttaaatcaaaagaatctggtttctggaaatgtcattattttaggagggagcacgggaggtagagaaggaaaatagtttagattcttgtggggaaatggaaagcaagaggaaaaatagatgttctgctcagaaaggaaacttctctaggttttaaaaatcagtacgtgttaattttgctatattttctctagcagtgggattactgcatgaatcttactgggagaaagaacggttgctctaaaccaagtcctctgtcagtgaagcacaggtctgtgatgggtggttgggatggggatgaataaggagtaggaaaaatgacagaaatagacgcttcttatttgcaagtgatagaatttacaactctgtttagcactttttttttttaaattcaacgagtcattattgagtttctactatgaggacagcttcaagggagaatataaagaaagtgtaaggcatagtctctgatctccaggtaattgtaactagtgggtcagacaattaaatgctggtacttggtagcagagaggagtgctgaacttaatcttgagggtgagtgggatttgaattggcagagaaacagtcatgcatattctgagcctgagaaaaatctgagaaatggtttttggttgagagttagctgaatggttggtttgagcagcattatgtgagtgggagaaatgaaagaaaaccttgggcggttaggatgagcttcagttggagtttgagagttatcgtcagctctggagtatgtaagtaacatggtaactgtgattaggagcatgaatctgggagaagtacgcctggagccagggatgtgagttaagaaacagtcatgccgagagcccagtctagagtacaaacaatgggaatggcatagaatgggcagatctaacagacacaacagaaaatcctccagaataaggaaatgattttgtaaagtttgtggaagagaaggaagatacacaattcaatactggacaggtttgacactacttgggtcctcttgctctatatcatggaatgtggaccagaactgagttttcttctgctaattgagccagttattccatttttttctttaaatttttctttaaattgttagataggattcttgttgtgttcctgtaggttttatcagttatgcactgaattgtcttcaagtgatcctcccagtagatgctctggtgactgaaaagttaaagctatcaccatgatggcatacgttgaggaggaggttaaacactgtgttaggaggcatactggctggctttcttctctctgggttaacatattttggccttgtgggataatcatgtttgagagttctttgatggctaaaaacataccgtgaagggtagtactagtgagcatggaggaaggagggggagagtgcagggtttcatgtagccatgttgtcagtttctctgtcctgtcccattttgcagcagctgtttgtacatgtggtgggattaagctagcaggagtctggatggatggggaaaacagcttccttgacatccttaattgcctcctttatccctcctcagacaaagcaactcacggttttaaggaccacaaaatgcttattccaaatgcaccccttaccctacaacaaacccaaacatagacacacctacatggaacaaatgcaaccaaaatattttttaaagagatagacattttaaagaatgaaaatttctacatttgcattatgagcaaataccagggcataagttgaacatatctgctggtgtcaggtatctggacactgattggtcagtccatatggcctggggcaccttcctgctggcaacacatgctcatggctccatagacattcctggcatgttccagatatagcagtacctgtgtgaaagttaaaatcattagcgtaaaaattggtaaattggctttatgcataaattcatcaatatgagtgcaattaagtatacgttccagtgattcttttttgttgttgaacatcgagggtatccagcttagttgtctagattcactgaaataggtgacatttgtggacaaatgtttatccaggccctttggcacaggctagaatcctcttgcttctcattttgagtgtatttggccattatcccattttctatgcctcatggtttctgtgtggagataactcctccaacatttgttctgttcctttcctatttccttcattggcaaaactcaagtgtgtttatttggtagcttgactgcgctgagctttcttgcccttttatcttacctgtttttactgttgttgaaaaaaaatgaacttaaataatactactgctgctaatgcctaagtggttgagaaatgtgacagtttccatgcaaaggggtttatatgtatgagctttattagttctctctactaatgtatgagggaggtactatttaatttctattgtgcagttgcgaaaactaaggcttagagaggctatggaacatactcaaggtctcatatgtagtaggagatagggccagaattcacatttggtatggcctgcctccatgagctcggactctaccagcgcatttatagatgattcatatttaaactgtaaattttacagatatgtctcaaatttaaaagttattccaaaattatggcataaaatatcaatgtaaattatcatctctgtataccaaagggttagaccagtaattcacaagaaatgaaagttttttgctaagctaactaaaagttctgattaaaacttttagaagacttcggcattgaaaagaatatggtatactcagtttagtaaagttttgcttgtgtccatcgggaccactttaatgcttttagkaatttaaataccaaattatttttacaaatttattgkttttttttttttttcatttccgtgacgcccctacttggttgccacaccaaatacaaacaatctgcttttgcttaatccagcaatgactaatttatatttaccaacaagagcaatagcaattgaaaatcgtagccaagtccccataacactaatgatgcactgaaaaaacatgtcttttccgacaattgtgggaatttccaaaccgtgcatgtgtctgtgcacaaaggaagcattgttctgttgccaactgctgctcagcagccaggcttctttggagaatgttgaatgagaatccttggtaaactctcacatgtggcagttctggtgtttgaatactgaattttaataactcttaaaattaacttagtagattgctactaggtggtcctccatcacaaataaaaatcaaagtctggggaaagatgtgccattcatttattagaacctaagaagtgtcttttggttttcttcacttcatgtcctattctaggaccctggtaggcagtatcctggccaaaggtgatccaggagaaagagccaggaggggagattttaacagctggttagtttatacgtttatttagaggagagggagggttttattaaygttaaccctctacctttggggcaacacactagaatttatggggaacatcatcagctcatctcagttgtggtttatgtacccacaaagcctggtaggttgggtgcttatcagcatcaacattttagaaaggagcaccagagaaaaagtgtaggggacttgcccactgactaattcctcaattttgacagtcaccttcatcctttttgactatgggatgaagcctaaatttcctagccagccatttaaagtcctttgcaatggaggtcttgcctactttatgcaattaatctcctacataaactattattgtttatttgcttgctgtgtgtactctgctgattgatcgtgccaagtactggtgattctgttgatgcatcatgcacagtttcccaaatttaggatttaatgggctagagaattgccaaataaataaaaacatgaatagtgttgatgattttgtattacagcaataaggaaattataaaataccaccatttcattgaagcctttatatgttaacattttaaaaagtagaaaggacatcatctcagaataaagaccactaattaaaataaactatgaaaacctcacacattgcctatattttcctcattttgccagagacaattgaagaaatagctgtggactggcactggcctgtggtgtttgggaatgatgttgcttagccttttgcttgtctgaataaatccttctagtccttcgattctcagtttacaccttgaccttagaaattcttctatccccctctacctgctgtcttgcaccccacccacccttccaattatctctctaggtggcagtctgtgtgtcctcttccaagtactgataagatgtgctgggataatttgctgctgtctcttgccacaagaccatgagattcttatggacagaaactgcatcttattcaccttcattcccaaagtttagcacgtagtctttgacacacactcagtgcataataagtagtaggtgaatgaatgaatgagtgattacctggatgccctgcctgttctttgtgttttgcatgtcttctgtgacctgcagttttgagcacatgggatttattgaaacaaacactaatattcattaaattgaattaacttatgggttttgacctcatcagttcttctatttttctttgctgaagaaaactaattatgttctccattatcagagtgtctgggaacagtctgcagctgctgtctgaaacacttacaggggctataatgcgtgtctcagctcttctgktcagcttgtgtttttctttagtcaattcattttgggttgccatgttgatttatcatatttttatttatttttatgggaaaaggaatgtacgatattgtaagacatgctatctagtgagtgtagagaaaagtcagcattttttgtagtctgatttttctaaatccaccgaggcgtatatgctttgcttttatgttgttattgtttcttttttaaaaaccacacttgtatttgccttaaacattttttgaaatcaaaacaacatatccagaaagcatagatgcagcttctcttaagattcagtggtgatctgagctgtctcatttggggacatatggtctctaggcaatcgagttactgtattgagcattttcccagctcacaagatgactgtgacgagttattgcactgactcttgctcagtcacagggggaacctgccactttgtctttagcacagacaggccccttatagacacaaggttgtgcagccactagagacctgggcttcagctgggcttggatctatgccttgaaagaaacagatcytctttttgaaactctcttgcyttccttctcctagtgttttattcttttgttaatgaaaataacccatattcatagagtcagaataacaattattgatgggcacttcctatgtactaggtactttatacaccttatttataagcctttcatttgtaatcagctaattttgtccttattttataaatgagaaaactgaagaccagagagttgtatttgaccgatgccatagagcagtaagtggtagcatcaaagctgtgtaatctccaagcctctgttttttccatcacatcagtctggcttccttcttttataacctggatcatagctgtgtcattttgtgcagctgcttaactcttgtaaagataaataaaagtacctaattcataggattgttttgagaatgaaatgaaggtaatatatatgaaaggacatggcatagcatctgtgcatagtaagaacgaaatatattttttaaatttcttcttctttttcctgtaggccctcctttcttcactgatccagacctacctttctactgccaactaaagaatgatgagattcaaaaatttggaaaggagagctttatttctcataaagtgttgcagcctgaaagtggccattcttctaggyttggaagcatagcctcccaccagaagccagaaacagatactttgagagaggggcaaagggatcaagaatttatactgagcagagtggccaaatctacatattcaataagctacagaaagactcatgaatattaatgaaaggagaaacatgtacatgtacaattgagcttcatgccccttcttgggtctcatgtgcaaaaagcagtggtgttagcatgatctgagggtggagtgtttggccctctgatgtcaaaaggtgaagcrgaggacacaaagacccttactgtgcattctccatagactggccaaaaccactctgtagtcggtggtgtctcatcaggcaaaaaggaggggcagcgtcagatggatgttggacatcagtggtggagttctttgaaagggccggtttctctttagtctttagggaagaaaagctaatggtagttagcgagggaggaggtctagcaaggtgtgtccaacttcctatccctcgtcatggccaagaacttagttttcaagattatcttggggtccccttcgccaggagagtgtccattcagttgcttggggggcttaggatttcatttttagtttacaatactttagacatctcctgatggtccatcgtaggtctgttctcttttgtatctcttttagagatattagttttcttgggatggatataaggaatgtggctgtgactcaatccttcattatgattagaataataaatgctgaggatcaaggtgtaagccttgggacaatcatatttaggtgatgggaggaaaaagtgctgttttatcaggggagagagaaaaagcacttagagaggagttgatgatatgtaggatgtgagactgccgtggatatcagggaagggagacttataagaaggagaaatttggtcaactgtgtcaaatgcttcagcgatcaggatgagtaatgaggaacggccatttgatttgatttgatcattcagatatctttaaagacctttaagagggcagtttcagtagaggtaatggactggaggaaagtaataaggatggtgaagaaatagaggcggtaattattttgagatatttggtttgtcaaaatcagagagattttatcatatcttgaagagatgtcatatttgaaagaatttttctttaatttagttgagaaataagtatttttatgggcaaaaattaaagatctagttaagaaggagattttgaagatgtcagagagcagagataattgataggtaagtgtgtaccgattttgaagaaaggctgagaatctaatgtcaagatcacactgagaaaactgttaatagtatttttctttgtatggttatgttcttttttaacttttaatttcttctttgttatcttttatatcttctagattttctataacaagcatctataactttcaaatttttaatagctcttaaaagttaagcagatttaaaatgataaaacatgttcatgacactaagaaactataaaaacatataagatgaaaattataacttcccacatgccctaatattttatttccatttctttaaagcaaccaccatcaaaaatttacttggtaatctgggtgtggtggcacatgcctgtagtcccagttactcaggaggctgaggcgggagtatcacttgagcccaggaatttgagacaagcctgggcaacatattgtgacctctcatctcaaaataaatttttttttcttggtagcccttcagtaattttttatacacgtatgttttaaaatcagaaaactgtattgaaaactcattagtaaagaagttaagcttgaaaaggataataccacctggcttatgattttctgatccctcttgaaagactaataacatgagaagagaagaatgtaaataggcataaacttgtaagaatgaagatagtggaagagaagaaaatagcagacgaaagacatcaacaaaatattaggaggtgaaaaacagatggcctagtgatatctgattaggagagtacagaaatctacaacttcagtactcacaacacgggaagcagtaaaaggaagtcagttctgttgcaaattcagtgctgatgtcactaaaaccaggaagatgggctggaagtgtgtctgctctccccctacccacaggtgcaaggagttgccctttcccatctgttagaagactggagatgaaacagrgaggcactggacttgggacattagctgaagacaggaaaggtcgtatcctgaagagagagacctcagaccatcttatcacccggctggcagaatgttagcaactaggcttaaaccataccaagatattggagggtttctttctggggagattgactaggccaagagaaaagactgctgttatgtggagactgacatttgtgaaatggctgagtccccgtggatcaacctctgatgaagcccagcgcttggtaattaccacccaagcataaagatctttcagtcagctgtgtagtgcctcattctcaaatgtaaatggacagctatggatcagtaaatatttctagaaagcctctcacataaaaaaacagagaccaaacaaagcattagaaaaaacacagaaaacagacaagcaggaggcagaagaatacasaacaaatgatatagttatgatccttccaaagaaaatatactgctttcacaaagggtaggaatctgtgcaaatagaaccytttgaagccaagaaagactttttgttcttaaaaaatgtgatagtagaaattaaaacatcaacaaatggattagcaaaataatgtttaggaaatcactcctgaaaggacagaaaggaaaaaaagtgataaaaatgtgagaagtatggataataggagttccagggagagaaatataaaagagagggcagaagttattaaagaaacaataaaaggctgtttccagagctgaaggacctgttttctggttgcaagggaacaccaagtgtccagcacaatgaatataaaaagacatatccaaggcatattagtgacatttcagaatccttaagttaacatcttacaaacatttaaagaagaaaaatcattataataaaatggttacttctaagaatgatgtcagattactgaatagaaacactgaaagtcagaaaacaatgaataatggcttcaaaatctaagggaaattatttctaaacattctggaattttgttacccagccaaactaggaagtggtttcaacatccaaagcctcaaaaattgtactttgcttgtaccctttctcaagaaagaaatagattgtaagctattccaaaatgagggcatactaaaaaaaagaaagaaagaataaggtgtgaaccctgaatatgtgagacaggtctcagttaacttagaaagttgattttgccaagattgaggacgtgcccatgacacagcctcaggaggtcctgacgacatgtgcccaaggtggtcagagcacagcttggttttatacattttagggagacataagacatcaatcaacatatgtaagatgtaaattggttccatccagaaaggcaggagaactcaagcagggaaggggcttccaggtcacaggtaggtgaaagacagtgaaaaagatatgacctaactgattccatcttgcttctaacctccaagctgtctttgttcattcctggactttcggaggaacttagtttatagtttagttttgaaacaaagatgatgatagtcctttcccaaaacaaaccttcttactgcctgtggactagactgcccaaaaccacaagattagaagttatggtaattttactaaataattcaagatgtagctattttcattaaaccaatattaatgtcttatttattaaaaattacccaagcaaagatcattctgttttgggctgggtttatagttaggtaaccccaatgccaaattttgacaccttatagaatttgccagggataagtatgagattgcttggtcaataaatgcaaacaaaaatgtatgctaggctgggcatggtggctcaygcctgtaatcccagcactttgggaggccgaggcaggtgggtcacctgaggtcaggagttcgaggacagcctgaccaacatggtgaaaccctgtctctactaaaaatacaaaaattatctgggcatagtagtgggcgcctgtgatcccagctacttgggaggctgaggcaggagaatagcttgaagccgggaagtggaggttacagtgagctgagagcacgccattgcactccagcctgggagacagagcaaaactccatctcaaaaaaaaaaaaaaaaaaagtatgctggaaattcttaagacaattctaatattaccgtacctgtaattttaaagctagcttatttattaaagattctacttaagtcatgtacacttgaaaaagcatttgactagtctatccttttttctgataaaatgtttgatttaagcacttttatttttctttaagcccattcattagagctcttttatatatttttagcagtgmaacattgtgtacacagcacataaataaagagatatattaggcataccgatagaagtacatttatagattcctaagacctcttcttttgtgtttttcctatcttagacttgcaaactcttgataatctgtttcatcactctggcagttgtcagctaaatagccctaaatctgcatattgaaggaaacaactcttagtgaaaaatcagatagcaaaatttacatctcaaggtactgaaagaaaaagtctggtagagctggagagagattaaagatggatgtcaagcacaaaattatacaaatctaccataggactgtaagaggagaccagttttatttagatagggactacttgtcttttaactggatctgagctctgggcagagcccacattgaatcctgggtctccaaaaaaggagaattattatgaggctagaccatgtgatgcttttacagtgcactttaaaaaaggtttttttaaacaaagacttttctgagtgtctaaactacactctccctaaaaaccygagagtagcctctgttgcaataattattttagtcaataaatcagataacaaaatacaaaagcaaatagtttaagagttgagatgaactggtctgtttatgctcttgggattccataaggaaaaaccggtttctcccccaaagggagtctggcactttctctgttttctttaaggctgttataaactattttaggttcctcattcagcagagggtgcaagagaaagaagagacagaagaagtaaatgaagaaaacagaattcagtcaactgagaagaaaaaaacttttgctcaaaaaaaaaaaaaaaaaaagaaaaagaaaaagacaaggtcctaggagaaaaaaaatgccaacatgaaggccttttaaatacaaacacatagacacacatgcatacatttttggatgttagcttgtaattaagctgacttttaaccactgagctccttaaaaaaaatcttttwaaatcttatgaccrtagttcagctggaacaaattgctgttattttagaagtaccaagtatcaaaccagaaagggcttgatttaggaaacaaacccaggctattgtggtggaaaaaaagatggcagaacccttagctatggaacagcagcgtgagrcgacagccattgctcttttggttggcctgactagcaaaaaggtggccttgttatgtaaataaagccttttaagtagtcaaaaatgaaagtcttttctgttttttgctgttcgtttttctccctgtaccacaccacttttgtgtgtgtgtgtgtgtgtgtgtgtgtgtgtgtgtgtgtgtggcagggtggtggtggtggtggcggggcggatttagccacttcagaggccttttcccataatttggaactttccttctaatttgattaagtcggatggagttgatcaaacccaatgggaaaaagacggaaacaaccacaaaaacagaaacaaacaacaaaaacaacaacaacaaaaaaagttaagcaaaacaaacaaaaaacagttaagcaaaacaaaacaaacagttaagcaaaacaacttatacaactattgagcattctaatgataaggagcaattaaaaccagctggttgttaatcttaactttagccaaaaacaaaccccgattcagttacttacctaggaatgggtctcaggctgaagactgctctctaccatcctagaagcaggaaaaatctcaaattcatcttccctgttggaagagagttcagacwtcataaaatagttacctctgccttccattgccaaggaagcaggaaacctgctttccctgtgtgggaagcaagccaaattccaaaaaaaaaaaggagttgtatggcaatataaactttagatcttgacctaattttgggagatcagggattctctggagggggctctttcaggcttcagcaaattgtcctaatggcctgagccttaaagctacctctagctggtaccaagcaccaacagaagatttggcaaaggtcagaggcacctccacttagaatctctttgtggttaccaaaatgtgaaccctgaatatctgagacaggtttcatttaattcagaaagtttattttgtcaaagttgagcacgtgtgtccatgacacagcctcaggaattcctgacaacatgtgcccaaggtggttggggcacagcttggttttatacacattttagggagacataagacatccattgatatatgtaagatgtacattggttccatcaagaaaggtgggacagctcaagcagggagggggcttcaggtcacaggtaggtgagagacaaatggttgcaccctttttgagttctgattagcctttccaagggtgtcaatcagacatgcatttatctcagtgaggggagggatgactttgaatagaatgggaggcagctttgccctaagcagttcccagcttgacttttccctttagcttagtaatttttagggccccaggatttattttcctttgacattttcccccttttcttttctaaaatttttggagaaaacattttacaagaaaattagcctttggtctcaggttttatctgatctctcatgtctgggatggtttattcctatataggtaggtcccgagttattaggaaagctcatttttagcaggttgagaagtctcatgctctatgaagagaaaataggggaggaagggagaaaaacaataacaaaagaacaatcctggaaaattggtataggccacattactctgaagtccatacatcagtaggcaggtatgaaagtggcttatgtgtgtaaataggttgctgttattttcttctgaagtttatttaagttgtctaaattcagttagcagggctttaagaaagcaaaggttagtttttagtgatttcaaattaggaaaattggggggaaaaaggaaaagaaagaaaaaaatcgaaaacatcatttttggatacttgcagccaggaaaaattagaattcagtctaaacttagaaaataataaaaattgaaaaaccttaggcaaaactggaatctaacatcagrtgtactatagtttttgaaacataatttttctgtctccagtttcctatttttactaaagacaaatcatggtaggactgatttgctttattatattgcccagattatttgtataaagtacagcaagaataattatctttcacataggctttttatattggctttgatggaactttgttccataaaaggaatctcagataagatttttttaaagctgagcccagccatggatttgtaccatcaaatacctatgagttggatgaattactctcttcttgaggttccaaggtattaaaaggctggggctcctgagcctgccagaaagtgacattctttacttaacacaggtcaggaaccctgtacaggaactgcatagacaaggtatgaggccagctttcccaaaaggcttttattggctttctaagccaacttcgattccttaaaggaaagcacaccatgccagtcaaagccgtggtaaaataatcagtttctccaactgtgtcctgttacaaatgaaaacatattcttattgaacttatgcaaataactatattgccataagttaagaatattcacaaatagtttctgaattctggagaaatcaggtggagagaaataaatatgctccaaattttatttataggagtatacttaattgttaaaagytgtcaatagctcaaaaaaaaagtttcctttactctgaaaaacaaaacaaaggatcagcaacattttaagcaaaaagtcaaaaatattactccagtcttctattagtttagtctgtgcagttaatacctattctgcttgatattcataaacatttcagctctccatgggtcctgaaagttttaccactattctgatgtcacaatctccagagttatcagacaccttcattcaagagcacttgttagagttttacagctgattataaaaccaccttctaaggaggatcaaaacaagacaataattgtccatggatgacaaaaagttttagggcagccatagtcaaagacrcaattgacaaagaaatttattacctctgtggcacacaataatttattataacaattataattattactgaaaatgtacactaagtcatatcagaatgatargagtgtctcataattttggaacacataccaataacatatttatacaaatacaacccaaagaaaaccaaacaccatttcagatttgacgatgcttcctatataatttttataccaaatacgtcaaatatgtcaactttggactttaggaagcctaacatcttaaaggattaattaagtcagaaaaatacaaaatttataatttgattttgagaagtttgtcaaatatcaaaggttaagacatttgctatcacaaaattggatcacaagtcattgtaaaataagtcattcacttaaacaaaatgataactcaaggatttcaacaaaaggcaaaaaccttcagtcttcgagagaggagacttagttttccaaacaataagccctaataaaaacagcacgaagccaatgaaacttgtttttcaaaattttataaacaatctataaaattgtaatcttgaccatgagatataacttcaataagccttttataacctttctaagttttattaaagagtcagttaatgcttcaagaaaaccttgctaatctgatacaggggcccatatgttggtcttgcattagtgtgcctttgacgttaatggttaatttactgaggaattgaacttatttcatctctcaatattggccttacaatctcacatacccacctcttctgcaatagtccctggaccttgaggagttgaatagctttaatttctggccttgtgtctcaggaatgcagtttattttggattggcattttatagtgggcctggagatgaggctttaattgctttcagtttttaagatttagcaggacttggtgtcctttttagacccaggagtcaaagccctgtaactcaatttcacgaggactttaaaagcacataaagatacacagatgtaataaccttaattaaaaaataattcttttaaatcttagttttatttctaagcaaaccaaaacttaataataatggcataggaataattttgataaaatgtaaaatctgttaggcctgttaccaaaaggcaaaagaaaagactttctgtagtgcacagaatatattatgttggaagaaatcatttccttcagacctttaagaaaacattgttagcatcaggccacaacaaacagaacttgaggggaaaaaccttatatgagctgaaaatgagttgaaggagagtgtcagtattttgtggcttttaaaaggggagagaaaactgaaaatggccagatgcaataaaagttgaactttgggttaaaaaaattaaaatctcctataatttgttaagagtaagtcaatcccttaagaaaattttattgttctaatcaattttttagtgtattagtgttcttttacatcaaacccaatctctagaaagaccattataatttccctttaattatagacaacttgatcatataaaaatttttttaataaatcatcttattggatttatactctatacattttttaatacagcctcttattggacttacacagactattcatgacatgcttggactttctggtttgtcctgaacatccctctttcataaacaaccagaccttttattctaagactaaatttactatataagattccttctcatataaaatgatttctctttaagctttcttaccagaaaatacctctttatttctataactttctttacatctgtcttatttcctggttctttttaccttgttttatatacaacagttaaataagctttgaattagacaaaaattgttcacctctttaaaaaggacactttttttagaaagaatgttttcctacaatatatttttattggaaaatacccaaataatgaaatatctattatttaatctaatataccttcagattctaaattatgacaagtttgtctacaagtatttatcccattacatttacctcattatcttctcagcaaactgaaaaaaaaactccatttcgtttctcattttccttcccttttgccagttgtcgcttctttattcactccttgtcaaatgattcattccgtctacatttgtaatatcctttattttctcaatgcttccaagtttaaaaaaaaatctctacttttgtttttgtttctaagcctatgcttctccttaactgttgctttcaagtctctcaatacctttgcacttttctatcaagatggccagtgatattcacaaaacaatattaagtacaaatgcagtgaacacagcaacaagttgagggataatgggtggatgaggtggcagtgcctgcctgactgttttcacaatatgttggtgtggagctgagttgacccactggaagtagaaaatagctttgtttatgtctatgatcatttatagggctgatgtttaaaaagaattacctttatgtgatataaatagcttacttcctcatgatttgacttgatatagagaaagaatattgagagtaggaaaaaaccatgcacaaactccactcaacaacaatcaacacagacttctgtgaccaaatgtgtggggatttctccctaccaataagaaagcaattgattctgtggtggacccagctgggtgtcttccaattcaatttcaacactgtctacctagagatagagtcatatcccacaggatgagggtttagtccctgagactgcccccgactttagatgccagtgacaagccccaggttgttttaccagtgcatctgactgactggctataaattggggattccamaacctcctccttgggttcgattaatttgctagagcagttcacagaactcagggaaacacatttactgtttattatacaggatattatgaaggatgcagatgaagagatgcatgcagtgagatatggaggaaggggtgcagaatttccatgccctcatgaggcacatcacccttcaggaacctccaggtgttcagctatacagaagctattcaaatcctgccaatttgggtttttatggaggctccattatgtaggcatgattgattaaaccattagccactggtgatcaacttaaacttcagccaccctttcctccccacagtttggggaatgcagcttaaagttctaatcctgtaatcccgctttggccttttaaatgatcagcccccatcctgaatctacctaggggtctctagccaccagtcaactcattagcatacaaaaagacatcatttttgagtttccgaggattttaagacttgtatgccaggaaacggggtcaaagagcaaatttatatttyataatttcacaaatataaagattctagctcccagaataagattcagctagcatgttccttaatggaaastggatgacagtcagttaaaggttgttgacaacctgaaatgctgatattctgtgctgagtaaagagagacccatatgttttagacaagcaggtggcacagttaatactctgtaaagaaagttgggaatctttgacttgtgtttacacggaattccattctgtraaaatggttcatagcacaaagccaaagtttttctcagaaaataattttgaatcttacccacagaaataccagaagtgtatgccatgaatcatgaaagagacaattaggatctggaaaaatttcaggacagacgctactgtccagtcctgtatctagtaggcagtgcagctgggatgagtccatggagctgactccagggtcttaccctctgaaatatgtcacttcccttatcatcttaatgtttgctggttcagttccctgacttaaaaaatctgtataattcagaaatttataatgctgtttctgtatcttttttctcttcctttaatttgctttgcctttcacaaacttctccccatctttcacagacataatctcagatctaggtgtcattacaacaagaaagaaaaagtgtttctgaatggagttcttatatctattatataatgtctggcctccccagtgctattcaggagcaccgtgggccatgattggataaagacatccccgctgcatcccaccctgctgtgtaaacacgtatattcgagaaatggttcaattataagtcactgcctgcagtttggagcatctgctacttgcgcacatgtctaaaagcccagtggagtataggtgttcatgtggtgactggtacttgtgatctggaccgtattttcagctgttcttacgatgactgcccaactactgcctctctctgagtggatggacctgcccacccctatgctcctgctcaagcctccagaagtgaattcattgcatctctccaaacatatgttttaaacttcagaccactgaaacacactctccagatgtgatagatacccacttccctgtttttctgtgatgccattaacagacgaacagaattttattcataaagatacgaattcatgtataacagaaatattttcttgggtgggttttctcatatctgagcatggtgttaaatgattatgaggggaatcaaaattgaagagtctaatagagggatactttgctgtggataggacagagayaagagtgagagagggtgggcttgacggggctggttagagaaaatgttagaaatatgtccaggagagaaacaggcatccactggaagattttgtgaagtttctgttgtgcagtggccccacaccctccattgcaacttctagtcaaattcaaatgtcttgctgtgcttttggagttggatttattcttgaggatctgtaagggagggcagattcttctccttttcacttagagtaagtgccgcatgcacccaaccctgtgtgagcctctcccccaatacaccagtccrtcccatgctcactttattctagattcgctggtttccttgatggcctttcagcataccaggcatgctcctctttaaggcctctgcacttgttctttgatctatctggaatgattttgaaggacagcagattatgccccccaaaacagaccactatcacacggggatgacttcaagctaaagacacttgaagaacagcagatgtgagaaggacattcttatcttccctttttcttcctgaaggcaggagattaaaaactcccaggtgaaagctgccctccatatgctaggaagaaagaaacattctttgatggggagtcatagccaagagaattctgtacaagcagactttgttaaaataaatcgtcttcctttagccttgccatagtttagttacttttccacaaatgggtctctttgttcagccttatacaaaatcaagtaggttctttttgttggttggttctgaaacagggtctcactttgttgcccaggctggagtgcagtagtgtgatcatggcttactgcaaccttgaactcctgggctcaagcaatcctccaaacagcttcccaagtagctggaaccacaggcatgcatcgccacatcaggctaattaaaaattttttttgtagaaacagggtttcaccatgttgcccaggctggtctcaaactcctgggctcaagctgtcttcccgccttggcytcctaaagtgctgggattacaggtgtgaaccacagtgcctggcctgcatgtaggttttgccatgtctttgagtcctacttttcttatgagggctcccatatcctgtaaaacttacattaaataaattttaaaacttttctcctgttaatctatcatgtatcaatttaattctcagacmcagccaggaccctacgaggagacagagagttttgactccactatactcttctttcagatattcacatggctttcttcttcacctccttcaggtctttactcaaatatcacccggtgaggactgacttagccaccctgttaaaaattgcatctttcccaattcacccaagtaaattatttattttgttttcctgatttctccattagaattagaaggcaaggtgtcccccctacctctgcccctggtttattcactgccttatcctcagtgcctagaacagcactaggcacatagaagttgctcagcaaatgtttgttgattgactgaatgagtgaggtctgaatgggtccagtcacttccagctactaaaataacaaataagtggttctcaaaagataatactagaatctttctagctgtatagatcagtaagcctgagtaggaagactgaaaataagtattcattgaaatccttcctagaaacattgatattctttaatccacataattttgtgtacttsttcaataaattataaaacaaatatgtattagaaaaaacaaatcctccttaaaatatttatatttcaaaagttccttctttcaattttctctgcccttactagagaaacacaaattacacatggcactaatctgcctttctttggaacacatttcctttatcatgcagtcatttcaaatgtgaaaaataaaatactgctaaatacaagattactttctggcttaagtagtggataagagttgtttttctctgtgtttgtagttctggcaaattatccagaagattaatctttgaaaagactttttattatatctgtagaaaacattattttgaagcaataatctaatgaaagtacttctccttcatacaatttaagagattttgatagaaaaataagatgaatacaaatctctgctctatatggagtgtgtatttcggcctattaggtcaatgatgttacctactgcagggaaccaatacagttgccccaatacctggggcaaaggtattgtctttgccccagaggcagtattatcaccacttgcctycattccccctccatgagcaagaccctgctgcttgattctcaaaacacaatattagaatctttctagctacatagactagtaggtataaacagggagactgaaaataaacattcactgaaattcttcagagcagcttctgccacttcttgttctagatcatatagaaaatatgtctgggccatcagccarcagtgacccttaaaaaaaaaaatacctgcttcaaaattgattatttcagacagatttctttaagtcaggggaaaaaattagcatatgctggcccaaactctactttcatgtgaaatctgccgcttagtttttagaataagaaacttctctgatttctatgtaggctactaggttcttcacttaaagaaaagcccccttttgttagatgcttaacttttcagcttctactctttatatggtgaacgtacaacttattattcagaaagggacatgtttgagaatagaaggagtaactattaaaaattatggccagaaaaaatttataaactgatattgtgtgaagcaaacaaagttgtattgtctctaactattaagaaggagaatgaaattacttactgaggctatataatgtgctaagtgatttatatcttttacctcaatttcaaaaccgtcctctaatagaggcttgggaacattttcagtcatgaatcaggctctgtgacattaacccaaggagtcaacaatattgtagtctaaaagaaattttaggaactcagctcaggacactttacaataaggactattgatttagctgtctgcaggaaatgcattagatacacattttggctgaaagccaaatgttaaaatcaataattgacaagtcagatatcattagaataggaagaactttggggagacaagattaaatttgaaaccttaccaaacattttcaaagtcaacatttggatgtttgacaatatagtgaaggaaaaataatttctcagcaccatccactggtggattattcctgtagtctctgtgctgcgtgtctgcagtcctacagacatgcctactttaaccagactaacatttagcatacagtggcaggaaatgggattcgctgctcagcaaataccccaaatcctggatcttctactactgaaaatgtttgtcagtctaaagcaattattttgacaagtgtttgtttcttagtctcgaaacagacaacacagaagaaaactataaggaattgacttcttcaatttgaattttgattgtggaagcaaaatgcacattgcaattctctgctttctctaacactgtcttttttcttcctatttgttatttattcattcattcagatttattcatttattttaattatggcttttagattcagagggtacatgtgcaggtttggatatattgtgcgatgctgaggtttggggtacaaatgattcaattattcaggtagtgagcatagtacccaataggtcgtttttcagttcttttctcccattctytctcccgctgctagtgctccccaatgtgtattgttctcatctttatgtccctgtgtacccagtgtttagcttccacttataagtgagaacatgcagtatttgttttctgttcatccattaactcacctgggataatggcctccagctgcatccatgttgcaaaggacatgatttcctccttttttatggctgcataatattccatccatatatatgccacattttgtttatccaatccactgttgatgagcatctaggttttcaataaatatttattaagcacctttataatgtctcagtcagcatttcaggaaatggggatacaacagtgaacagaagatagaagtctctgcctttatggagtttatattctgggtcttagggatatagacaataaacaagactataaattaaatatatagcatataaatagttttaagtgctagagagaagaataaagcagggaagagggatatgaggaattctctattgtgattggatcaaagatgatttctcatgatattatttttggagtatttattcctcatggaactttttgagggcagatttaacatttaactttcagttcttcataacaagatgtgaagagttccaatttagcatttttttttccttgaaaatctcattgtctaaatggaattaaataactgaaaattaaatatagttcttcaaagttattttgtctaatgttttgagtgtcagtatgtaaaataattctatgaagacctgacttatttaatctcaactctgttattctgctttatattatttaaaattttataaatattcgttggcagaataattatgtggtatttttcctaaggttatattccagacacgctctgacttaatatttcctttaactgacaatttactctcctaggtagtaaataattcctcataatttttttgtacataaaactaacagctttcataataaatttattattgcagcattttcttcttgcaatattaaatattcacttacacttcacctgactgatagaatttcaacatagaaagcacataaagagattgtcactgtttacccctatattgcgtataagaattttagattgcatacttggttacaaacagtaaactctgatgacactccctgtttgtgctgctcacattgataccctgattagatatgaaggggacatgcaagatcaaatgatcatttgtcacatgcatgttcagggatgccagcactggcattgatttggatgtttgtatatctgactatttaaccttccaaaagctaagtctaaatagctacagtgtaacagtagattttggccagatactgaaactgaggtaaattcttgcccacccctcctgtctcaaattcagtcatctcttggaagggacacaaaagtatcagtcattggagtggcagcctcccaaccttcttcctgcctggtgaccaaagtgttgaacatggcatctgaaagcgtcataacaaggttcactctgatcctaggcataattaatggagtggttggattttcatccttctttgcctgttaagtgtcctcagtatctgtcttcctagtcggtaggcacagtcaacagatgagggcttcttggcttaattgatcttatgaattccattaggagggataagaacctgagtgatgttctagccagtggctcccaggcttcgtaagtatttacctttatgttgcggttatagcgtcattagctacaactattactgaagcttgaattcaaataaaaagcaattagatgtaattccagtactcaactcacacgcaactgaaacttaatgatctggcaatttgaacatgaatatgaaaaaggaattcctttagcttttttgatcctcttattttattgtctgccacaaaagaaaagcaaataatacacagcatcagcgcaaagcatgaaaaaggagataggagccaaattcgctaaaaattctaaaagctggtctatagctgtgctccagaattacctgaaggttagacggacgtgaagtccattatttaatctgacaatttcctagacatcaaaaacaacaggctgcaaatctcagatcaggaaacccttcctgcaaccctggatatgacttaatgtcctcctttttccaaacaaccacagatgtctgtgcacatctctgctgtgactttggtcacatctccctgcatacacaggaagtcacttgcttgttggtgccccttttcttgattatgttttcagaaggaagatctggttttaaattccattttatatcccaagaacctagcacagctttaggtaagaactcagtaaaaatcactactactacttctaatatgactactactattagtactgcagctggtagtactatagtactagtactattcctgtttttgctgctgctgccatatccagtgtagctggtgagctaatgaggaccccactcaggcacatgggatatgcatacacatttccacattgtggtttctttttagccaccctccagagatggtcatggcagagggaagatgtggagatctggatgaagggaaaagtttaagagtttatgacagaaaaaccactcatattgcaaatagtggtatgatcgctgtgaatttgctatacctcttggatttaaaaatatttctacacatgtgaaactttgtattttctatggcgtatttgttttcccccactaaaggtatgagtgccctagcatggtgatgctgtaggaggagatgtgaatgtgattcaacataatctaatacatattttatcaataattaagaaaacatttgctaagctaatgaacttaaacaagtctctgggtctcagcgtcagtttcactgtccataaattcagaataatgtaacctgtcttcttaggctattttgaggatgcaaagaggaaacaaatatgaaagcgatttgcaagttgccaggtactaggcaacgtaaggtgctatatggctgtgacaaattttccttctgaacctcctgtagcactttgtacagaatggcaagttcagcttggttggaggccagagccatggtcttgttggaaataagtacctgatgtgaggtacaaagacctggaagcaaagccctgccccaccgtttccctagttacgtgacctgagataaattacttgagaaaagaatattaaagtcatccagctcatgggttactgtgagaattcagtagaaaaatacctatgaaggcacctggtgtactgcggcagttggccagtgtttacacagcattttttttagggcagagaaagatacaaatgaatcaaaatggttctgagcaggtagctcgcaaagaggagaaagcctggactctgcggacctggcttcctgttctgccctgtgtggcctgagcaagtcctggaaccgctctaagcytgtttcctcagatgagaattgggaggaatcatgatgataataataataataaccatacccttaattatctcttagggttgctctgaggactaaaaaatataagatatcagcagacatgggataggaactaaaaatttagcctatcctccccccagatttagcatcgtgctggtgataatgctccttatttttaaagatagtcttaaaccatgtccaggtgttttctgttgactcaataagagcctaggatgcacttctgacaaaatgtttgcagtccagtataaaactttaccttagccaggcrtggtggcacatgcctgttatcccaaccatttgagaggctgaggcaggaggatcgcttgagcccaggagtttgaggttgcagtgactgcattccagcctgggcaatagagtgagaccctgtttcaaaaaacaaggacaacaacaacaaacaacaaagaaaacctttaccatctctggaagccaccttttgggtggcaaaacaccaataaaaatgaatgagggtggagaagaagaggaaagagaagcagctaatgagaaacggagggccagcgtaggagcaagaagagacactcggtctaccaagtttgataagatgaaagctttcttcccgagctcttctccccttgtctgccttgagcccttctcttctgtccttctttccrttgaaaccttcacgaaggcaaagccaacgaagatctcagagagtgcaaggggaggcacagtgtggcaggaagagcacctcccccgcaggctgaggaagcttgcccacaccgcggggctcctgcagctgcagccttactgactaggctgattcctggcaacaatgaggctgggacggtgtgacaataagaaggagaacacctaccacgtattgaactttcagtgtttgctctaccagtacgttctcagtgaactctcaacgaaagtctcatagggcagttctgcagccccttctctttgcccagtcatggagttagtaagctgcagaggcaggacttgaagtcaagtctcccactccaccgtcccctttcagctaaagatgtctgagcaagcgtttctgggtgaggtcattcagaagtggtttatgccagcaatttgttttattcatcttcctagaggaggaagtggtgaataagctcttttactcatgagtaagtggaatttatttctgacagattgttaattggagggtcgtataaagatttccccatagaacaaacatggcttagacttgaggggctagctggggagtagcctgcaagtcagcccagaagggtgaggttaccccagtgatgctggtgcttcagacactgagggagctgggagaaacttctgtcaaagtcatagagctcatcacggtgtcaaacacttctgagaggccaaagtgagaaccaaaaaggcccatgaggtttagcagtgagaaggtaggttgctctccagtgtctgagatcacatcattcatttcattctatttctactcaaaagattttcaagggattgttctctatcttgtcaccagttttggggagtgcactctctttagggtcactctrtgtattcccytgccatacagcttgctggaagtctcttttcactgaatttaaccacctgattgttaatgaagatagagatgcacctctgctgtagctgaatagctcaacagtctccaaagttagctatccaagtcttttctggacctggatgtttaaatcaatcagtacatctgcaactgtaatggttatttttatcttttgacatatctcacctgaatctgaayacaatctaatgaatctgatgtatttttcttaaactttttttttttttttttgctgtgaaatagtctagtcacgcattttggtggctagaagagtgaattaatagtagtctaatcaccctggagatgctatgcttctgtgagctggcactgaggtaaggyggcacatctctgtgggaatgacaagtgaatgaawctgctcctcatttaacctgctgttcttttctctctctctgttttctctcctaggaaacaaatggaagactgctgcgaccctgcccatctctttgctatgactaaaatgaaytcccctatggggaagagcatgtggtatgacggggagtttttatactcattcaccattgacaattcaacttactctctcttcccacaggttagtatagagttggttgccttcagtatggtttcttaaatttcttgctgtcatagaaaagggataattgagtttgccttactcatcagattgactttttgttttctttcttctctctttaaatgtttttctttatatctgtcayctgtgtgtgtgaataaatcacartgttttgatgcaagggtggaagcaggatgttacagagttacagttttcctagcctttctgatttgagtcctatgagactgaaggaagcaagaaatgaatgatcagggacttgtggaattctagtgttcygaggttggctgtggaatgaccatgaggatttgtgtgatactggaatgttttcttaggactgatgttgctcagggagtggggaccatatggtgagaagtttgcttcttagagctcttgaatgttaaccctgtggttagattaccactgtgaaatggaggagtggtggatatggagaggaataattcaacttgaccacttttgaagtggtctaaatcaagctttgcttacttaatatttattcttggttttctgggcattgaaataaaatgtttttctaatatacatgtaggcagcaagaggggggaaaagggaaattttmttttagggaaccctagttttggggaggggagatcttaggcaaaattgcaattagggaaaaattcagaaatgaatcatggcctccccaagacatcttttagccacccttggtttgctcagatgattgtacagaaagagaatttttragccttagaaagtgggactgaatctttcatgtgtctctgttaatagcccatgagactttaaaggaggaatcccacaaagctgaggcacaggttctaccagatccaaagtcacactctctataaaacagccatgctgactagctcatccttagatattttagtctagtttaatggtcttaaaatgcagtgataaggtttttcttttaatttttgaaataagaagtagaagctttagtttattgccagcatctacatgttttctctcttcatctgcccttgggaggcttccargtgtcaaaggaaataactaagagctatgatatatggaactgaattttgtctccatctcttactaactaaattccttggatgattacctaagtcgtctgagatttagctgtcttgtctctatgatggctagagcagcacttgccctatttaccttacagagctgtggaaaagatcaacttagataatgcatggaaatgtcctttttttttttttttttttgtttttgacagagtcttacttactctgttgcctgggcttgagtgcagtagcatgatcttgggtcactgcaacctccacctttcaggttcaagcagttctcctgcctcagcctcctgagtagctgggatcacagacatgtgccaccatacccagctgttttgtatttttagtagagaccatgtttcaccgtgctggccaggctggtctcgaactccggacctcaagtgatctgcccacctcggcctcccaaagtgctgggattacaggcgtgagccaccgcgcccgactgtaaaacataataaatgtactttataaatacaaagcattatatgtttggtattaatgtgctgattcatacttagtatcttgaggctgaggcatgaaaagyagaattgtattggtgagggtttaggcaaggtacagaaatctctttaggtacttttagcagaaagatatttcatatagggaatttggcatttaaaaaaatcattggaagaatggagaaatgggagccaaagggtggttcctagaattactgagtwcaagaacctactactgtaactgtggtctagggactgggaagccccaacttggcattgctgttagtgtggccacaactgcttctgttagaaataggggaaagaakatgagttccaattctcctcctcatttcaaatcttcctcaaatgcttctaatggagaaatgatttgcatccagaacactagttgygaagaagtccaggaaaggcagtttttaactgtcatgcttcagcaggaagctggaaagagagtggtacagaggttaagcaagccaatccacaggataktctatgtatgaaaactgctacaaactagttgtgscatgaggaagagataaggaagcaatctcctttaacagctcctcacatagaaacattttaaatgaaatccaaagtagcttttttttatagatgaggacttttagttttaccaaatgaattctaactttgtattagaaaatagatttaaaaggatgattaaagaaatataaactagcctcctatattatctatcggttgcagcaatagggttataagaaacatttactttgtaaagtctgtgcaaatgaattctgtgcctctttgtgccagttgcaagaccaaggaaacatccttgaataataaaggaagaatacttttttcttgggaatcagaagtcatgacatcattgtgtatgggcayagccattgcaaaaggcagaaccaattcaatgagtagattttttttaattgcatatgtatgtattttcctgctaagaatctgaaatgactaattaattcatagaaatcttggtaaaccagtttgcatcactggaaaaaatggtattttccctctgctctcatccattattatttcttagcaaaatgtttctagtttgttatcagccaaaaagggttgccagttaattgatacgcttcatttatgttcccagtgggaagaaaatagcgtgtgcaggtgaggtagaaatgcaggtgagtgggccaggctcagcgttttcagcatgaacaaagcttcactcctttcccagagtttcagtgaaataatgctaagtcactcatttctaacttcgattccatgtctgtacctttacacttgccccttaaatactccgtatatgttagccatcattatcaatgttattcgtttgcctacttttgtttttttgtcgttggtacaaagatgcagtgtaagaagggaratgctctggtacattagggaatggcaacaggtcctataatggctggggcagtgtatcctcaggaggtaactattgaaatgtctgtgaattgagatgccacatcaaactccttttagttagttagttctatgctatttgaaccttccacaactttctgtaactttctgttcaaatttattcaattctgccacataatgcggtgtacataacttcatatctccatatgacagtgttctgtgttctaaaagtccttatctgctatctcagtaccatcttgtgagctcttgagaacaagagggttttcccttttgtgcccactgcagtgcttcccactcagtataaatagtcattcccaaccactcatgtctgtcaagggcgttcctgtctgtgtctcacttgggctggacccctgcagtacccttgcttgaactataggaaaccaagcaggaaattcagaggtagctgtttccaaagggctctataaatgtattttgktgaaatatttgttgaatattattaggcatgaagggmagaatttttaaccttcacacaggatttttaaaacatgcgatgtatgtgtgcgtgtttgtatttggggaggacggtgtgatggtatcagccttcccactttgagaatagctgctcccaatcccctgggttgggaccagctctttcctgcttagccaggaactgccccttttaagcctgcatggtccagtgtttacaggaattattgaatgaaccctattttgrcctaagatatcttgccaaggaaggacacaaatttccatggaaatgagtgaggcagtagcaggaatgttagaaaccacaactgtgctgatacaatctgaaaaatatttccttttggtattataaaaacacggttggctgtccattctcttacattgtgatataaattacatttctcctcagcacgttcacccagggccatatgtaaagcatcacaaaacatccttaatgcaccccacatagacactcatttccagcttcctaggttggctgtaggctcctgtcatgttccastgagcctggacctgcagcgttcttggcctgtgggaaacccagcaggatattttggagtagtttgtcaaaatagccttgttaaaatgaaaatacacattttttttccttcacagtagtgtgcttaatagaattctctgagctcccggatatccctgagtttcacagcaatttttttttcttttaataaaatttggactatactacataatctacagaatttggtagttttttccacttattcatattattgtaatcatttcccgtgacatatatctttttggctggaaggaaactaaggggtctaatgtctggtggggatggatctttgctggacttttgttaggttctattgttaggcttccatctggctgctttataacagaaacctgatggggggcagaaccaaataattgcttatttatctcaagcaataaagaattagagggtaggtagtttagggctcagtgatggctacgtagtgtgccatcaagctcccagacccctgtcttcctactcaaacctccttagctgatggccaaggaacttcgcagtttcggttcaggatcccagcaaaaagaaggagtaaacagaagaggaaagctggacagattcctgctcatgtatcattaatcaggamtgagtcacatgggcatgtctaactgcaagaaagcctgggaagttcagttttccagctttaggcaaatgccttgcgtttgtcaactatacgggctgcctcagtttcttcacatgttatctcgctcagcccttacagcgactctgtgtggctgttattattgcctccatttcatggatgaagctaagactgagaggggttaaataccttattgagggtcccagagctggtaggtggaagggctgggatgtgaaacctggcctgtctgatttcaaaggtattagtgtttactctatggtttatttccttagaagacatggattctagtggattagttcattcttatcactcagtcaccttgaaactgttttaaggtttttcacttctaagaatacctttataagaaatggagaaatttcattttttaaatttatttttattttattttattttgagacagggtcttgctctgtttgataaactaaaaatgcagtggcacgatcatggctcactgcaagcctccaccttctgggctcaagtgatcctcccacctccgcctcccaagtagctgggattataggcgtgtgctaccacacccggctaatctttgtattttttttattgtattttttttttttttttttgtagagacaaggttttgttatgttgaccaggctggtctaggaatgctgggctcaactaatccacccatcttggcctcctaaaatgctgaaattgcaggcatgaaccactacacctggccaagaaatttcttttgcagctttttgggagaaaaagtagagtgtagctatacaggatatggaatcctatacaacaccatagtttcccatacaatactctagtctctttttggctttgagctccccggtatcccctgttgaaaggagaaataagagcatttacattattttgagttttataaaggggaaaccttgcattgcttctttgttataggaatctagaacatggttccactactattgaataattaaggtaattggccctgccattcttggcctaatgctaacactagagtactgtttagggtatgcagtctaaaaatctggatcctaagcctggcctttctatgatgacgcttatgatcccagacaagtcatggaaccattctcagcatgaattttataatttgcayattgggacaaataatacctggtctttatatttcagtatcattattatgagtaacaaagttaaaatgagataatgggtttaaaagtgctttgtaatgaatgcaccataaaaacatatgataatattattactgttattttctctcaaagtgtttacggactttagcattgccttggcatttgggtaatgccaggaacccatgaagcaaaacaaaaactaaaacaccactaaaaaaagggtgaaatcaattttacaggacagtgaaaagaaataaaggtgttgaagctgggatttcggraaacataaagtagtaacagagaatgttacagtctttgtttcattatatttggataataattacagtaaagtaaaagagcaaggtgaaataaatcattaacttctagtgaattaagattgtgatctgaacaatgaattgatatccactgttcttcaaattgctgtgtaactgagaagagcaggaaaatggatcatcactggatgtccaaatatctgttatcttcatagggaaaggaaaacaatcgattagaagtgaggtagtgcaatggagttgctcagaagaatagctgaygggaactttaagatgtcttgtttttcaaatttagaaataattgaaaattaagacctttctttaatgaaaatttgcaggttgtctatggttgagaacaaaatgaaaaataaaggaatgctctatcttgccatggtgtagatctttctaaattacttgacaatgtgtaaaatttcatacaaagaccgattatggctcaggattctagcttcctgggaataattgaaaagaattcatgacaccaattaccactgagtcacatctcatcccgtaggcctgacgggagtgatagcttttcttaggaggtgttactgttccatataacattttcttcttaggtgtggtgacatgacagggtgtttccctgcaggagaacctggtatacctttagttttttttctttgattagtttcttaatcttggttgctcttacaaaggtccaagtgtagaaaggaatttgcctccgattttaatttagttttgagcatttgtttggatactaggaagcctctgtttcatttctattaatatgctcatttgtacttttaaactctattaggagtcgcttaaatgcatagacatatttgattaacttatagagaggtatcatttcaaccctgaattttctctggcttaattaatttggtcaaataatcaagaggtatgactatgcacagagaacgttttcagagtgtttgtctatgttcagatcaattcactatcttccttctaattcactgtcttccttccattgatggccaaacattcttagatcacaggtgagctagcacaacattttttaatcacttatggcctgactagctctaccctgttatcttcagtgttcagaacttctgagtagattgaagagaccgaccctgaagcttgacttgcccaacacaatggggaaaggggttggctagggataggatagggagtgaacatagctttgggggctaaaaggaagtccagccagtagccagaaaggggtattgcagttcttactgtggaacactgttggcaataaccagaagataataaggagtaacatgatgtgctgctagtatgcagaatgcagagatgaaaatggggtggatggagctatacccagagatccgkttaaaacaattgacttcaagttcccagtctctacgctggaggttttgacaactggcagcttccaagggtactggtcagaagaagccagagcctctgacttctagaggtttgggaactgatcatttatcacagcaggaacacaagtgaaccaggtgagcatcctagcactggggccaaaattagggactgtttttgtaagcaaggctgaagcacagttactggaacttggtatgggctgggaggcagggacctggaagggcagcctggggttatgttttgaaattaagtcataaaccaagttactagagccatacctcaaagccagggccagaacacaagtgtaacttggtagtgattcccatagcttcaggtgaccatgcccaatcattcccctaaaggccaagattgacccacattgctcagggctcagtctgaaccccagctgtaggttcaggtgtatatagagattgagaagtaggctggataaatgagtagaatttttcagacaaaaacatttaggttcttactgtcttcaatgtctagctctgtggaggctgacaatacagagagagcaaaaactaagtgtaaggagaggatttgggaaaattgttaggtaattaagaaattatattagcagtttgtcagaaaaataggtaagtggataagtgtggtgagaaaatttaggatagatgggcatgggtcaacatctgctgattgtaaaggaaacaaaagtgctttttgagggtaagacaacattttatactctgaaaattattatgcataggttttttttcttgccaagttttatttttcctgtctattcagactctattcttgagatttcagaattttaactctttgctaagaaaaagaaaataagtgctgagagaaatgcaattgtaaattaatttgataatcacttcacctggggtgtctgcagttaatgaagcactggctaacagccccatatacaatatgtatcatctgattattttgtttacatttttctgtttctagagttcaatccactctgattttatatacatcttgggtctaatatactattcagaggatagtatattcacaaagtatggttagttctgtagccataatttataaatttcctgattgtcttttcttgttatactcttacatagtctttgactatgacacccaaggtcagtaagaactgaagttgctacagtttgtaggtgcttccagatgcctgacatggagattgtttgaggatattttaaaatccaaaaaagttcagtgatatttctggactcaagaaaaaaacacagtatttctacacaaactataaaatttaatgtaaatcaaaaatctacaaaataacatcaaggttagaattaaatttaaagcaaggatttgatgcatagaagattgccttacacattgattggacttgtcacctaaataaatatgccctgctgccagcacaactatgctttcctgaaattttcatgattctatgtaagtaaaataagtgttcgaccactcattcatgaagtacttattgagcaactactgctgtgtggtagggactgtgctagttcctggggaaataatagtgagtaaaaatagatccggttctgcacctattggatactgtcctcaatgttccataggttccttaccttttacatgctcacaattctgtccctttctcctrcttcttttcttctattcctgatctcaggtaatgacactatcgtctactcagtcacttgagctggacaccagggtcttatgtttgaatttcactgtccaaatccaagtttatttcataaatatttcctgaatcaatcccctcttttcttacctcactgccactgggttaagtcaaggtttatcatctgttatctatactaattcaagaactttcaaaaaagtttcacagacaggcgcggtggctcatgcctgtaatcccagcactttaggagactgaggcaggcagatcatttgaggtctggagtttgagaccagcctggccaacatgatgacaccctgtctctactaaaaatacaaaaattakctgggcgtagtggcaggcacctgtaatccctgctattcaggaggctggggcaggagaattgcttgaacccaggaggcagaggttgcagtgagccaaaatcacaccactgcactccagcctgggcaagagtgagactccatctcaaaaaaaaaaaaaaaaaaaagttcactattatgaatttgcctttctgtgacatcctccaccctctgccaattttgttgttataaaatgtaaactggtgtgtgtgacatctcttaactcactcttcactacttgccatgcagatgagcaagtggctaaacggcagactaagtcagctggagcagcattcacagagaaaactcatgaaggacaaggagcagctagtagatatgctgttgcgttttattattaaaaataaggaaattctaccctctaagaaagggaacctgaaactacactgggctttgtagttctgtaattagggatgcaccaaccattcccctggggtgattgagagactgagatataacatacttactaagatagggcagaaccctggctttggcctcttttatcaacttagtgtttgtagggaatrgaaagccartgtagctatgatgggtgactcaggtacaagtcttgcagatacagttgaatgacatagatggccagaaacggtggccttttttttttccattttattttattttgtcatgtgttcaacagcatctctttttctctctctctcccctcttcctggcaggtcacagacataaattaaaaataaaatctacaagaaaaataatttataaaagcactcccaggctcacaccttctatccctactgctcagttaggaacaccccaactgagaatcagtgctttcccccctccacttcactcctgcttgtctggggaagacagtactccagagtcgggcaggggtgggggtggcagtggcaaacagttaaaaataaagacactgtggtcctggaaccatctggccaccttggcacttccatgactgcctcccccaggcagccctccaggagcttgtgctaagctggggctgtggagaagctgcccatggctgagagcttgcgtgtttgggggktgctctcagcccctgtcacttgcacttctccatcttctagaaagaaacccaaaaaagaaagcagacgacaacctcgggacagaggagaaaaatcccgagtgttcacacagttagttacatgggtctttatggcaaagaggacgtttagctgctttgaatattaggacatctcctttttactcaatacaagcattctacaagtgaaacagggcacaagccctaaaaaaatcaaagtgcatgaaattctaagaggactagtttttttgttgttgctrggttgtgtaatgttttgtgttttcccagtgacaagcccagtccttggtaggcagaggcctgagggaawgatcactccccagtgttgtgctgaatcctgcctggaggctgctgcgctagatcctccctccatatcattcccctgactcacagcagtactggaataggaaggctgcaggcccagttcccggagcactgccagcacctcaccccagctacagaagagctcaggcagtgggtgagggatggggaacacaaatgggatttattgcatcagcttatagttgcagaagagctagtttcttccttggcttgctgagagtagtgggaatccaagccttgctactgatcaggatagagggccttgggcactgagccccatctggtttccatgcagctctacaggagcccacatctttttcctgttgacaggggatcaatcttgagcaggttcatccttcctggttacaacctgtatgataaaattcaaatcccttagagtgtcacacaaggtcttcacgatatgaactctctgagaatgtcagctaatataagcttaccaattgccatccatctgcttcctccagctcctcattgcttttttttttgasacggagtctcactctgtcatccaggctggagtgcagtggtgtgacctctgctcactgcaacctctgccccsggggctcaagtgattctcctgcctcagcctccgagtagctgggactataggtgtgcaccaccatgcctggctaatttttgtatttctcatagagatggggtttcaccatgttggccaggctggtcttgaactyctgacctcaagtgatacaccckcccttggcctctcaaattgttgggattacaggcgtgagccaccatgcccagccccagcccctcattactttttacttttactaagtgacttgcatttcccagaacaattcrttttttcgttttgtcttcacatttgtacatgttgttccttctgcccaaartgcccttcctatccttatctgatgaattcttgtttatttttcaagatccagccaaagcatcatttctgcaaaccttcccagttccctctcccaagtctcaaccacctggcagtgttgattaaaaatctattttctcccccccaaatttgtatatatctctcttaatacaactgaataacaattattgtataacaattcaataactgaattgtcaacattgttattgaataacagttactggctcacatgctttctgctgaccacactgtgagccytttgaaggcagcacatagacagggtctggcacataacatagcaggtggtaaattaaaatgtgctgaatgaatgatgaaatggatggytgcttttcccaaaacctttgcacccacatggcatcaagttacgtcaacctaggtcaatccaggcaacagcgatggaagaaggaaaggtcctggatgctcacgatagagcgtggcgtgtgtgatggtgtgtggacagtcaccctctaagtgtgcaggacttcatcctaatcttgaaataacaagatcgtacattttaaaagtcaagccacaatattggttctgggcatgtagttattttgtttttatttcttttcgctattcttattctcttttaagacatatattattcttaagaaattgttattggatggagctgatggacattttgatacttgtgaagataatttctttttctcacatccacttcttattttctctcattgtctttaccatctcatttcaaatgacaatggcctcttgtctagaattctgcaaaagttatcttctgggctttttgtatctaatctggcctcttctccagtccattaccacgctgtagcttgagttagctttttaaaatgcaaatcagatcatgcaatcattttgcttaaaacccttgattgtcttcccattgatttttaggataaagataaaccccttaaggcytgatctcttcctgtggctccagcatcaatttccacaatgttgcttctcatcctcataccttgctttactggccttctttcatatcctcacaaacactgtgctgtcttcttctgtagaggttttccacatgctatccattttcctggaagactgttgcctcctcttacctaattaacttacattgatcccttacatcttgtttgagaaccatttcctggggaggagggggctggtccccagagcaccaggtacctttcatttgcaacttcatattcaattctataagtatttgattgaagttgccttctcttaccagctggaaacctctccagggatagtgtttaattctggatgatagggagttatgtgtctcagtttgtagcatagtgcttgagacatggtagagattcaataaattttagtggaatgatgaatgaatgaaygaatgagttcagctgcttagttttggtggatacaatcaccaagtgtatcctggtgtacctagagcctatgttttggtataaatataaagagacttggagttcattaatagagagtggaggggaaaatcctcacattggaagcagtcaacataatgatgagggatttttttgctcgttasctcagctaggtctgggttcttgtctcatgaccaggaagaagtaggcacacagaaatttgaagagtgagcaaggcggggagtttcaytgaatgatgaaacagcttttagcaggggtggtccccctacccaaaggcagtaaagttctcaatatggctgagcctggggctttttatgggctcagaataggtagyttgtattgattgatttgtgactrtgcaaaaaggtcaaagcaaagatgccactcaaaggtggacaygacagtgtagaaagccaattaggaaagtgtgggtatatgaaaaataggtgaacggtggggatcaatcagaggaaagtgtgccaaacgggcaggtggggtctcaatccagtccgaggatttaacttgtagcttggctttcaggctttaaactgtctgcagcttggaggtggggtttcgccaggacctgcccgtgtctatctaggcatttgtctgcctcctgtcattatcgktaagaaacctcagaataactgtcccagactgaagcctttaaggctaactgtgaagatagtcaaacagggtgaccccgagcgcttttgttaccatgttacycttgtgtcattagataatacaagtctcagatgttgcaatgaaatcaatcttaaaggacaccataatggagaaattgctgctgtttttgaagatgtaaaaatcacagtcagagatgtcagctmagtcagtctctgccttctccccaaccagaactaaatggcagagtgcagtgacagagcaaaaagctgaactggttccgaggtctcttccctgccaggagctggcatctccagactgtcggttcttgtgttggagccttggtgctcttcagtcttttagccatcaaatattcttgtaccaattttcccacaaagcgaatgactgggatttgtattttaaaaccacagctattataataccagtatctttgaaattgacatactgtctccctgktagttttcaatttatcttggcccagctgctggaggaaaatacttttcagtctttgtagcgccgtggagccaatatgtttaggaaacaagccagtcaatatagttcccaaacaacctcttgccagagacagtaataattttttaaccccttgaactctaaataagaaaatggtttcatccagattatgaacactaaaccttggttgrtgtgggcagtttgaacaatcatccttcgagttgaaaactttttgactgtccttggaattagtaaaggacatacattaagtaatcccctaggactgctttttcagcttgtaattacatttcaaggaaatggccctgtaaaacaagtagcaaagtkctctctgcaatatttgaaagtaagaccatagcaggtcaaaaattataaagtaaattatagtcattcacttaaaacgttcacttaaggcattttgtaatttcattggtgaccttttattgcatcatgaacaaataggggcaagaaaggatttagaagataaagatttgggcttaggaaaataagcattcagtggtaaggatttataagatgtaagatagattaagtaagggccaggaaacctttggggaaaaaggcaaagtgttatcatatgaataaaaataatggtaataaaatgtcatagattatgtcatgtctttaaaaagagggtacctgaaggaaatttaaatttcrtgttttaggttatgtcataccatggggatcttgatatgtagaaatttcctttcacttttgcagatggttgagagatctaagaacagtggagggatgcagagaacaaggagacaggaaaggctgatgtaggacacagaacatcagaatgactacttggagcagggaagccaccagagcaatgtgatgattggcgctctcgtattttacagctattaataggtcatattgactgaatgatttctaagttccagacctggcactttttataattatcattttatttaattctttcaataactgtagaggtaatttcttacrtttcccttcaccccattttatagatgaggaagctgaggctaagaaaggttcagtacccatcacaaagtacattggaagtggcagaatcctctgatgctgtaattgtgtaaataaccattttattctccatgacctgggcacttagaagatgactgaggartgatttagatatgttatgtatattcatatagagtttatatatgctatcgttccatctgtctgtgaagttttcctcaattaagttgtgcttgagaagcattgaggattaaattggccaactctgaactttctgttgccagtgcttcctgtgggcttggcattctgtttagtacacttataagaaagtcattccagccttgaaaacatccttaatgcagatgttttcttactgagtcagttaatggatatgtgagccaaaaggttcatcaaagccactgctgatgaaacaaccaaagcttcattttcttgaggctcctattggaaagaaaaaggaaatctatgtgcctgtgggaactgcagacgtaaactacctacctcatgtaaaaggctaccacgattgcaagtgacatggtaggtgcaagtatggccaaatacataggaaaaaaggcacaatgaactttttagtgtatttccatttactaattatgaatctgtgaccacctgtacaaataaagcaattaatgtcaactgtttacgactcctacaaaagtttcttcttttaaaatttcaattttctttttgttcctatytttaaaatttgtgtaaatttatggggtacaagtataattttgttccatggatatactgygtagcagtgaagtcagggcttttagtgtatccatcaccagaatcacatacagcgtcctcattaaataatttctcattatccagccccctttcacccctttacctttctgagtctccattgtctatcattccacactctaggttcacgtaaaagtttatttgaaatagatttagaggaaaaattatattgaacatatttttgttttaattcagtattttaattttaaattggaaataattagtaagttaatttaaataaataaactcaattccgcaaaatrtgacactttaaggaaagtgcgtaggaaacattaatgaaactcaaatgtattmgagaaaacctaccaaagagtaggttggttatattttctcaatttgattcaattttgtggctacactctacaactatagtttgttgaagactaactatgtgctagactstttgctaaatgttttgcatgcattatctgataatcccaacatatgatgctgatattattgtctccatttkacatgtagaaattgaggctgagccaaaagtgtcctgcctgggatttcccagttagacactggttccatgctrtgattccaagtcaagattcaaactgaggcctgttgaagctaacatctacaaatttaaccctttaaactgccttgcatttcctttcaaattaggtaatatgctacaaaatgattacaacctaatgaagtctctctcctgatatgtctgaaatacctataatagtgtataaggagattcccattttgttttccttggaaasggatggagacttactcagttgctaatttctgtaatgtggtccaaattgtttaaacctaacaattccatatttaaggatttatcttaaagaattaactgtacaactgctccaggctatatgtatcagataagtaacagcaggaggacctctatatggaatgggttagtgatggtgaacttgttaaaagagggttctgtctcttcaagactccttttatgtgaggtgttttacawacaattaagcaaactttattgtccatataaaagaagagaatacagtgggctgatactcccgtttctcagctaccttcttagctctgccacaattcaaagatgtttataacagtattgtttatcatagtgaaaaaatgggaataacctaaaatattcaacattaagggattggttaaattatgaatcacctctacagttaaataccatgttgatattacaatcatgaagggaaggtatccataatatcttgttaaataaacatacacattacaatagtattcatatgggatcacctgatcccattttggttagaaaacaagccatttaggatgggaagtccacccaacagagggctgagaaatcactgcaggtaatatacaaatattacttaatgttattttgaaaagaagcaagggagacttttagaaacttttggacttctctttgtcagttagaatcctgaatttttcactaactgccttataaaaaaaaaacaaccctgtatttcatttaaatctggcacagagaaaagagtctttcccaatctttggctaaaattccctaaagcatgtattttcctactgtgtcttttggaataatttaagatatgcactcttctctaactgcctactcttggaataaatttatttattaagtctgccagggccctgcctgggtctatagtaggatatgcaaattggctaccagttaagataaatctggccttcaaattttggctttactttaaaaaaaaatcatttgaactatatgccaacttttaaaaatgaggagcttttacattaatacctggatttttagtatcacttgaaaaaaaatcagaatatctggcagtcctggctcccatgcccatgagtagggcatgagcagcttcttatcctgctgctttggtgatatggttttggtttggctgtgtccccacccagctcccatcttgaattgtagttcccataatccccacatgtaagggagggaccaggtggaatgtaatttaatcatgggggtggttaccctcatgctgttctcatgatagtgagtgagttctcacgatagtgagtgagttctcacgagatctgatgggtttataacgggcttccccccctcccctcaacttcgctctgcacttcttctcgctgctgccacgtgagaaaggatgtgtttgcttccccttctgccgtgattgtttcctgaggcctcccccgccatgctgaactgtgagtcagttaaacctctttctttataaattacccactctcaggtatgtctttattagtagtgtgaaaacagactaatacatttggccatgtgccctttgtttgccacagtctctagcacttcctattgccttccttccactcgtttatgttacccgcttgaattgtgtaggcatttcattttgcacytctggtgtgctagactttaaaataatctaaaaagctcrtctgtggatcatttagcaatttccttaacctttctgtcagtggtctgaaaaagggaacaggtttgctgcatttgcttagatagattcttggcatttctccagaaagtctggggctggattaaatcaattaattaatgaaaacatctgtatacctatgtggtaggctctggagacactaagagttacaaagacatggtttatacccttgaggggcttattcgctgttgtggaagatgggtgtacacaacagtagctagtcaagtgttacccagtgctaagggcctagaatgtctgcttagtgagacggacagtaagtgcagtaggtgtttctgtgggaatgggcaggatgtgcatgccaatcctggaagatgacataggtcagggaaggttctagggaaggaagacctcaggtcatatctgagagttggcagatcaggtggatcacaaacatcactgtgcatgtgaattgtatcgtgtagggcaacttcagattcctaagctctacccagagatcctatttctagagggctgaagtagaccaagaatatgcatctttaatatgaattccatgtgtctctgaaatatgtgagttacactgtgaaaaaagggtagacgataagccaagcaggtcaggagaaataagtaaaggtaggaatgtgtgaaggtaatttacaggctgcaaaactcagttgattggatgcttgtatgcagagtcctgagagataattaaggcaggaatactgggaagagaaggatgctctggaaatcacttattttcctttttatcagtaagaaaggatggcagatacattttattaaattggggaaataaagcatcagcagcagccagttattcccaaaaggaatattctctgcttggcttatttatcttttaatggaataaaatagttatatatgagacaatcaatcatggacatgcttttttttaaatgaaaataatagttaattagcaggcaattgatcctggtcctgatagttcaggtgcctagtcagttaaattggattaacagtttagcagtctgctgcattacttactaagtaattgcacactatttatagttgaaaacaaaatggatgccctaattgataccaccttttagtgtagcaaatactgaactgaagctcacagtttctgacccagcatctcatacagtgactggtatatggttagttggcactcaataaatacttgccaaatgttcttaactgaaacttgcttggtatttgtagttcttcatttctgaaaaaatggagttggattttattcatggttttctacaccatcaaattccttggggtgtctaagtgtcacttccagaaatagagagaccaagaaattggggaagggtgcccactttacctcatcttctcttttgtgtatatgtgtgtgtgtgtgtgtgtgtgtgtgtgtgtgtatacttttgtgtatgtgtgtgggtgtgagtatgtgtacacacattttttcaagagacagggtctcactcggtcacccaggctgcaatgcagtggcacaatcatagctcactgcagccttcaactcctaggttcaacagatcctcccacctcagcctcccgagtagctgggactacacgtccatgccatgatgctaggctaattaaaaaatatatatttttagtagagacagagttttactaggctggtctcaaactcctggcctcaagcaatcctcctgccatagccttctgaagttctgggattatagatgtgagccaccatgcctggcctatatatatatatatwttttttttaaataggggttttctggtataaccttgtctgagaaacaataaaggcttcgattttgaagcaaagaaaataacagtagcaacagtaataagtttggaagtctctgaagtattgaataaatgatttgtttcaattccacgtgcatttaccggccactgtgcacagctttaatacataatctcatgactcatggggcataaatgaattccggtgtgcctcttgtctgcttgagttttttttagcattccttgcacttgtagggaattttattggacactgtacctgcagacccttcatagatcttaaggttgaaaaataatttggaaggcaggtaatagagtagagaaagtaaggagaaggggtgagggcgagccattgaagcagctttaacagaggtagggagacaagaaattcaggctgtgtctgaggaaacacaggtgcgtaaaatggtgtggagggaatattgggtgtatgcatagataaccagctggtagaaaagaatgaacaggaagtttagggtgttgagaggtcctgggtgggtgcttcaatgaagatcggaagtgtttttgtctgtgggcaagggaaaacatggtacttttttttttattagaaaagtgatttgcactagcttttgttttagaagaattaggatatgagagtgaaggattgatgayaggcaagaactagaggccaatttacagcattaaaccattttaaacaatagttacagtgagagtggaaagaggagaagaacagaagagcctctgcagagggaggtgttacgtagatattaagagagaggtgagcaaaaatggctctgagatttctaggctgtgttgctgagaaaatgttgatctcttaaagataaaaataacaattattgatcatttaccttgtgccagacataagtcatttaattctcacaacaactgtaagaagtcagtacagttgttacaagtgagacaactaaggccctaaggttaaataacttgccaattgtcataggggaacattaacagcagggactggatgcaggcaggcgggctacaaggtgatgctcatcaacatgaagatgtgctttctgtatttggagaaaatgaatctttcagtggtatttccaatgaggggattgcaagtatgacgtctagcaatggcatgaagcttagtacttcctgctgctgcttattccgtgttttgctccactgctaagatgattggccctacctttgaaatgttgggcctgcccttcgtatttccttccctttccatcatgaaaagaaaacagttttgaggacttttaaaatgtggtcaacctctgccctgaagtatagacacagtctttgtcaccttatggttcagaaacaacatcagtaaaaaatttcaattcattgggacttgactatgaaatgtttaataaatctgctgcatgggcacatgaactgatgccacatgagttgtatccagaataacagatcatatgtgaaacatacaaaacactttttggaatgcttttgtgttattttttataatggattgagtaagaaattttaataggcaaatagcatccactatataaatattcacatcattcaatttccaaagaagcatcctgtgtagaaagcataacactgaagctatccttttaaaatcacaattttattaatagaatggggaatacaaatcttagcagctttctggaaatttgttttcatataattgaagaacagttaaaagtccttgagtggtaggaaactacaaatattctataattaacatgtacaaatatatatcttaagggaaaattatgtgtaacrttttttaaagggtttaataattaagtacctrtaatgagaagttttttttctctgaaataattgaactaattaccagatattttcatcataaaatgcttacgtatgcaaagtaagaaaacaactgaaattttaatttggactgccaaggggctagttaaatgactgaaaaagccaatacgtgttagtttacttactggaaagaaccaaaactgcttttgatttggctgcatcttgttattattttgtttgtttagctgggcaccatgctcgctaggaattcgcttgtgggaatttgccagtccttaactgaagtaataaagtgactggggtacagggataaagagatgttcatgtgaggagtattgytggagagttgggggcttgattggtgcactggttagaatgtaattaggtcctggagcagggcagtgcaattaaatatgttaaggagggcataattaggtgggaggctgaatgatgtaattacattcataagaggggggctataattaaatatgaggcaggggtgtgtatttagatrcctaagttgaggatataattaacatatgggcaagaaattaaattatgtgtgtggatgaagcataattgtgtgtgggagtccaggaggatacgtgggtgagggtatatagaaagaaaagggtcggaatgcaattagatgtgtgagttgagttcttatggtcaaaaacttgagattttcattaagaagggcaaacatatgttttgacatcatgactgatagcaggtggcatgtagtgacagcctttcagaccactctgaaggcttgcaaagcaaactctgtgcttttccaatatggtttgagacctgcagctaacactgctattgattcttcttgattgtggcacttggtgccacaattctaaatactgagtgtctggataatttttctagctttaaaacacaattacatgacaaggaagacctgctcccccttcctgtcaaagagaaaagagtttggcggggattactagggcaaataaacacacaaacaagaacaacaaaaccttcttgccaccaacaaccaaaacaccaatttttctttatattgccaagtgtgaaagtaagcatcactcttttagctaaaagagtatcacataaacataaatgtgtaacaaaatcaacaaaacttagttatgatagcctcattattttaaatttctaaaacaatacgctttcataaataattttggcatcctcccaacatataaaagcaacaaagcaacaaatgtaggctgcagataaaagaggaactagggagtggcagaagggagccaggagaagaatgatcacaagcaaagtaggtgaaaaattactcagcgcatctcagaaactaagcagtgaagtatggtaagagtgatcataataatctgatatatcctatattaaacttaaaacacggagactcctgttgtcgtcttcaaaagckagagaacatttcgaatatctgttcgttgcttagataattgttgaaattaaacatatttaattggccagtagtctgcttaaattgattcaatctagcactcaattctcataaataccagagcctcagagcctcctcatatctgttcaggccttaggtcagttctgacagaactccactattgataagattcctggtgagctggttgcttcggggattctgaagtttttagattcaaaaagaatccgaaaaggattcaagaaatctatatttaaggttagttattttttataacgtggaggtaaggacattgcagcctgcccgcaatctcttgttctgccctttagtggttttaaagaacttctttttaattcttagattttgatttcataycaatgcatgatgctgatttttaaaattgtagacatgcctcaaaggcagcctctcacaaaggctcttgtaacttaatttgtaatcagaagtgctcttaataaaatgttgtgcattcctgtgaaaattactgttgcatccaattctctatccactaagtggtttacattttctttttctccatgcacttcctactttttgccctgcctcccagaccagctcagactctgcaacaatgaatgatttatggtggttaactcatgtgcttctagaggtcacacaaytatcattcaagacatctagttatgtctgtgggttggaagatgagtaggtgtaaagtctccttgtgccagtggtggaggtcagtgccggctctgctgttcagggttgggggtggagtcccagctggccagctctttgttgctttgtgtggattgcacaaggagaggaggaagaggtgggcttcgggctttgaaagtgactctggtaaatgatgctttgttaacttaattataaaaaccattctgagatgctccagtactatttacataaggcacaacaaacagggtttaaattcttcagacttgaatagcgtttttccataagtcattttgtcagctaggaatatgtttgcagctggcacttaacaagtcttttcactctcatgcatgctataaaacaccaaagatcctaatttttgtttgtctttttttcaccttcctaatattatctaatagaccagaaatctcaactactttcatatgcttaaagctatggatctcagcttaaatgttaattcctcagagaaatttttcctaaccttatagcacgctgcattttgctgtcatgtttgttaaattctgtttttctatttagcgtgtaagctgcatgagtggggtatatgtctattttgtccaccatcacattttcagcatccataacagctcctggcccatactaggtgctcaatgaaaagttgatgaatgaacagggaagttaggtattagggctgtttgagaagaggcacgagtgaggcagactgtggaaaatgaggataaggggtatctcagaagcaacacactggatgggcttactgaccggttcatatttagagtgatggggctcacggttgttcttcaaatttggagattaatttatatattcattacaatataaggaaatgccattttaggtccggaaactgctgagaatggattagatgctccaggaaaattttgtgattaaataactaattattgaacaatttgttgatcatctcatctgtacttagtccagatatgaggtgttgaaaaaaaagatatgatacctgcaatgatttctacacaaatatgttattaaaactcatggcttgatagaagttgtattcataagtacacccttggctgggcatggtggctcacgcctgtaatcccagcactttgggaggccgaggcaggcagatcacctgaagtctggccaacatggtgaaaccccgtctctactaaaaatacaaaaaaaagacccgagcgtggtggcgggcacctgtaatcccagctacacgggaggctgaggcaggagaattgcttgaacccaggaggctcaggttgcagtgagccaagattgcggcactgcactccagcctgggtgacagaacaagactctgtctcaaaacaaacaaatacaccctcaaaggaccaatgacaaaaaatattgatttgttcaaaatatatataaattagcttgggtaacatggtgaaacctcgtgtctacaaacaaaaaacaaaaattagccaggcatggtggtacatgcctgtagccccagctgttctggtggctgaggcaggaggattgcttgagcccaggaggttgaagctgctgtgagccgtgattggaccactgcactccagcctgggggacagagtgaaactgtgtctcaaaaaaaaaaaaaaaaaaaacarcaactatataaatctttgaaattgaaaatatctcacacaaatatagactaaatactacagtggtctagcaaaatactaactttcccctaaggaatgcaattttgttagtacataataatgaattaatataatatatttatatgggacttcagaggttactgataatggtaaatgcctcaccttattttaactctcgtaatagtcctggaagatggaacaaatggttttttatcatgccttgtttccagtgaggcactgaggggttgaagggcctgacaaatctgaatccagatgattcatataatatggtcactaataagatggccattaacagatggaacagttacagataaaaaactctggacaaagatccgtaggatggttagtggctgagcaagaatagaaaatctgtgaggctgggcgcggtggctcatgccttatctcaacactttaagacgctgaggcgagcagactgcttgaacctgagtttgagaccagcctgggcagcacggcgaaatctcgtctctacaaaaaatacaaaaaatagctgtgtgtggtggcatgcacctatagttccagctacttgggaagctgaggcaggaggattgcttgggcctgggagatcaaggctgcagtgagccgtgatggcaccattgtacttcagcatgggtgacacagaactagaccctttctaaaaaaaaaaaaaggaagaaaaaagaaaaaaacccttgagctcattactatagttaatctgtctaatctatccttgcatttagagtagatttttttaaggttagcaagagtgttatagtatattatattctcaaatccagtagattattttcttgcataggtacaaggagacacatttgaaaagacagtatgcaatgccttaataaaaatattctctgttaaaatagtaatattcatgtggcaatggataaccaaacttctttctatataagtatactcataaaggaaaacatcttgttcatacatcattctggaaaacatggaccattgccaaactgagaaattgaggaggtattctgtgagtattaatgagagtattatctcaattactttaaaaaatccatagtatttttggccgggcgcggtggctcatgcctgtaatcccagcactttgggaggccgaggcaggcggatcacaaggtcaggagatcgagaccatcctggctaacatggtgaaaccccatctctactaaaaatacaaaaaaattagccgggcatggtagcgggtgcctgtagtcccagctactcgggaggccgaggcaggagaatggcgtgaacctgggaggcggagcttgcagtgatcccagatcgcgccactgcattctggcctgggcgagagggagactctgtctcaaaaaaaaaaagaaaaaaaaatccatagtattttctcaattaagtttttttgtctgtaaagctttggtgtgctgttattgttcattgacgtattataagtgcccagagagtgcactcaggcactcaggaaatatttattgaaatgaaatgaaattgcttgtcaataaaaagtcaaaatggctttttttaaaaaaamccctggacttttgtttgagggctttggggggtggtatttactagtgcatggatataatagctaagttttctgttaataaaaattattactaattgttaaggtagtgtgttaaattactgttttaccgtgttctacagaaaccrtgaaatctaggcatttcatggcttgaacaagccagggagactctgctagaaggaggaaagaaatgaaaaagggaaggaagatgagtggacttccatgccagtggcttggttagatgcttgacatccacaaactcatagaatttcatgaaagcctgtgtgaggttagaccccttccaggacaggaagcagaatacagaggggtttgacagcctaccttccaattccatagttccacagtttggaagttaggaggtaatgtttataactaggactatgttgctgcttccaagatctgtttgttttgcggccagattcctgacagaaaacctggaattgccagcctaataggctcaagcaagaaccactctttgacaacaattaaagggatttttagttggcttttatagagcaaactaaatattagttgaacatgagtgaacccagatttttcaaataagctatgtgaaaagaaatatgcaaatgtgcatgtataacttactcagatcaggtttttgttcttatcgctgaactaaatctacctttttcaaggtcaccagtgaccttcctgttgctaagttcagtggcaattttcagctgttgtcttacttaatctatcaatagcatttgatgtaatttttttcttttcttctttagacactttttttttttaacttggacaattcttagacctcttctcttttccatctgcactcattcaccatccagtctcctgactttaaatacccatgctgatcactctctattttctatctccaggaaagaccaactccctgactgcatagtcatgtattcacttccctacttgatattgccacctgggtatctaaaggacatcatgcacttgacatatttaagattgaactccaaatcgttccccagaaacctgctcctcctgtagtcttccatatgttggtaaatggcaagtctatctctacagttgttcaaggcagaactcttggcatcatcgctgatttctctctttttctcttgccctgttttcattgtatcagcaaatccaggcagctctttctccagaatatatccagcttctggctacttctcactaccccagtgatggtgataggggtagtgagaagcagccagattctggacatattctggagtcaccaaagtgaccaagagtcaccaaaatctcttatgaaagactcctatctggtctctctctttctgcccatgacattctacagcctgttctcatagcagtatagtgattgctccaaaatatgtcataatgtcactcctttgcacacccaacattgacttgattctcatcttagaataaaaacctatgtctttacaataccctataaggccctgcagaatgtatttcccaacctccctaatagtctactctctgatatccttcctacttctccctccctcttctgcctcgcttcttcatctccagacacaacaggctctttgctccccctttcccatcccaggaatgttttctccttagggtctctgcaccaggggttcccgcagagatctgtgaggctcactacctcatctcctgcaggaatttgctcacaaattgaactcctccctgatcaacctattaaaattgcagttcctggggccaggtgcggtggctcgctcctgtaatcccagcactttgggaggaagaggtaagctgatcacctgaagtcaggagtttgagattagcctagccaacatggtgaaaccctatctctactaaaaaaaaaaaaaaaaaaaaaaaattagctgggcatggtaacgtgtacctgtaatcctagctactgaagaggctgagtcaggagaatcgcttgaatcccggaggtgggagttgcagtgagccgagatcatgccactgtactccagcctgggtgactaagsgagactgtctcaaaagaaaataataataataataattgcagttcctctctgaaagcatctcctaatcctttcatggcaatgctttctttctttccaaagctcgtgtcaccatctgacccactgctcattttactcatttatctttacttatcatctgttttccacactagaatataacctctgggaacagaaatttttacttatgtccttgtcacccagggcagtgcctgacgcatagtaggcactttgtaaatacttgtggaataaacaaacagctactttgaatgtaagtatttaaatcttcatctgacaaattatagctctaactgatgtttttctagtgttgattccaagccctctgtttcttgcccgtctcttctctctggatctgttctgatgtttgttgggctggtctctggtgtagtaatgcaggaaattcttaactctctgctggcaaatgcttagacattacactttaagtactgtatttttatcaacaatatttccatagctctggctgttcctttgacaactagaaatcaaaggaataaaatcctcttcttatgctgcattaagtggccacctcagttaccaatgaatacagaaactcctggaattttatttctggtttaactacttcctgcctatatgaggcccttacagtgtatattcatatacttattggatttgttcttttggaataacccatattatttgcttgagattcatgtagggtggttatttttgatgccagttgtgtatatgaaaggtctttccctaaagaactccagctgctctgcgtcgtttcagcaagcaggaaattctgtacctggcagttcttgctgacccagctagaagtggccgaatgacgcatttcactttcaggggctattgctgggttttcatattcatactataaatagcacttcagggaacactcagatacactgaacattttctttacagtccagttcagtgttggcagaaagaaagtcacatgctgtgtggttctacacaagtcacttgccccttagtgggtcctaagctctagacagacccacccagagtgttcatttgctcataaacacagcatcactctcagcaaatacttctgtgtcgttgtttacgctgctttctgtgcctggaggaatcatacgtattctttaaggttcatcccaagtgagaaagctttccccgagttggctcagcagaaatgccttcttcctccttgtggattgccccatagcattcagtgtgcatctctttggcagcaacttcagcattataatagagtttgttacctaggtatatgttttcacactctcatcatccctttctctcctcacatcccaaattgtgaaccctcaggcctgtgacttctgtccacatgtatctctccccaacagttagcaaaggaaatgttcagaaacatttatcaagtgaatggctgattgtatgaatgaatgagattgcaatcacataggagaatggagctcatttgtttccagcttaatggctttaaaaataatcctgtgtttactttgtatttttttttttaattttccctagcaaacaccttctactatgtgcatggccaattggagaggaaaaaaataaatgttgttatatttaaatgcacttcagggaggctttttaaaaattttgctttttaaatttcaaggcaacagactagtttgttccttacaaacttcttggcatctttcttttcacatgctcttttttgctggactcagtcttcagtcaaattcctccaaagggtctgctgtaaacaatgattttgtgagcggttgtgtgttctttgcagtgaaaacccgccttgttttctgttgctaggcaaccccattccagctgccattgaagaaatgcgcggtggtgggaaatggtgggattctgaagaagagtggctgtggccgtcaaatagatgaagcaaattttgtcatgcggtaagagagagcacccacagcgcggcctctgccttctctccttttccccacccctcccataagccctggggcttttcaaaactagtcacttgtgatgaatcagttgtagcacgctccttagcttcacttccagctcatagacaagcgagtttaggagaggggtaaggggagcgagggaacatgccccgagaaaggacaaagccaagaaggctcaggcggaacagagatacccactctgctgtgaataaagggagcaggggaaagtggaaaatctcacatctcattttagattgtacagtcaggtgattttggctttttaaattgttcttttccttaaggaccactctctatgaataaatgctttaatggattcattttattctataccttattcttcttagtttttgatcaaatcatgtgtaagtagcaagtgggatctgaagacggattaaatctttgagtgagtgggaaaacggsaacaaaggagcaggggtaaatttcaaacgaggggacgcttggtaaagggactgagcagagtggtgatgtgcacgtcagttccaggaaaaacaggaggcccctgcgggagcatgaaaaggaattgctgagacatattcagccagggacagagactgccaaattgtaggggcagcagcctgcactgctgggtgattctgcccagacatgcttaccagccacgtatagaaggagagacagcaagtgattggataaggacaggtttgggattatctgggtgagagggaagaaggacaaagagtgacaacttggagggctctggctagagagggtgtaaagtaacacaccttgaaatcagggctgggcaggaagagcgctctgagatgagtgaaggagaaaggatggggtcagatgatggggtcattcagagcaggggtgaggtaagttgtggctcctggctatgaatgaaggagacgtggaataagaagaagctaaagtcaaagaatggctttctggagggcaagatttcagagctcagggtatctcggggatgagtggacatgttgtagaaaaagaaaacatttgttatggagcaaataaaggagccttgaggatagactctgagggacctttcaggtggaccctgaagcctcactgaggtggaaatgactrtgaaccaagtgccagcagactctgtggccaggaagggtgaagactgcagcaacatcaaggacagaaagctgagcgagattttgtattcctgtttatttttaagtataaacgagtaacagtctaggagtggaaaaaaggtagccaagaagatgctaagtcacctctgagccctgagctaagtgggagagggaagagtaaaaactttatttgagagagtttcaagagaagccatgtacttgtgggggctaagttccctctcagagttggtctccttgaaagacatttttttttctcacttggtgaagcctgcaggagagtctagatccttctatacccacctttccttcatgcaggtaccctcagcatagtttttcctctgtattgcagtttttcttttcaacgtgaacaaacaacagaaaagtggaaaaagtacaaatgtagttcttttagttccagtcaatgcaacacctgctcattgagcacccatgacatatgggccttgagctggctctgggaatggtgcgttgaacaattctatagtggatttatatcctagagatgtgtttgctaccgtgggggaattcagacacacgggagcttctcaagagaagtggcgtgtgagctgagtcttctcttcgtttcaccctaagcagagaaacaacctttcccaagagtccaaggtgggaaagatagcaagtgctgttgcagtgtcatgaacagtggggaaaatggcttgagatggagccagagaggtattgaaggcattggagtggagaaaatcacctagagagcatgaataggtgagaagagcagggagtcctgaaccaccttcaggcaccctctccagtactttggcattaggtgaggctgaagagccagcaaagaacacagcgagataggagacaagtccttgctgttgttgactaggtctgtgacctacagtgcattattttacccttgctggggcccagctttctaatttgtaggaggaagcgggagtaggcaattcctcaggcccttcccattgtggcaactcttactctatctatgactgtatgaataccgtatcattgtaacaccgtttatgtagtttagtttaaattttcaaattgctcttgagtattattagtttttgtgctcttcccaaaaattatgtaaggaagaaggaatacgtagtattcaactcacagattcaaagaagtgatttcaagtggccttgatacacgtagaaatgtaaatacacttcgtgcagtacaataagtgtatttttgtattcatgagtgtgtatgtgtgtgtgtcatccatttgtgaagatggacgtttactaatgtgtagaagactaggcttaggcaccatagaatgttatctattgtttccagtgggccatatttatcacaagtaaacaagacttttttagccttatatgcaatctggtgttgatatagtcaagttcagaattaatgaacgcttctgattagagtgcctggcacagtattaagcataatgtttctaaaatatggggagatgagggttgaaagaactcaaagaaggtagcaccataactagaactatgtatgcrtatgcctttgatttaatttcaagaatagttctgttttatgacacattttaatgtttaaaagccttatgtatgttttaaattataggagtaataaaagttgataaattatttcaaaattatttgaccatttgcagatctattaataaatcattgcttaatatgcattttggggcatgcttaatgtatcgagatattatatattcaaaattaaacatttaatgaataaacgtagattagaaagcatgtcgtatgtctggtcctagactgtagggtgtgtaatggacagatacagtgagagagaacatccaaaaatagcactgcctgtacacagtgatataccagattacagttcaaagtgtcttctaggactaggatataayaatttcataattttctttgcttaaatgttttcaaacacatcttctagtgctgaaaatcaatttcccatttctcaaagtaaacatttgstctgtagccaaaagcagtactttaaaaaataatatcattgaattcaatttattgggaagatttgccagacaaaagttaacagggattgcatcctcaaaaggaactggttggcttggggacatgaatgagggaacataattttggtgccttttgaattatgctcaaatgtatgttttgcmtgctcacatatacaaaaaaattaaagtaatttcrtgatttttctgctttaagatttctttctctcaagcccatttcccacttacttccacatcccaattcaaagaatattcacttctcattaattctctgatcagatctcttttaggatcatgagcacagttgctaagacactttagtcattaatatttgttaattgtgccaacagcgataatgcaaactttgaaacattttacaccacaattatgccttattaaaacaatttgactgtattaaatgtgccttttgtgtacatctttgtaattatcaatttatgagttgaggaactaaaattattggtgtgcttttcctgagagaagagatacaggaaagtgtcacagatatttgcacttagagaaaaagtttacccagaagaacttacaccaaaatgtattgtcattattttctggaaatacatcaaaattcatataaaatgttatcttyatggttttaagcattcacctctgttctagaagataataaatacctgcaagtttttattgggctattactctgtggcagtaaatatgaaaagacccagacacatgagccatggaacacacaggaaaacaaagtatttactcatgaaaaccagtttgtttaataatgacaaaacatgttgacagtactctccagcaatactcagaatttacagttttagcgtaacatagctgattctcacctgcttccaagggcaattaagatcaaagcttctttaagagataagtatccaaattttagtctgtgttttatcctggaagtcatcttcctctttgcaaagatcaattaaatcacaagaccacaatcagttaccacagccggatgagcctggctgttaatgcataaactcactccctcatgagaatcctcaggaaaccacatgggatatggggcaaccacttgactgtggatacttcaagagtaggttctctgacttgggctccacccccaaggcccccataatgcccactgtgtttgctttcagtgggcattcagcaaaagccactgactggttaactgacctgttggtagctaccagaaaaaccagtatcttatcaccgaagagcagataaaaagaagattctaaatcaactgagacaagtttctgcctaggatgccttgatgtgttgatactcacagggtaaataagagacaaaatcagagaacttgagctgatcagctgagtgggtgcctggatactgagggtaatttgtagggaaaatttagtagttggggaactagcagagactgcaatatttgtaagatatctttacctasaagtaaatgatgctttggtttactgaagtaataaaaagttacagatgccctaatgtggtaggaatcaagttagacatatggttgaagaggagaaatgaggactcagtaataaaagaaagcataatggaaactataggcgcatttggcattttcatagataataaatacatatttaattatttttgtatgctatttctgacctgtgatatttttgaatatttactaagtgtacacatcaaggttggggaatttttatattacataccttttttagtccttaacaacaattcaagaaaagaggaaaaatcattatcctcattttgtataatggagaaactgaagtcaggcaaatgaattaacttgcctaatgttccacaggcagaaagccatgggatttgaattcgcagtggtcrtatttcccattgtaagcattcataagacatggtggccaaggagagcaactggggcagggtggggttttgggagtgggagtggggtggctgttcccatcaccagggaaacatcacctgtactctttcctttggctgaactgggatggtggatcactgcatttctttggatgatgagccattataccttcaccagtaatcagcctacccattggccacacacacacaagtcagacatgctgtgatttaagtgaatagtacatggccctgaatgcactcttataattttgattttggaaaaagaaaaacacaagaaaatatattaattcctccttgtcttttgagatttatgggtgtgcagaggtactgtaggtcccatgtcctctagtgtatcacactgtcctgagctttaattcaggtctaagaatgtctgtcctaccctctcaaaaatattttgaatggaataaatacctcctagttactgtctctttctttttgtagataatttgcccctttggctgacattatctttcttactaaacaggagtagtttttatgacagcatttggaagatgctgatagttaattattcatccaatgtctattaaaagggagaggtggtaaaaaacaaaacaaaacaaaacaaaacaaaaaacagttactggctgggtgcagtggctcacgcctgtaatcccagtactttgggaggccaaggcgggcagatcacaaggtcaggagatcgagaccgtcctggataacacggtgaaactccgtctctactaaaaatacaaaaaaaattagccgggtgtggtggcaggtgcctgtagtcccagctactcgggaggctgaggcaggagaatggcgtgaacccggcaggtggagcttgcagtgagcggagatcacaccactgtactccagcctgggcgacagagcgagactccatctcaaaaaaaaaaaaaaaacaaaaaacaaaacagttactcgtgaattcagctagaattaataacatttctatttgtattattctaactgatgatttaaaactatgcaaattgttccaaaatgtttgttcttgtttctctagatgcaatctccctcctttgtcaagtgaatacactaaggatgttggatccaaaagtcagttagtgacagctaatcccagcataattcggcaaaggtaagagtttatgacttctgtttgtgacraacgaagatgaagtcttctcaagtacttagcatttcaaaggcagtgagcataattcagtttgggaaatcaagaggaaaaccatctggacaggcaggaaggatgaagggaattgtaaataaagaaaacaggattatgggaatccaaacaatattttatgcttcctctgggattctgtttcttgcctttagagatgatagaaataacaagaagatcaattgttttgctcaaagaacagcacaatactctgtttactcattactgctacttttcaatttgttggcttcagtcccaatttattgattggcaactgtgaactgaattaatatcaagaataaaaacaaagcaatggccaatccattacattgctttggccaattcatacatgcattaaaatagcaatattgtcagaatggacaagaatatgtggttatagtatactgtattacattacattatattatattcaatcatatttgggagagcagatgtaaaattcttgttctaggatcaattccagaaatcttgaaattgcctggaatcttggaagctgctgtgggagctgcgggggtgggggagggggtcagtctctaattgatgaagtgcatcagcgagctatcagctgtttctccaaggactgttcattgtagagaaaggagtccgtctccaaggaaagaggaatcaagcattgctttaggtcctcctgtgtccctggcaattaggagggaaacatccagatgttctgggcccaggcgcttgtcatctaagtcccgtccaagtgaacagcatgtgtgttcacttattcacaacgtggcactacttgttttggttcataagtattcccataaaatagatatctagaaatgcaatcagcttttaattttgggagatattgttaaattaccctccccaaatgtaccatttatcttcaataatggataagactgcttgttacccatatgtaaaacaatactatttgtggaaaaaaaggatacattatattctacttaatttgcatttttctgaatataataagagctgagtggtattgactattagtattttttcttctgctcctttgtattttttgcctactttcgacttgctttaaaaaatatttttctattgatttataggaactctatattatggatattaagtctttgtatcaaatattttattctagcctgtcacatatattttaatttatattctattgcaatttaaaattttttatgcgatgagacttgttagtattttcctttatggcttcttttataaaaacaatctttctttggatgatctttcttactctgatgctcctcccttccctgaaaaaaatatcctgaatgtttctaatgcatttatagtatatatttagaaatgtaatccatgtaaatgtatttatttttgttcttataagagtaattttattatttttcaacacaaatgtatgttcattataataactcaaacagaaaagtacaaagaagaaataagagaacacttacaagaaatttttttattaaaacaatttatttttaaatacctgtagattcacagaaaattgcaaaaaacaatttacaagaaggctctacataatctttacccagtttcccccaaaggtgacatctttgactattattttgatttaggaataaaataacttttaagaaggaacacatgttcctttggagggaaatgaaacattcaatattgtattgaggaccagaagattctgtttttctacctgaatatgtggagttgatgtaagatttaaaaaggaatgtgaaaaagaatgttcagagcaagatttagaacaagctgagggagagagggagggaaggaaatgagggagggagggaaagagacgagggagggagggaaggagatgagggagggagggagggagagactgttttgggggaaaaaatataaatacaaatggaggaaggacagggtcaaaaattaaattttgaagaggaaagtagaactgttggttaagacttaagctcactatgaagaaaacacgcatggacaagcaagaatcattattactaacattggtaagtatttagttgacattgctgtgtgccaggttctgtgccctttataggcagttcctcacttcatccttgaaacaatcctaatagacagaagctattttaatttatgcatttgacagaagaagaaacctgtgatgtggtgaatctaggaacctgctcatgcacacagctgctaataatcgcctgggacttcaccaggcctctcttattccaaagcccgtgctctcaaccagtgaccatctctgagagaaaaaaaaaacccaaactgctttttcctctgttctcacactacaacacagaagactgtgacaaagaaccagggttggggggtctggctctttccagtgaccggtccccggcccccaccctgaagctgcataaggcctcaatcaactcattaacatgcaaaaagatagcactgtggagtttctaaagattttaggcattgtacgctacggaatgagatcgaagatctcaaatatctatttcataatattgcaccatcacaccctctgatctttttccaaaatccatgtgtcgcacaaggagacaatatagttttcccagaataatcaacatagaaaacttctgccaccaagtgtgtttgtgtttttcccccacacaccaagcaagcaatcaattctgcagcagacaccagcggggtatctccaactcaattccarcactatctacagatagtgtcagatcccacagattgagggctcagtcccacaagactaccccccacccccaccagtcacaagtctaggcctccggagcttctgactgactggcttcaagttggggttcccccaactctctttatgggtttgattaatttgctagggcagctcacagaactcaaggaaacgcttatttacgtttactggtttattatgttacaaaggattcagatgaaggagtgtgtaggatgagggatgggggaagggacatggagcttccatgccctccctgggcacaccacccccmagaaacctccaccttcttatctggaagctctccaagccctgtcctttcaggtttttatggaggcttcattagcaggcgtgattgatgaaaccattaaccactggtgatcaacttaacctgtaacccttttctcctccccagaggtcagggagtggggctgaagtcccagtcctagaatcctgccttgattctttgcagtgaccagccccccactctgaagctgcatagggctgccagccgtcagtcaactccttaagatgcaaaaaggtatcactgggagttgctraagattttaggagttacgaagtcgaagatcaaatatatatttcacaacattacactatcacaccttctgatctttctccatgattcatgtgttgcacaaggagacagtagcattttcacaggttataaataattttgtaaaagtgaatgaaagtttcttcattttaaaaaatgtattcaatgtaacaaggtttctgttcaaatcaatatgtgtacaccaattccattttgtgacataagaaaaaattacatttacaatagcatcaaataatatgatacacttaattaaacaagaaagcaagtcctctttggaaaaaatatgaaattttattgagagacactttagacaacctgattagatgtactataataccatgtgcatgattgaaagactcagtatttaaaggcaccaggtctacccaaatctatctacagattcattgaaattccaatagaaatcctaatgatgcatgcatgtgtatgtgtgtgttaaacttaaaaagttatgtagaaatatgccgagaatagcaaagaagctcttgaagaaaaaatgatgggcagagttgctctataagatgttaagacttattaaaaagctattataattaagacaatgtggctctggtgcaaggataaacsaactgagcagtgaaagagaataggctacycccaaatatttccacatagatataaaccagtatatatgacagatgtcatatttatatgagtgatataaatatgaagagccgagaatagcaaagaagtataaacttttcaaaatgatgttgggataattagattacacatgggaaaaaaataaattaaacctctacctcataacttataccaaaaattattttcaggtggttaagacctaaaaatgaagttgctgggcctggtggctcacgcctgtaatctcagcactttgggaggccgaggctggtggactggctgaggagttgagaccagtccggacaacatggcaaaacctcgtctctaccaaaaaatacaaaagttagccaggtatggtggcacgtggctgtagtcccagctacttgggaggctgaggcaggagaattgcttgagtacaggaggtcgaggctgcagtgagccatgtttgtgccactgaaccgaagtctgtcgagtgagacagtaaaataataataattatttaaaataaaaaataaaaccaactaacaatatggctagggacaaagatgtagcaagtaaaactataaggaacaataagtagtcacttctcagggtaggaagagtattggttcaggtgtggaataatgggacctctggattgctagaagtgttctttttcttggccaggctggtgtaacatggatatacactttataatgattgcttaggctgcacatgtatgttagatgcactcttcaatagatatactttactaaaaacataagaaaaragtatgctaagtgatggaggactatacaacttatagttaattttaaaggttctcagtttgcttttttgacataattgagttcgagacgtatactagagtgtaagttctatataaaaaggatctcagtgtcttgaacataaggattgataaaaacattttttttttttgagacagaatttcattcttgttgcccggactggagtacagtggtgcgatcttggctcactgcaacctctgcctcccggttcaagagattctcctgcttcaacctcccaagtagctgggattacaggcgtgtgccaccacacccgggtgattttgtattttttgtagagacggggtttcaccatgttggcaaggctggtcttgaactcctgacctcaggtgatccacctgcctcatcctcccaaagtgctggcattccaggtgtgagccacygcacccggccaataaaaatatttgaatagaaatatagttaaagccttatcagcaccactgtcagtgttgtgaagctctgtgctcaaattggaatacaatgttttaagccatcaattatcaactttccattttatagaagggatcaaacaggtagcaagtgctggaaacttttggttaaatacagctgagactgcattcatagcatcttgttcatgtggctagcagtatatgcaaacagggtggtaaacaaagtgcaaacacttgtatatagggattaaaatatagatgatgctatactctcatggcacagtaaaatggaggaaataatattgaagtgagaaaggcagtatgtatttctatattagaagattatcctatttatattagatattttattcatatctcgtagtcttctctcaaagctgtgcaaatccaagacatcrgtagttatcttgtactttcatgtgatgaaaaattaaacttgttgggcagagatgtgcagtggaaatgctaattttcatagctgtctccaaaaccttgattctcctaaaaatattctatcagaagttataagcattaagagttttcactgtaaaattcygttagaaaatatcagtaacaagataaaacaggttttagaaaaattaagcatacatatgtgagaggcactcataattatagtgaaaaaaagaaagttagagaaggcaatacttattactctatctaaaagaaattctcagtaagaaggagctttgctacagtaagaaggagctttgctacagcctttgttaggatatcttgtttggagtgcattcttcttgacagtacccagaacaaaaagattagttagggtgcctgagacataagattagaaagggctttgcagtcacattcatcctctgattgaatttttatgggcagaagagaggtggttttaatctggcagctggatatttaaactccttactattatcctttttcttcctttgctggcctttgcaggtggaaggcagaggattcatacatatcattacccttcatcaatgcaccatctgtagcccttgttcttaaaacattttggttcaaatactctttattttatttgtatgaatttaagggatatagtgccattttgttacatggctatattgtgtagtggtgaagttaatgttcaaatatcctttaaaagattttttaaatccatcattcccttgattatttttaattaacctaatttttgtggcataggttaaattgttgccaagtacggacttttcagggcattatatacatatgctttaaatatatatattgtcagaatttcagaagtgcagatctagttcttccaatgttacatgtcctcttggcaaaatcagtctctttgtcaaattaatttattaactttttgtcagaaaagatggacgatggactactgtaattcaaataagtgttacagtataacccaatataatgattgggtttaattatattggatttaatataaacccacttctcaggcttaattattcaacatatacagtatggggaactgtcaagagtttgtcccctggataaaataagacacagctcctttctatttcttctaaatacatttttgcttttgttcaggggatattccctcagaaggtatgtattttggaaatgtttctttgtttggtggcttagtggcttttatcctttggggcaatgaatcattataatatttgggataataggaggcatgactttcttttatgaaatagaaaaagaaaaattatggaaatagaatttggaaaasagagttctttagactgtcagattggtcttgagcaaatatatttgagaaaaatatacatatggagtttgaaggtctggaagtttatgggggggaggaggaataaaatgagagccaacaaatatttcttgaaatctactctgggacatgacattacaaagttgaatgagatggcctcaaaccctgaagttgctcacagaagcagacatgtccatggttgtagtgtccatggaagggattttataaatttgagggaatccttctatattagtccattcccacattgcttgcagtgagcagagatcgcgccactgcactccagcctgggtgacagagtgagactccatctcaaaaaaaaaaaaaaaaaaaaataccggagtctgggtaattcttaaagaaaagaggtttaattggctcctggttccgcagactttacaggaagcatgatgttggcatctgcccagcaactggggaggcctctgtatactcacaatcatggcagaaggcaaagggggagcaggcatgtcacatggcccgagcaggagcaggagcaagagacagcgagtgagctgccacacttaaayagccaggtctcatgataagtcacttactattgcaaggaaagcaccaaggggatggtactaagccattgatgagaaatcgtccccataatccaatcacctcccattaggccccacctccaacattggggattacaattcaatatgagatttgggtgtggacacagatacaaaacatattaccttctgaaattatacaaaatgttctctacagaaaataataaaaacttggctgggcatggtggcatgttctggtagtcccaggtactcgggaggctgaggtgagaggattgcttgagcccagaaggttgcgttagggttagggttagggttagggttaaggttagccatgattgcagtcttgcctgggcaacagagcaagaccctgtctcaaaaaaaaaaaaaaaaaagagttggcatgaactaggaaacagaaatgtatttagaacaaatgtagtaaaaatcatggtggagttaaacttttaaaatttgtaaatgcataacttttaattcaataaggggacttgatatgagacctcaatatttattttgaggtataacctgagaaatatcttcccatacaagtagaagagattttatccaatggttagtgcctctaagtttaataaagggaattgagaatgtagagataatcgcagggggaacaattgtttatgttattagtgtgctttttaaataataacttgagctttgaggaaaataacttgggtccaagattacagcaatttatctttaaaattgtgtacaactcaatgtacacaaactatacatgcatgtttcaaactgtgttcctaaaacttccatatctcttttgctgtctgacttctttttttttttcctccaaactcagagcagcttatcattgtttgtatcaaggcttcaaagtcattgatagctatttattctaacatctgttctgaaataagggaattagaaggcagataataaaactgaaactagagatagcaagtaggagatagaaaagaaaagcccctaaaaatatggatacatggagttggtatctgagaggcaatattatatagcagtgaagaacayaagttttgattagaacggatttgttttcaaattatagtgctagtgctagtaagtgtttctgcctactagctatgtaaccttagttacttaatgtaccatatgtcaattgagtataaatattatttaccttggggactgttgagagatataaatgagataatgtaactgcatctagtagaagctattctgactgatatccaaattagctactcaagaggactctccagttgcaatacattttgttcttggataaaacatattatttaatacattattgtactcatcagatttagagaaatttccaagaatatctgcatgcccaccttccccacaaaaaaaacaaaaacagaaaatgagggaacaaaaaccagaccaaatggtgtgaattataaaagtcaggtaccaaaacttagaaaagagaccaatctctggactcaccatgttgagggtgtcccatattaagtcctgagaaggagcctattgtggttccaggtcagtagcagcccctggcttccaacagaagcacacaaatttcttctggaagaaagctcatagaattctcacatactatgttcaaacaaatgatagctcataagcaaacactcaaaatgcacacaagccatcaatagtgtaaattctcagagacaaaaatcaaacaaaaagtaccagatgaatttaatgcctgagaacttattggaattgtcagatgcagtagattactaaatatgtaatctttatagaaaataaaaagaatgagaagccaataagagaatatccaaattaaataggtagacttgaaaaagacctaaattgaacttttagaaatgaaaaatataattgttgaaatggaaagacatcaaattagacataactgragagagaatttgtgaactggaatacagagcaaataattttccagataatgaggctatrgaaaatacaaaggcaagacaaagaaacatggacgatagaatgagaaggagtatgttaaagtggaattgtggaagtataaaatagggataagaactctttttcagaattcatgattaatgtgatccataagtaaaaagtaatgtgatccaaaacacaaagtatcaagcagatcaattaaaatttttaaaaatgcaaacagacaattttagtgaaacagagctaaagataataagaagcttataaaagcagacagaaagaaaagacagatcacctgcaaaagaataattatactaaaaacgaacttcctctaacagtaaaaatggatgtcaggaagcagtggaagagtatcttcaaagtgctgagagagaaactatcaacatagaaatgtatattctgcaatctatttcttcaatagttgtttcaatagaaaatgttttctgaaaaacagacacagattttttacctccaaagatccttcattgagagaaaatctgaagaatatacctcagaaaaagagtatgttactccagaaaaaaaacctgggatgcaaatgaattgctaaacatatcaataaatctaaacaattttatctgtataaaacaataattattatcatacattatttttgcagatgatttgtgtgatcaaaacgaaagacaactaaaatactggaaaatgacattgcataagttaggagggggagattgaagtgtttttagctcttctttcagttttttacttcttagtgacaggtcatcctttkgtcttaagcagcaacagcaataattttagtatctttcacgtttctgtgggtcaggaattcaggaagaactaggctgaacagatctgtctcatgatctctcacatggtggctggagttgaaatagcaaaggcttggagcagccggggctggccaaacatctcccttcctgtgtagtctcagggctttctgtgtggtttctccttgtgaattagtgtgggcaccctcacagcatgattgactccagaaagttggactgtttacatggcagctggctttccccaaagctagtgtccatagagaacaattggaattgcgtgatgttttaatagccttacatgggaagtgtgctagcatcactttcatcatactctattgcttgaagcaatcacaaagtcccacccaggtacaagagagaagagttctagcacagatccacctcttgttgggggggagttctcaagtcacattattagagtatgcatggtaggagagtttttgtggccatctctggaaaatataatctgccacagtctgcccttgggtcacaacaatttatatccctcacatatgcaaaataaactcattgccttcctgaagaccctcaagatctattccattacagcatcaatttaaaatccaggatctccaaaaggttgaaagaggaacagcaacaacaacaaaaaccagaaaagaataaactgaaaacaaaaatacagcagagtgggtccaaaaagccaaagttgatactttgaaaagtctaccacaattaacgaacctttagtaaagttgataaataaataataattattttaaaatagacttttcatgatttttctacaaatccatactaaaaaaacaagaaaaaactctactgtacacaaatatattacatacataataaatggataatgagaataaaatggtatctccaaacctaaaaaaaagccagtgattttgtaacttatgatatatccatattgatggtatactatacaaagatattatggattaatatacataaatggtttcaataaatggtgaaatgctcatgttctaatattaagtgaaaaaaataaatatataaatgtgtaaatatataaaattatatatatagttatgttcagagaaaatctctaaggaaaaaaaatcaacattttccaaagttgcaaaattttataatggggaaaaaaattatttaaaaagcagaccttggctgggcacagtggctcacacctgcaatcccagctctttgggaggtaggaggctgaggtgggaggactgcttgaggccaggggtttgagaccagcctgggccatatagtgagaccttatcactacaaatataaaaaataaaaaattagccagrcatggcgtctatagtgctagttgcttaggaagctgacacaggaggattacttgagcctaggmgttcaaggctgcagtgagctgtgatcatgccactgtactccagcctggatgacagagtgaggccccatctctttaaaaaaaggccttgttattttataatttttcctaatgttaacttattttgacaataccacagccctgtgagttggaggggcaaacaatatgaataaagccctgattttgtgtgtgggttcctgcccttccagatttaagtgagattaacttgaactccaaattttatgtacttaattcagagtcagaacgttctccacatctttccggtaaccttgtcctgagagcagctaaggtgagcatagcaccaagaacacaggacctgacacacaggagttactgcataaatgtccatttatcttctttctttctttccctctgtgaagctctagtcttcagtgttaatagcagatcagatcaaacattactctaaaagcaaaattagcacataattagtaaataaatatttgaatagcccaagttctcatggcactttcatgcaggcccactgagagtgggttgcacccagtggagaaacattaggggaggacccagcaagggtacgaggtggagaatctttacccaggatttatattgatatgccgatatgccactgggccaacaatttgtaccagytttctcccatccacccctcctcagccctctttttaaagtgtgcttcagttaaatatattttcaaatcagtaaaatgtcagtgagttgcaatttcagtgaaagaaaatgtgcggaggggtttctgtcagctaatagaacagcattggctgtgtgatgaaagatgagttgttcaaccactctctgcatggaatgtggcagaaaacatttaagtcagcaccagaattttgttttgaaggtgtgctgtctgtatatggaactgtttcttgctgaattctagggatcagggagaaactcaagggcctgtgttgtttcgggagtggaatctgagtaataggtgagtgtggaattgttgggataagcaaaagagaggggttgaggaagaaagaaggtctagagaagggagacgtggtaaaggagcaggagagaaatctttgggaaacttaggcatgttggctagaaacaaactgaaatgtctaaaatcaattgtaagttgtttttcagagagtgcgtgtcctgaaattatttccccttaattctctcttaagttctatgactcttcagatttctaatgtagccatgcatttttgtcagttttgtatgtgacattagcgtgtgtatgtgcacgtgtgtgtgtgtgtgtgtgtgtgtggtgaagggaatgtgcttcattcatttgggatcaacatggtttgttctcctgggtaatggcactgaggggacagagaggacctggagaatataaccctcctagggatgttcagatgcaaatcctgggaaacgccactttagcagttgactgcataccccttttggaacgtacagacaaccttttgacttacaaagctatttcattacagccaaggcatttgtgccccagcttaactgtggaaggcaaactttaagtgtaaagtgtgaaactggctaattatcttrccaattccatatatgccaagagcctctttgagcaagatggtaggggtccatctgtgaacaattcattgcacagagttgattatgtattccgtgatttcagattgtccagctactaatgaactttcttcattatcctcatgaaaacggatgacagtaacatttattartatgtgaatatttctattactttattaaaataaaaatgactttattgctaaatttatatttgtaattcattttattggagaatagaaaccctgtagattaaatagaatatagtcccaatgattactaattgtattgcattggattatatattgtttaaaacaatatttttattttaaaaaagttttctttccaactggaattataaaaacatatctgtataagtttctgttactaagttgctttaatttgtttaatagaattttaaaaatcagagctttagtgttattgcatttataaatcatgatatgcatttttaaccgaagtttccactgtagctttcatatctgaatctctttggacacacacaccctgcgcacacacacaatacatgcgctcacacacgtgcacatacacacactaatgagacaaaggagaatcagaatcacaatgcaaattgttgacaaggtcagaatataaattagtgggacagatatcatatttgataaatattattgcaaatacaaatgaagggaaaggcagaaaaaggaagtgctacccacatggttaaattaccatattttattgattgtgagctgcacagtttttaataytttaacatctgtgaaacagctgcttcttacagcctctgttgtccagttggaagctgaggcatagttggcactgggagtacatagttgtcaccttgctcatagctgctcctatgctgtcctcctaattaaattatgcacattgttgtactgcacatgttgagtttgattggcatttaaaatatctccaaaaagattgaatatctattgtgtataaagatggaaacaaagcctgggatgtaaatttgatttgtaagcarattacttcagagaaataatggaagcaattttatattttcttgtaaagcaacataaaaaaagaagaagaaaataaccaccagcggatgatggtttattttaagtagttactaagatgtgtgcaaaatgattgtctagacaaggcagatgaaagtaggaaaaattgttatgttccttagaatggatgaaaaatgccaaagcaagaagagactagtacaggactattcacaatactattatagaaacactgaggcatggttttattggcagtgtttttttctttatagttagtaaataatatctttttttttttttgagacagagttttgatctgtcactcaggctggagtgcagtggtgcgatctcagctcactgtaacctctgcctcctgggttcaagtgattctcctacctcagcctcccgagtagctggaattacaggcacccaccaccacgcccagctaacttttgcatttttagtagagacagggtttcaccatgttggccagactggtgtcgaactcctgacctgaagtgatccgcccaccttggcctctcaaagtgttgggattaaagtcgtgagccactgcacccagccaaataatatattatatttgataaaatataatttgttttaaacaaaaaaatctgccaattcctctgaaatacaaatgattagatagaaaataaaacagggaatatttggaggaagsatggcacataaaagaaaatactaagcactgcacaaccatgaggcacatagaactgatacgctgagaggtaagtaatgcatgtattagcattatcctgatttttcagtgaaaacttttgtgacagacaagttaggtgatttgcttcaatcagctattaagtggcagattaggcacttgaacctaggtctttggacccttttttttttgagaagtagtttgagagatactgtggaggggtttatggttggcatcgcagcttacccgtgttttactgcgagagaagagaaaacaagaaaattccaagaggtcaataatgagtttaccatttaaaagagaaaaggaggatttattgacttgagatacttgagtgaaactcctggggagacaaaaaagggtgatttatgattctgtactctgtatttcaaagattctgacagtaacagaatacatgaaaggtgaaagaatgcatgctcagtaaatgttaaaaaaaaaaatacaccaccacagtactctactcttaaacttgattgatatttttgctgggattttatttctactttggaaatccttttagcatttcgaagatgttcctccaatgtttcttcctagattcagtgttgcttctgagaaaactgatgtcattgtgattcctgatcttttgtgtatgacctgtacgtctacttacccctgcattctaatctggtcgtcttcctcgcctcatattttgaaatttcacagtgatacgcctagtgattggcttaatttcattcattgtgctggcacgcagtggaccttttcaatctgcaaggttatgtcctttcattttggatatttttcttgagttattgccttaattctgctttgccaattgcagtagtcagttgttagttctcttatttgacccaccgggaacatgtgacacattgatttttctctccttaaaccacttacttcacttagtttccaagtcaatgctgtttagattctcttgccattttattttttatttatttttatttttatttttttgaggcagagtctctgtcacctggctggagtgcagtggcgagatcttggctcactgcaacctccgcctcccgggttcaaaccattctcctgcctcagcctcctgagtagctgggattacaggcatgcgccaccatgtccggcctattttattcactttctacaggattttatccagtctcagggcttaaatactatatgtatatcctctgatgactcttaaatttgtactctgagacctattcttttatctccagactcatatacctaactcccagcttggctaatctatttggatatgtaatatgaatatcaaacttaaaataaccagtacagaactcctaattcccccttttctgcaaacctgtgtattctgtcattttccccatctcaaagaaatggaaactccatttttcatttgctcagctcaaaaaccttgaattggagtcccccttggcttattttattaaatccactgctaaattacggtggctctactttcgtattttatgaccattattcacctcctccactgtcatgaccttggtccatgtgtctcccgaataattgcagtcatctcccaataagtttttatgcttccagcctcaccactgtgctrtttagtaacttattgcctctcagctgcaaaaccactttcatataccctggtttgtgttgctgaaaccatgattttacaaatcacgtttcccccttgccagctagtttctgactgggggcactagagggacactatgggaggctgaaaggggaaagagatttgttccttcctgctggtgtcctgtgggtctcctgtctccttgtggttcctatgagaataaccctagcaaccattcttttccatagcagtagctaaattcaagtggcagcatttctcagcactttaaacttagtcaacacacatgtaagagattcttattcttgtcttttaaactttgacatttgtaaaaccacaacaacccagtctaagaataaagcaattctttgggaggctgaggcaggcggatcatgaggtcaggagatcgagaccatcctggctaacacggtgaaaccccgtctctactaaaaatacaaaaaattagccgggygtggtggtgggtgcctgtagtcccagctactcggggggctgaggcaggagaatggcgtgaacccgggaggcggagcttgcagtgagccaagatcgcaccactgcactctagcctgggtgacagagcaagactccatctcaaaaaaaaaataataaacaaaaataaaaataaaaatcttattgcattagcacaaagtagaagaattagtttatccttggccatcccaaactcttatgcttctttattctagccaggcattttcttcccacatgggctggtttttctactttaaattatcatttcatcttacaattgtatcctgtggtactcttcacagctcagaaaaaaaaaagcttattctaattaatttgataaaattattagtctcttacctgttttggagtgaaggtgttagtgatagggtggtgatcgtggaacagttggaatgtcaagtcagcatttccagcaggacatgggtctttggaaaatcacgtgcaacattgttcatttaattcatttggaaattcattaaattttccaaatacaagtatttaaatatataatattatatatgtattattatgtctattatatatttatatataattaagtataattatatctataaagtatataattatatatttaaatactcatgctcacttattttcacaactcaacttacaaaacatcaagctcaccaacatatttctagttttttgggatatgcagagatgtgattcttagaagaggcctcactttccctgggaagtgcatcagaatcggcagaggcagtggcccaagagatcttaatgtttattaaagataaatgtgggttagaaacaacagcctggggactgctgctttccattaccccctccccaattgtggtatccttgctcccattcccagtgatgtggtgttccttggttccaagagccccatcccccagcaatgccctgtgattcagatcttctcaactcaatgtctagtctctactctattcaagatgatagtgagtcatttgataaacatatctttgttgaaatgttagtagtttataaggggtaatgttttacttctctctgtggttttacattttaactggagccaccctgaggaaactaaatgctttaaagaaatagaataattctttaactggagaaactgcagacactttgactgtcttgggagtgagggctgggcaggggattttagacgggggattggaaaggaatccttcatgttctttacatcattccatttatacagctagttattcctagggctgaccttgctaccacaagattaatgatggcttttggagaactaatgggaaacagactctactcttttgtattacagagccccagagagggcaggattcagagtctatagctgtgctctaagactagaggctcttagaaggttgcctttttcatggtttacatctcatggcaacaaattctgtgaaaaaaagagatttcattcctcaaatatatgctagatcataacatgtgcctgatatcactaaaaccccagaaggcaaagatttcataacctttagatggaaaggttttctgatttttgtgtaagagcattattttgtaagagcttgacactrtttgtttgaacaattgttaaataaatattttgaaacagagatttaaagtcctggacgaatgaaactagtggttaccggtacttacattacttgatctctgctgcacttaacacatgtttctgcattcttgatattctttccaccctatgtcccaacacagctctctttactgtttcttgttatcttcctttgttggttttcctttcatctgctaccttaatgttggtgttcccaagtgttgaactaccactagttcagacctgtcccaggccttgaatctcttctgtgcttcagacagctatgtgtctactggccaactccacttagaaatccccaggtacctcatgtttcatatgtccttaaagtgaataatttttctcccatcaaaccatccttgatcctgtagttatcatcacagttattggcaccatctttcaagccatcatggtggataaccttgaagttattctttttttttttttttttttttgaaacccggtcttgctctgttactcaggctggagtgcagtggtgccatcacagctgactgcagactcgaccrcctgggctcaagcaatcctcccactttggcctctcaagtagctgggactacaggtgcatgccaccatgcccagtgaattttttgatttttgtagagacaagttctccctatgttgcccaggctggtctcaaatccctggcctggagtgatcctcccacctcagcctcccaaagttttgggattacaggcatgagccaccatgctcagccattgaagtcattcttgtacatcctcattgtcatcawccctatctattaatctacaaacactgttaatatcacttttacattatccatgaactctgttgctgtctcagtatttccactgccattgtctttgttcaggctgttctaatcccttgctgaaaatagtgtcctaagatcttccttcaacacccctcccctgtttttttacagtatagatttgtctttaaaatccagagtcaatattcttcactggctccccattacttttttttttttttttttttggagatggagtcttgctctgtcacccaggctggagtgcagtggtgcgatctcagcttactgcgacctccgcctcccggcttcaagtgattctcctgcctcatcctcctgagtagctgggattacaaatgcccaccaccatgcccagctaatttttgtatttttagatgagacggggtttcaccatgttggccaggctggtcttgaactcctgacctcatgatccacccgccttggcctcccaaagtgccaggattacaggcatgagccaccttgcccagcccccactaatttttaaatggaatctcgggtcatcatccccaccactgtctcctactttcttcagatgccagtatcacttgtcactctccagggaccacactcaccagtagctctgcacacatgcaatgtcctctgcctagagagtctttctttgtattgtcccttacaaggattagctctccaatggcaatgactctgtctctttttatctttttattctcagtatctagcagagtgtttaacacagtgagtcattagcaagtatctgggttagtatgtgccattctggtgaaatgttgtattccaacttttaaattaaattagcataaataaacacatagacaaaaaaatctacaagagaactgaaaaatagggataagagaaaaataaaatgctagaatctgcagggaatttccactaactgcagcaaggagagggttgggttgagagtcataatctaaactaagcctgctgaaccagaatagcacagaaatctgggaagaagatgggaaaagactgtgactcaaycccactctatccactggcaaagaaacacagaaaatcccaaagctgtgtgaattcttttcttagctggctagggccatgccctttctgctcttaatcagttcttctctttcctcatccacttgacaaccatacttcacaatacacaaaactgccatgggtagagagggaaaagtagaggcagtatcactttgcaggctgagctgtgtaaagactttaggaaaccattcaaggagggaagatgagaagaagagcccttagaacagtgcagctggaggtgcaatttttatctctatcactaaaggaagaattaaattctgcgtatgactccctaaccatcatcagacaacctgtcagttggagtagaagatcttccctcagtttagcaaaaattttagatgattgtttgctagacatgagaaaccaggctcaggacttggcactgtggcattctttgtaagtctaggtctaagaaagaaaatgcacaaatactcaaatgattagtgcctgaagataaaaggataccatatatacctttttgaaacaaatatggttctggaataagtttcttgctttatgtttgtttttctactatttaagagaaataatagaaaaaaaatttggtatagaacacctcaaaacattttttttgtgtgtttttgttttgttttgttttttgagatggagtcttgctctgtcgcccaggctggagtgcaatggcaygatctcggctaactgcaacctccatctccgggttcagcaattctcctgcctcagcctcccgagtagctgggattacaggcgcccaccaccatgcctggctgatttttgtatttttagtagagatggggtttcaccgagttggccaggctggtctcgaactgctgacctcgtgatctgcctgcctcagccttccaatagtgctgggattacaggtgtgagccaccgcgcctggcctcaaaacattttgtaacacagaaaatgtgacttaaagactcagaggaaaggtcaggtgtggtggctcacaccagtaatcccagcactttgagaggccgaggcaggtggatcataaggtcaagagatctagaccattctggccaacatagtgaaaccccgtctctactaaaaatacaaaaattagccaggtgtggtggtgggtgcctgtaatcccagctacttgggaggccgagacaggagaatcattgaacccgggaggcagagattgcagtgagccaagatcatgccactgcactccagcctggcaacagagccagactccatctcaaaacaacaacaacaaacaaacaaacaaacaaaaaagactcagaggaaaaacacgcatataaacatgctttcgcagaggaaatagaaaaaatttcaaagccttagcttggtgacttaataagaattgacccattaggtgcacagagtggttaggagaacaaaggatgagctgaaagttgagatgaaaagagagatggctgagagcaggcagaattgcaaagaaagcaataaagttcatgttggatgttgcaaagagcagagttacagtgcagaaagtaaaccccttaatatttccattttaagaatgtcgaggaaaaaaactcagagagatgaatataatgagaaaaaaaagatgaaggaaagggaaaggagattcatcctaaagatgacaagtttgctgaagaagaatcaataaagaattaaaaaaagtaatcatcagacccaataaggaaaaaaaaaaaagttttaacagccawaaggctttccagagctgaaacaggactgggtccacaggcagaagtacttagttacattccaggtaaaattaatgcamaaagacccacatttagacatattgtgatgaatttttacacttcaaagataaagagaaaaactctacaagcatccaatcagaaaaatgtgatttacctacaatggagtaagagtcaaggtagcttcaaacttttccctatcactaaatttcaggacagatgtcatggtaagtaccaagatgtgaatgattctttaaaaagtctagccaagttgtcatatatataatacgagggctgagaaaggttatttctcgaatattcttcttgaattttttgagtataaaatatgtactatatacatatgtattatgaatatgcactacagctgagagtcaaatattcaagaataagaaatttgcagtataagatactgatagtaattcaaaagcaattaaaagtatacagattgaaacggtgtgctggtaaatattccaaaaccagctctggggtggggaagaaagccttcatgtttagtgtttgctgatatacatggtgtaagtgccgcccccacggccaattcaagctgccattgtgatgttaatgtggagttggggagtgataaaaggtaaattgaggtacactaaaattttaaaaagttgatttgagcaaacagtggttcttgtttcacaaagcaccaaaccaaaggtggtttcaggctttgcagagggaatgcaaggagaaggctttttatggggtgaacgctgaaataaagcaagaaaacatttgattggtaacagttatagagttgccttaattggtctgtcctgcggaaaagtgtttagttatataaccataagtttgtwcgttggtggctattgagcttaaaaagtttcatttttctttaacataggtgtttacaagaaatattaatagctcaagttttgtttcacttatgtttgcaaatcaagcaaggttaaggccacttatgagctctgactggctttgtctgctcaggaattcctcagccstggtctccattttaatttactttaataggagaaatgtgagcaattggtcctcacatgcctactaggatccagctactagtaggatccagatcctaataattaggatctggacctattagttcactctttgagcacaaaataacttaaatcttcatcagaggccatatatcaaaattaactgtataatcattttattagtttcttagggctgctaccacaaattaccacaaaccacaaaaacaacagaaatttgttttctcagaatttyggaggctagaattttgaaatcraggtgtcagcaaggtcaggctctctgtgaagtttccagggctctagaggagggtccttccttacatcgtcctagcttctggtgctgtctaacaatctgtagctttcctggctgatagactcagcactccatctctgcctctgtcctcacacagcattcttcctatgtatgatctatgtcactgttttttctttttataaggctgccagtcattggatcagggctcaccctaatgtgctgtggcctcattttaacttaactattatatctacaaagatcctgtttctaaataaagtcacattctgaagttctgagtgggtgtgaactytctggggatcagtacaaggatttgacccaagagaaagattcacacattaaatgtaagaaacagactacaaaaattaaaagcattagtgtgaatacttatttgtcttgaggatagagtactttctgctggcagaaatcaaagaaaaatgatttatacatttgactccaaaaatttaaaatgtgttcttgtcaaaaacataaaatctaaaaaccgacaattatttgggaaaaaattgcatcagagataccaagataaagtataaataggccaggcgcagtggctcatgcttataatcccagcactttgagaggccaaggtgggcaaaaccctgtctctactaaaaaatacaaaaatgagccaggcctggtggtgtgcatctgtaatcccagctactcaggaggctgaggcaggataatcgcttgaacccaaraggaggaagttgcagtgaccagagattgtgccattgcactccagcctgggcrcagagtaagactccatgtaaaaaaaaaaaaagtataaatatatttttatatatttataaagatgatatgtaaacaggtatgaaaaatattgtagtctcaggagataattggatgtagaggtagaaaagtcacaaaggagtaaatacagttggcttgtaaaataagtattcagtcatattaataaatatactcacattagagctggaagcaaattatctatttttaacaaccaaagtagaaaaataaagagaaatgataacaatgctgctgtatattctcatgcactgctagtgggagtataaattagtacaacctttcttttaggaaaacaaaagaattgacatgtatcaagaatcttgaaaatgttcctaccttttgaattcataataacacttctaaaaaagtcagaaagtaataatctagcaatgtataaaggataaagatgtagaaagcaaaagaagatataacagaattaagtrttattttgcacaattagaaacattctattgttaaggatattgcagggaatataattcattctaactagcctaagcataaatgggtttatttaaagggattttacagctgtcgagagggtgaagaaatagattcttgattaaggaaatggaaaacagctccaaaagccaaatgacagaacgtctccagcaatcaatagactgcagaatcagtcagaatcagaatccctgccacgttgagaagccacaacttcagctgctcactccagactcatgctgcttgaatcagaatctggcttgaaaaatgggcccctgtctcctcatttaacccagttcagaagtcaggactcacacaggtacatgacattggctgcgccagcatcacagctggaatcccggctataaagaagtctgagaaaggcagttcttagcttttccactttggactacaggaagatacagaaggaggttgaaatgattattttgtgatccagtccatacatgcaccacactctaaacattcaaattataagaaatgtattcaatggctttaaatgactctgaaatacttttgattaaacattttttaaaaagcatgaaatagaagcatatataatgcatgatctcatctatgtaaaatatagaggacaaaacacctgagaaatatgtcagtgcattaaacacttgcatgaaactgtaggagttgttctttttcttaattataccttttctgtttcctaaaatgaacataaattaattttataattctcatttcccatcaaaacaagcaaacacatgtttgttaaataaatgaaggaagtattgaggacatgaatgaaaagaaaataaatatatccatggctgtttctttcgctgttttagggtttgaagagatcccaaaaaggcttgttaatttccctctaaatttggctctttcacatcaggcatgagttgtagctgctgatgaaatactagaggtagcacaggctagtcatttagactggaatttaggggtatttgtgtatttatgtgtttctcttgggtaatatataaatatatgtgtgtatatataatatttgggttaaagtatatgactatttagaatcttacttaatattaaaatgtaaagaaactaattttatttatcaatcataaataaatcaatgagtacagtgattgcttccaaagaaaacaaaaacctagagatacagtgtatataagtatatgtatatatgtatatgtgtatatatayatatatggtctttttctagttaactgtcaataagattacttacacttctttcacatacagtgctacttttaattaaaatattattggtattttgaatgaatactttttactgcttgttaactgtgataaaaataataacttcttcaatgtcttttctctcacttctttaagtattagagattttctttctggaaaattagagattttctaatgtaaatccactaccaaaataaaaatactcgagtagagcaaaaagttactgtctacagtttttccctcgtgaggcagcttctcttgctgaacatgtttggaccaaactttccaacttagcatgtgatctagcacaacgattcccttggagattctgagggatgatttgactgccctacctcattacaaggaattccttcagtgtgatgttaaaaggtgtggactaatgtgttaaaattaacccaataataaaacaagttaaataagttaagtttgtttacttaagtttgttaaatgttaataaactttttttttgaaatttattcttaatataaatatatttggtttcttatcctaatacattgcaattataagatgtactattaagaagattccaaagttcactgtattgtgcagtttttttaactttcttttccatttttgaaaatgggtgaagaatggtggtattagccatattttagagagagaggagaatgactgctgtatatacatgtaacataygcaattcgttattcaaaatactttttaggctaggcagacagtaactgaggacacttagaaatggaagaaattactatttgccctacatctaatataggtataagcaaggaaaaggtttattttaaaagctaatccactaacacttgaatcacaacgtgaaatgaaaatagatgttctgttttcaacaactgtaatataattaactcttaggctctgcttttacttagcctctgaatcaactgttttgcagtctactgtggtttgtttggggctgtttgcagcacatgatttaaagaattggaggtgaaatgaaatgagtgtataatttagtctttgaaattgaaragagcaagtgagacatttcttctcacctcctcttctttgttattttctacactttgctatttctctcttygtctttattcattgtggcagataaataatgggatgagtgataggaaggaaaatgatttttgttctttttctctttttgcatctcaacctctttaatcatacaagtttttgattgcctattttatctttgctgttgtttttggtaatacctctttatttacctcctcttcctcttgtccttttgcttcccattcttctgttctcttttttccctttcttctccatctgtctccactcatcattttttttctttccaggtgatgatgtaaattggaaagttaggrtagtggtattgctggtgggcaaggtaggtgtctgaaataactgcatgcttctccaaggagactggtggcctaggagggagccatcttggtgctaggagagaatgaaaaatggctgaagggaatgcccagggatggacttgagatgctacctccagttctccatagcctgcatgtgatattttgggaatcatgacatttccacactgccaatatgtagaaaagcactaaaagtactgatggagcaaaaagggctgaaggcagagaaaaggcaggcayggattactgggacagcagagaaggttagagacttgagttctggttgtcagcttggtgtccagaaaaaccagacataccagccatgcagacaccaccagtgccaggtcccaaggacaagctcagatcaacttcaccacaytggagacagcataaggatctactatttccgtgaggatcctgggaggraaaaattagctctgaaggagttttgcgttttaaatgaatgaaatatttgcccccaacactgtttttactttgaaagacacttaattgcttttaattggcaaatttaagggtttttcttccgccgtcagtgaggatgggaacatcagagtaagatgaaggcaattgcagggggaaaaaagttagacttttgcacatgtgagttgtgtataaattttcaattctgctattaggggtgtgtatatgaaagacaaaaatccgtatgttaattgaggtcaactctgaatggtagaattgttaggtggttattgttttccttctctgtctctctctcttattcaatatgcatttattaaacactgtccctctgccaaacatactcctttgtgcttatctttatttctaaatttctctacaaataawatatttctgttttacttttgtgaagaggaagacataattgactgttatttaaaaataaatctatcctattcactcactgtagtatttgagtgctcgtgtctcatcatgtgagttgaaaacaaggccttggagttgactgttctgttcctcagtatatgtttttgaggttagttaaatataagttccaaggtttgcaggaatcattttgctgggcttatgtagagcttaattcccatgcaaaccttttcattcactattttaggctatgttgtgattacatacaaactagaactctgttttgatcttcagaagtggaggaagtttgtagagtgttatgatactctggtactcaagtgatcttactgaaaatggattaaaaaggttcatgtgaaagtcaaatctggtagttggttcttttttaaatataatgattcctctatgtgggtcaagtttttatcacaccatatacaatggaaattcattgcagatgggtcatgcataccctggcatgatgtcttatagcagcctcctaacgtagtcattgcaaggtgtagatggcaggcacataccagtgagaaatttccatttgctttcccagaactagcaaatacactctctagctgctttaaagatcctgtaaatgatttgttcatgataatttcattttaaaaaatcctccataacaaggttccccaaattaattatcttgtggcttgtggtagacaacaatcaacctgccgggtcacctaaccaaaggcaaggtgagtggaatattaagtcctctcttgcttcttcagatgtagtctgaggcctgggaaatggtttcaagtgccctcgcctccaccctatcctggctctgaagtgcagctggtsctcccttccactgctgcatcccaagagaaggatccctgtcttcacacccttctcagattttcagtttgagtttatgacacaaagggaaattccaaattacttcttaacttttaaattgaaggataatcaaagagattatacagatatcctgtctatgtaactatagaaatataataaaattaaaacacagtgtaatttacatttgtggtatgttactggcaagaacttttaataaaataataattgaataatgaaattcatcattaattaaataaatgtgatacctataataaatrtgtaatatattaaagctttcaatgctaatgcaaatagttctatcagttgttttaaattagagtatagagagggcatagccaagttctttgtcataaaataaagatgatacattttataatattttggtgggattccattctcttataaaactttgcttacatttagcttgtttcttttggattatagaaaagagattctttggtattccctttctgctctgacaaagaacatgaaattcaccattttcactgatccctgcacttattattccttgctatttcttttttattttattttattttatttatttatttttttgagaccaagtctcactctgttgcccaggctagagtgcagtggctcaatctcagctcactgcaacctccgcctcccaggttcaagcaattcttttgtctcagcctcccgagtagattctcctgccttggcctcttgagtagctgggattataggcgcctgccaccaggcctggctactttttgtatttatttatttatttatttattttgagtctcgctttgtcacccagactggagtgcaatggcatgatctcggcccactgcaacctctgcctcccaggttcaagcgattcttgtgtctcagcttcgcgagtagctgggattatgggtgcccgccaccatgcctggctaatttttgtattttttatagagacggggttttgccatgttggtcaggctggtctggaactcctgacctcaagtgatcctcccatcttggcctcccaaagtgctgagtttacaggcatgagccactgtgcctggtctattttatttttttgagagagtctcactctgttgcccagactggagtgctatggcataatctcggcccactgcaacctctgcctcccaggttcaagcaattcttgtgtctcagcctcctgagtagctgggattacaggcacccaccaccacacctggctaatttttgtattttttgtagagatggggttttgccatgttggccaggctggtctcgaactcctggcctcaagtgatctgcccccctcagactcccaaagtcctgggattacaggcatgaatcaccgggcctatttcttgttatttctaagtgttcactgacagtttggaatgtcagtcacatgtttaaattttatttcacaaaacaatgagacatgagaaatgaacagttatttacattcatctcattattctgataatgcctatataaacaaatgcacagacataccaaggctaggaagtggtttcctatkaatttataacttgtgtccttggagataatgcttatttctttggaagggttcttttaagattcaaattttcatcacttgcttttgcaaagaggagagtaatgatgatgatgataatgatgatgtggtgatgatgatgatgaaagctagtagttgtaagacttattatgtgccaggcactattctaagtgtgttayacatatgaactcatctagtcctcacaacagccctatgaaatacacgctattattatttttttcaaatgagaaaattgaggcataaagcaatgaagtaaccagcttaaggttgtgcagtttgcctgtggaaaaggcgggacatacaggcttctcaaaataccttctctaaaatttgaaaccacatttgagaccatcatctatattagacacagatatgaacatgaaaatcaatgggttttccaagatacagtctatttttaaaatataaggtgttgctttacgccatcatctccatttttttacttaaatggtgatagtctatagattagartatacttcacttaatattatgtctcaaaataaattaatatctgtttttaaagtttagtatggcsttaatttcatataaagaaacttaaacaaataaattgctcttctgagaagttcaaaagggagagaccataagagatgaacacctatggtcaaaacaacagcaagtacaattttatttgtcctggaaaaaaaatgagatttttctaaaagattcctgatattaaaaatggttgtgtgatttgtggaaaggttgatgtttctcggaaattaccatattctgtttacaagaaaatgaactagtgcctaatgagagatttgtatttaagggtgctattcagttcctaattacccgttttctggcttcaggcaggaaaatagcttgcataaaagccagtgatagaaaatgttgcatgacaaatgtgaaggcaatcaaagtatctcttatgttatcttggtattccttaaaaaagaaatagcatattttgctttttgtataccatattttggtaagaattaaatgcactttgtgacaaagatacaaaaatgcttagaaattcactcatttcattatgcatttatttgttcaacaaatatttattagatactgcattatgtcaggcatagcattagccttagggaacagcaagataaaggacattagtcttttctgaaggaattccataaaggagatctaaaaattaagatataaagacatggcaagatgacaagtaccttgataaaaataaagtgataagagaacacaaagttagatacctaatccaggctcagggtcatggaaaactttttatagtagataccatgagttgagttctgaaagattagtaggaattagcagggcaaagggggcattcactttagacagaacaagtagcatgtgcaacagtttagaggcttcagcgagcatgacccttttgatgaacaccaagtaatygggcagggcaagggtagggagtgctgacgagcagtggcaagaaaagaggctgaaggtgtaggcagggattatatcatgcttagactttatctgaagatgaggagaagcccttgaagaatgcccccttgacaggaagtgacatggtcaaattggacttgggacaattacttggggaggattgagaattatgcgttagagaccgatctgttaaaataagaaggaggaggcttgaaggtaacctgaaattaaactgtggtactgaggatatgcattagttagggttggccaactgccatgataaactaccccaaactttcatgacgtaatasagcaaagcgttctttctcatccagacacratttgagggtgcacagaaaaggggaatggttctattctgcactgtcatttatggaccccaaattattccatctctggttccaccattcccttagggctatagagtccttgagtagatcctgttgttgctgaaaggattctgttgttgctggcagaggaaacaactgtstttgacctgcataatggccactttatgtggctcagcctgtaacactgtaatagatagatggaaaggtaaacttaagagatgctatgaaaatggaacttagtgaccaactggatgtagaagttacagaaaagggaagaatatatgtttttagtttggttgagtcactgatggatggttgtgcaatcttttcatgcaaggaatgtrgttgtcacaatagatattggaggaaagttgtgagtttgagatgcttcccacagatctccacagggctgactccctaactttctttgaacttgtgttaaaatgtcaccctaaacaaaacagcaacactctcactctgtcttttcttattatcccactttattctcttcatagctcttcccaaatattgttcattttttggtttactggttgtctcttcttayttgaatgaaagctccatgacagcagagactttgttagcattgttcattgctacatccctcagtgcatagaacagcacctggtacatgataggtactcaataaataattgctaggagtgtgaatgaatccaaatggaaatggtcagtggaatgaggctttccagagagtatgggtgacacaagagaagaaatcagtcattgagagaaggaaacagattgggaagtacctagagaaagatgcacttttgagcaaatttttgtttgttatgttagttttcagttgggggagacttggaaaagagtctatatggaggaaggggccaatgatgtggagtaggcaaagagaatgatgtggaccaggtcctgcagaaggtgagaaggaacccagactaccagggaatgaattcacaggacaggagggctatgtcttctactcagggaaaagctrcacaatataattcagagcatagaatcaagtgtcaggctgatctgagttggaagccagagtctactacattcttgctatgaaattttgctagaatacttaactgccccgatccttaattttctcaacagcagaaaagggataatgccttcctcatagagttactgcaaggcttaaatgacatgacatgcattaagcaagaatcttgtgatggaatttgttgattatttctgtaatttaattatagatcttttgatttttatctcaaattattactagtgtcataaataaacaagaggccctatctaktatatgttttttttgtttcatttgctccaaaaggatttgggatttcatgtcctttggaattttgaataagttttgagggttaacatcaaacttgttgtcaacaagccaaatccggcctgcagagttatttcacttggctataacattatttttttctttttaacttgaaatccttaaatgggacatgcaacaatccatttccaggtctactccctcttgtcttttgcctgggctcttcatatattttcctaatttacttggcctttgtagacaacccatgatctagactgatttctactatgaaatcaatttcatagtaatttctrctattgatttctrctataaaatatctcatacctttaatgactctcatattgcaaaatccccacagaccactttctgtctttattttattgatcttgcctcaacatttgccactgttgataaacttttgaaactcttttttcctctgttttctgtcaccttccttttttgtctactctttgctgcagctctgtctcctttgcccaccatttaagtgygataatttgtcagtgtttttattttagctcactgttcttcttgttggctcatgtctgtggctcaacatgttcaaatttggataatagtctttctcttcaaaccattttctcctattgtgttacatatcacaatgaaagcagtcgccagaaatccaagccattcaatcccccaaactgaaaccactttcacatctagaaataataaatattcaacaactggcacagtgtagacattaaataagactggacagtgccctgtacacctcactgttgcttcccagctaaagatcagccctccacactcagttacccaagccagctcctactgcctctgtggtaacatcattttaccatggactattcacatgctaatgtgttttcattttccttgtaggtaaaatctcaaccttgagtggamtagatccttccttttttctgtcctgtgcatcaagctagctacacctctagctgctcccaaggctctcaactttaccatattaaattgtttgcatttccccaggtactaccygctcttaccacatgcccttgcccatgctggtctttcagcaaagagtgctcttctccttcaactccrtttgcatagctactttttactcattcttcaaaattcatttcagatatatgcatatctgaaaggcctgccctaactttcttctctcttagcaacatcgccagtctaggtttggaacccccatgctgcaagtattttaaaagcttgcatttgtaagtcatattttattattgttatagcccaacaaattcttcttgcctgctgcacagaaaaagcaaatacatggaaacatcaggtattataktagagaaagaatttaatcattgtgkggtgtgaagcaagtaggatgggagatatttctcaaattcacttccttgagaactgagaggctggggtttttaaggataatttggtgggcagggggctagggaatgggtgcggcygattggttgggaatraaatcatagggatgttgaaactatcttcatgtcccgagtcagtttctggctggcaggggtgggtaacaggacctgtggacctgtcgagtcagttctttggtatgggtcatggattcaggtggcatgagttggtctacctgaatgcaaaagtttgaaaatgatctcaaagaccagtcttaggttttacaatagtgatgaatatacaggagcaattgagaaagttacaaatcttgtgacttctggttatrtgattcctgagcagtgagcagttatggaaaagcaatctagggaacaatggctggttagtgtttaactatgcctacctcttagcagaattgaggccccactgtagtcttacaaagatggtgtcagtccccagggatcagtttgggaaagggactattatcatccttgcttcaaagttaaactgtaagctaaattcttcctatagttagcttaacctgtgctcaggcatgagcaagggcagttagcttgcgaggtgaagagcaagatggagtcagtttatgttagatttctctcactgttacaattttttttaaaggcagttcatgtcttatctatcaatggaatagcttgacctagaatgttcattgcaatctggcaaagtactttcctgtggaagaaacacacccataaaatgagaaggtatggaggaggaaagtattgtaaatcaacataaaattaacattcattgacagaaggaaaggaagtaacagctgggtaaacaaacagctgctcagagacagaaaaatgacagtaagcagccatgaacatggaaaatggtccccaaatattagaaaagcaagtaaataatatgaggaaatgaattaacccattggaaaattgctgaagcatttgargaagaagtaaataaaggaagtgttcaaattaaagttattatacagagaaaaagtagaacaaatattgtgtgtaaaagaagtggacttttaaaacgcaatatggtcaggagataaattaacttgaaaatttatatgagttattttttataaatgtgttttatactgcacagacaacattataagaatattaaaaaaatcaaaagaataaaagtacgccataatcctcacttatcattgtgttgaaaatagtaagttagggccgggtgcagtggctcatgcctgtaatcccagtactttgggaggccgaggtgcgtggatcacctgtggtcaggagttcgagatcagcctggccaacttggcgaaaccctgtctctactaaaaatacaaaattagctgggcatggtggcaggcacctgaagtcccagctactcgggaggctgatgcaggagaatcacttgcacccaggaggtggaggttgcagtgaacctacattgcaccactgcactccagtctgggcgacagagtgagcgagacgccatctcaaaaaaaagaaaatagtaaattagaaaatcacaactggtttactttgcatttataggattactaaagaccctaaccttttaaaaggacatatttaataacacaagtaacatacatatattcaccttctaaaaaattaaaagcattacagataaggctttgaccttgtgaaatacatatttgatcttcaacctatttcatcacatacaacccctaaaatccttagaatgtccacaaggtgatgtattttgtatgctaatgattagccaatcgttagcatgcaatcatggttgacagcccctaggtagcttcaggctgggagctgatcacaggaaagaccaaggcatgattagaggattgagacttttagccccaccccccagtctccagggaggagagaggggctgaaggttgaggtgatcaccagtggccagcggttcaatcaatcatggctatgtaatgaagcttccataaaaacctaacaggacagggtttggagagcttctggatagctgaacatgggaaagttcctggagggttgcagattccttcctccatacattgccctatgcatctctccctctgtatcctttgtaatattaaaaggaaaactttagacaaattaaatttaacagagtttaattgagcaaagactcatgaatcaggcagcccctagaatcagaagtggttcagagaaactccaagctgctgtgttttctgagagaatttatggacagaaaaaagaaaatgacacgcagaaagtggcactgaggtacagaaacagcacgattggttacagcttggtgtttgtcttacttgaacacagctggaacggttggccacctttggctgaaacttggtgattggtacaagagtaggttatggtctttttacacatcctgttaagttacagttcactgtgtatagagaaatctttaggctgaacctaaaatatgtgaagaggcagctttagactaaacttaatttaacagtaatctttataataaaccagtaaatgtgaaygtttgcctgagatttgtgagttactgtagcaaattaatccaacatgaagaagggattgcaggaacctcagcgtgcagccagctggtcagaagttctggaggcccagacttgcaactgatgtctaaggggttgaagggtgtcttgtggggtctgacgctatctctaggtagatagtgttggaattgaagtggaggacccccagctggtgtctgctgtaaaactgattgcttgtttgatgtgtgggggaaaaaacccacatataggtcacagaatttttctgtgttgattagtgttgagtgagagaacagaaaaatcactttgaatttgttttttctacacagagacccttaccrctacctccataccactgctatccctggaggtaaccattttttttcagctttatgtgtatcctttcaacattttcccatgcaccacatatgtatatgtaactatagaaaatttctatctttatcttttatgatatgtatatatgataatccactatacaaactgcagtcgtaattctgcaacttcttcatgtttctatataacatttgtcttggaaatatttccatttcaatgtaaattagagttatgtcatttaaaaaaattgccatgtatcataatatggatataacataatttatttggcattctattagtgatggcatttaggtggtttctaatttcctgcatcctccagcagacattcatggatatttacttagtgccacgtgccaggcacccttcctggtttggaggatttaatagtaaacaaaataatacttcttatgggcatgtaagaggagacaaatataaatgaagacatgtatatgtaataaaatattatgttgtatgatagaagaaatacaacagagacagtaaagatgtatattaaaatatatctgaggaagaaaatataaaaagaatacaacaaagatgttgtaaaaaaacatacagaaagaaaacaaagatgagagagtaggtggcagtaaaggcttctatgaggagctttcatytgagccaagacctaaaagaagtgatggatggtgccctacaaatatcaaaggcaccagctgagaactggaaatgcagggtcaataggtgtgcatatttgaaatgcaaaatcactttccaagctgtcagtggcaattcatactcccatttgaagcataaaagtgtactgtttctcacagatttctttgttattatcartttccttaatttgcaccagtcagatgtgtggaagactgttagtttgctatagttttgttataacttgaatgcgagtgaggtcgtgcttattttaatatgcatattggccctttgaatttcctcatctcggatttggcagttctacatcgttgttcatttacccattgtgatatttgcatgtttgttattaatttttattgtttgtgttctggatactactgttttgttatgttgtgctatttgctgtatttgttattgatttttatcatttgtatccttgatactaatcccttgtcatgtatgttgtaaatattttcatcccaatctgctgcttgtctctttaaaaatatgtttgtagaagactttcattttaaagcagtcatgtttaacaattttttatggattttgctaaggaattgcctcatgtttacattgtcttttgtgtcctaaaggtcttaaagatattttctcatattttcttttaattttatggtatatgattattccatctggagcttaatttttgggacaatgtgaggtaggaatttatcttattttctattactggctagccagtagacccagtacaatgtatggaatagtagatttttatgaattggtttgaaatattacttttggcataaaggaaatctccaaaaatgcttaggtacatttttagactcattctcctgtttcatcatacatggtttattcttgtgtgagttccatagtgtttttattactatagttttataatcagttttgacattggtaagttaagttttctctgttattcttttgtccaaaattactgtcagtatacatactaatttatacctctcatatgatgtttagaattaycttatcaaattttactttaaaataatgttgggatttttgttgagattgcatttgaacctacaaatttatctggggaggcatctttcaatattccttattgtccacataaaaatgttgtatttatttttaggcttatttcaaagtgtttgggggctttgttgctattaacaatgaaatttttgttttattgtattattttaatatatgattcctgctgtatagggaagctaagactctattggttccaataaatatttttttcagttgattattttgtatattctagataggtaattataacatcttcaaatattgacagatttccacttatatacataattgaaatatgtttaaaaaatttttctaatgcagtgtgtgtgtatttttatgttgttgacttctcatttttttacattttcgatcagacagtgtgacccgtatgatgataattgttttattattgattttgcttctttttttttttttttttgtgagacagacactgtcacccaggctggagtgcagtggcacgattttggctcactgcaacctccacctcctgggttcaagcaattcttctgcctcagcctcctgagctgagattacaggcacctgccaccacacccagctaatttttgtatttttagtagagatggggtttcgctatattggccaggctggtctcgaactcctgacctcgtgatctgtccacattggcctcccaaagtgctgggattacaggcgtgagccaccgcgcctggctagaaattttctattttatgtgttttaaataatatattttaaaattgaaaactcattatgattgtggacttgtgaatttctatctgtagtttttattggtttatgctatatatttttcaaaagctatcatgttaggtatttaaagtttcttgactattattattttggtagtcttgtgaacttggtcaatataaattgttttatcttttttataattttaaacattaaatttctgtttttaccaaaataatacacatacgtggaaaaattaacttgtatgacagagctcaaactgaaaagcagcaatctcctgtctcagaccgccccccactcccccaagttatgttccaagaaatctatacctttcaacttcctcagctgattttttttgtcacatgtgaaaacaacatgcttaattacagttcttaaaatttcaacttgtctattgatttcttatggaaaaatatactgagttctcttcatgtgctcctcacagcacggctgtctaccctatacacttatactttcttgacctctcagtccagacatatcgcaatcaaatcaatagtcagtgtctacctaaatgtagttcacatctgagataaaaagtttattacaggaattgatagcctgtccacawgtaaattttctcccagagtgcataaagcccttccatgcagcagtcgcgaatccatctctggaatcctttgaaagtgcagctcttccatccctgctgcacattggcctatctgggacactgtttctgttgagacattcatctggagctgtatttttctcttacttgaacctgattgatggctttctaggcctactgtatagctatttttctggagctttcctttacccaaatccatcatttgttatattttttaaattgccagcagcactttcttattacctaaatgccttttctttttatatcatcctagcccagatgtggtagccatgaacatgaataaacaaactaattatagatgtttaagaggtttcctctgccccttgaatgattttggtttcctctgagtccctctgctctgactcttatgttggacactatccatcagtgtcttctgagcttggctgtgtgttcttgtttggtgactggaagctctgtgcagagactgcacctgtcaacaggtgggttttactctgggttgagatggtggcaacgttgctttctcttgggcagttcccaaatgttactgcttgtaggtcttctccttgggctactcagtgtcagtattccacttgggaactacaagcctgactgctgatattgtatgagtcgagaattccatttccctgggctgagccagctttctggacacctacccactcttcctacctggaaactgacgcgtccttccacatacacggtgataattgatcggtgcaggattttagggttcagcccacctgggtgtctctgctaccccataatctgaacaataaccttgctgattgctgttagacaccactttccctagtatctcctgcctccaggtatagggcattgctactgctgcctttcagaggaatgctcaacaagttccttcatgctctggtttcctttggtaaactgtctgtttttttgaggtaacctagattcaggatccactgaggtttgctttcttttttattttcagaatggagatagatttttaaaaacttattttctcctatttctagagatttgtcataggaggtgagagctttattcaccctttattgtgttcctttctattctattaatattcctttttgtattcaatttgcgtcttgtaactgtaactgaatgctttaacatttttaattgaaattctttcaagattaattgtccattttcatatcaatgtatccatatattcagactctacaatttatcgataccaatttatgtttgttatatttgctgtaaatatttctcagagtaattccctttttactttagttatcttattcttcatggtaatgaaattttacaacatgacataatcaattttgttaatattttcctgtgttgaaatatattttgcaaatgtctgataagttcatgattttttttttagtttttgtaacatagattttatttatttatttattgagatggttgcccaggctggtctcgaactcctggcctcaagtgatcctcccacctcagctgcctaaagtgctaggattgtagacttgagtcactgtgccagctagattttaaatatctatcttacttatcttaaaattatttggtaattgtctcgtgaagtatgaatctgttccctctcagatttccaaattgttagctaactatctcaatattgtttattaagtaatttaaaaaatcttattggttttgtccccattatcatgtattcaattcctttataaaatgtgctatacttttgtcctttccactctgtttttgtttttccttttatgctcatattgattataaattaatcatttctattttaataattcatgggctgatcttcatttttatttttaattcataggctggtctgatttcttttttatttttaaaaattactgtttagtagttttttattcatatagtacacaaatattctgagctacgttataaaaattaaaggatgaatagaacttgtcctttgttttcaaggagtacatagtcttagagagtatgagcaattattattcaggaattcaaagaagacttttgaaagcttaagttggaaggaaggaataagcctaataaaggaaagcttaagttgagttttgatttataggcacaacttcaccagggcaatgactagatcagcaaaaatgaatatatgcaataaaaattgtggacaggtacacacacagggatggctggagcatagggtgaggacatgaggagtagctgagtatgaggctggagagacaaactggagcaccactcttttctaattccagcttaattttgtaataatgtaataaaattcaataccaaccccattaaactcttgatcagggtaatattaaacatattcagtataccataacaattattgaattgaatctaattcttaaataataatgtcatttgtcacagaatgggagaggtaaaaataataactgtcaataaaattaggactatagtaaattcaagctgtgtgttccttttcaaagtgaaaacacagaaagggaaaactactcccttcaagactaatcagttggctttaagacaggaaacacaaaatcaatcatcttgactttattgaagcagtgtgtaattctctgctagtatgtagtccacagagacagggatcagttccatcagccagcagggccctgtgaaatgggagccattctgtacaggaataaggaggaatggaaggaagcaaggaaagcaatagaggtatcctaactgctctagaaggttgatggtgaaatgacagaatgagaatgtagcactgggaacggtatgagcatattaagaagagttttttagttctaacctgcttgttgtaatcatttcacaatgtatgtgcatatcaaaacaccacattacayaccttaaatatacacgatttttatttgtaaaatataccttagtagcgttgaaggggaaagttctaaccgtatttagaagacagaggaaataattcagttgagatggagaggttgattttttttttgaagaggagagatccactttggaacatgagttctttaggatatgtgaaacagcttgtctcaagatacagaggggaagatggagcacttcttagaatggcagcaaggatgtgattagaagatgtaaagaaaaaggtggtgagagatggatgcagaaagccagacagcttacactgatgctttgatcttctaaataagtatgtcccacctgtgtcagattacccaggagtactaggtaaaaattcagcccctggatcactctcatcagaacccaggaagctgtgayattagtgaactctctgggttattctaactaaagtgtgagaaccaatggctcaaatggagtagcaggttatctacacagtgtgtckatatgattgggaaagcattagtgccacccatattagaagatatgggtgggcgatggaagaaaggaattgctaagcagagcccatttggaagttgggaagcaggaatttgtattggagaggctggcccagctccagatatggttgaatgtgcttccatggcttcttctaagttaaagtgaatctacctaaagaccctgttattacttctgtatcaggacccagggaaaaattgataaagcaggctactggatcaagaaagcaggctactggatcaaggacatgaagacaacttgagagatttcccttccttctggccttgagaaacatacctttctgggcaggcagagtcaataatgctgattgctacatacaatcctgtggatttgtgtattcagaactttaatttcacataattatgatgagcctgccaacatgtcaggccagactttcctctgctagttgtggctcagtttattctttgatgctgctgctccacctgcatataacccaagatgggcagctcccatggtgaaaggaattaaaagttgcaaggccctaatctagktcattgcttttctctctctctacccttctctctccctctctttctctctctctcttttttttaacttgagtgtattagcagcctcttacctggtctccaggctaccagcctcttccttccaaggtaatcttctattctattagagtaccttttttttacacagactgacagttgccataagtgctgtaagcagtcactgctgtgaagatttcctgtcaccacagagtgatgttctaacaaacaaaacagatataagacgtttttcgaagaatgccttgtcttcagccactgctgccgccattagcacctcctacattctagggacagggaatccttgtcattgcctcagtatattgcgtactcttgcctgtaaccaaagtatcccttcgagtttagttgctgttctttctgttgtttccctataagaagtgtatttaaatgttattcccactctgtagctttcttggaccacactccctctttccaggcagaattatttttttcatctgtattccatagtactttatacaagtatcaacattgtatttagaacattctattgtacttatttgtatctttgtttctacaactgcactagaatttcatgtaatccaaactgaaagaacataggaaagtagagttctttggagcaagcaatatgggcaactccctgcatcattttgtaatagtaacaagctttcctttttccatgtaatattatagttgtagcattgatgaatctgaatatttatagaatcatagaatttcagtggggagaggtatcttagaagtgattcctttgatttgcagatgaagaaaccagtcttgtggttatgttagaccacctaagtacctttcatcaaaatcccagccaacaaccttcaggaatttatgagaattaaaccgttttccatttcaggcaaaaacgttctgggagagaacaaatgtataatgcattttagtttagagggagccccattaacaaatgttaactgcgttttaagaagttggggtcagggaaaaagtcaggctatttgatgagagataattgataagttcaaggaggattttaaatacaaataaagtgtttttcatgtgtttcattgagatgatttgaggtatcagggccaccagaagacaacagagtgggttttggtgagtttctttttctctaggtttaattgaacagttttttttttcttcaataggtttcagaaccttctgtggtccagaaagacatttgtggacaacatgaaaatytataaccacagttacatctacatgcctgccttttctatgaagacaggaacagagccatctttgagggtttattatacactgtcagatgttggtgccaatcaaacagtgctgtttgccaaccccaactttctgcgtagcattggaaagttctggaaaagtagaggaatccatgccaagcgcctgtccacaggactttttctggtgagcgcagctctgggtctctgtgaagaggtggccatctatggcttctggcccttctctgtgaatatkcatgagcagcccatcagccaccactactatgacaacgtcttacccttttctggcttccatgccatgcccgaggaatttctccaactctggtatcttcataaaatcggtgcactgagaatgcagctggacccatgtgaagatacctcactccagcccacttcctaggaacaatggaagaagaaavkactgaaccagggtatttttgttaggttttctatgtgactccaagagggaatggtcaagttgtttcatgagtttgcatgggcccttggaaaaacaggaaaggagcaatgaagatccaagcaaaactttactttcagcgttggcttggaggacaaataagaaatgaaacatcctatgaaatactttatagcacatggcagatttgcaactagtaaaatgctggtgaaatgctgttggtaaagcacatggttcaaatctagaagatgcagttcaaaaacaagacagactcgagttgttagggctgaggaaccaatcaaggtagaacaaagaaaatgttggggtaaaagtgttgctgattgtcaacacaaactggcttaataatattaataagaacctgtcttattaagactggctttagaaccgtaggttttttwaaaaaattattatttatttttgccctctttggggaagtgggtgggtagatttaaaaaatcccttcctgagtaataaagatacaaaatgttactgctgataattgtgatttgttgagccacgtctatattaactatagctcccctctatttttaaaattttacataagaattgcttcttcctcttttgtcaagtccacagagacaatgtgaagcattattgaatttagactgtgttgcttcatagtctggataacaggagccactttccttcctcagaatttaggacataaacccaattttaggtctgcattatgtaagcctgtttgcattgtcatttttattttagtgcaaaagactaccaatatgagtgaattatttgtttgtaaattggcataattgtcttcataatttaatgttcagaaatgcagtaaagcacgttgatgaaaagcttagtctctgtggaagacagaccagaagacaaatcccttttctatctactgtggcatattcactgcaaggtaaaggacatgtatgcatacatgcaagaatgaattgagcgaaactttgaatatgtttcctcttttgagctattgttatttagtagttacctaaaaaagaatacatttttactagtataccattaaaaatgtaaaaggcttaacatgtatgcatacatgtagacacacatacacacacacaaagttaaacaaagctcattactgtgcaactatgaaagctgaactcatatgacctggtatggcaaaaatttgtaaccagtgttggagaatcacaaatgtgttatgcactatccattacatgttgatataagacaaccgagctcactggttgctgcacataatacccatagcagcacaagatgcaagtcttacccccaaatgcttacccggaatgagcagaattgtcttactcatcctgattttacccaaaatctcatgaatgggcttgctgttgagcgtggtcacacaaggtatagtttgtacaagtaaagaaatgtgaattagtagctatttatttccttagtagcaggtaggactacttagcttgttacaacagctttgatacacagtaagaaaactctactgacagattacaagcagccaaatgtgtttacatttcagagaagggtaagggaagcctctcgttgtcttcatactttggaatgtcttaagctaaaatgtgacactagagttcaatttcttttttattttaaatgtcactaaattgtaggtaaactgtaccaaaaagttctagtttaattttaacagtaaaaactcagcataccatgttaccacgtaaacaataatggctggtattttctgtgggttaatttaacatgacataaacataggaaagcccttggcaaaattctacatcattgaagtagaccatttctaaatgcaattaaatagtgaggttattataaaaattagaatttaaaatatgacttgttgatagtgcagattataatgttacttagaaagttaagaattcgagagtaatgatgctattggagaactggtttgctatacggcagcaaaaacataatgagaatgtaccatgaagaaattgtgttaaatattcactttgagtgaaactttaaatatgtttcctcttttgagctactgttatttagcagttacctaaaaaagaatacatttttactagtctaccattaaaaatataaaaggcttaacaaaaacgcatataaaagttaataaaatgttactcagattagtactttaattgttaaaatgtaattaatgagctccatagagcccatacatcacagttccattgaaaatatcatctggactagaatctcttaaacccaggaagtggaggttgcagtgagccaagatggtgccactgcactccagcctgggtgacagggcaagaccctgtctcaaaaaaaaaaaaaaagaaaagaaaaagaaagaaaatattatgtggaaatttttcatctttttatgatgcctgggatagatttatgcagtagatttatatataatgtttagtttacaaacttgtgaaactatttcatgtgggttctgaaaggcaaaacagaaatggccagtgctggtgatgtttgattagaccagctcttctcagctggggtgattcattatccctctctggtgacatttggcaatgtctggagaccagagacattttttattttcatgactcaagggtgctaatagcatgtacttagtagaggttagggatcctgctaaagatcttacaatgcacaagtcagcctctcacagcaaaataattatccaggctgagatgtcagtagtatcaaggttgacatctcagacctggattagacctggattagaccaaaatgaaattttgattgttccaccttgtcttcacttaaagatagatatacatgctcacagcattcaaaatatgactacaatttaatgaaaatattttcttatggtagattacaactcactagatacaccatacatatgccttttggacataattggttagataggagtgtgtgtgtgtgtgtgtgtgtgtgtgtgtgtgtgtgtgtgtgtgtgtgtgtagcatgaagttaggcatctctatccttaactgtgctatgtgttcctaagtaaggacctcgctagaatcatcctgtagagtgctctggaatactctattattaagatcttcaattctaagctcccattatctttctttgtttatctgaaattaagaccttcagaattaggcctggtacttttccagatttgatcagttacattttgatataactgactcttaaaattcagcttagaagacattcaataagaaaatctttaatcacttttggtgatgcacctgccaagagggggcatcactttgtaccatcagactaattaaaaaaattgttgtgtagtcataaaaattaggctgatccataggggcaaaaggaagggtgaagagactaaaaactagtaccctgatagaattttagtttttattagcctcgatttgagaactgcattgattccaaagatcatgaaggtaggtgaaggattaagtcattccataattaagaaaagtaatgtttatatgaaagatttttatatggacaatgactcacagacacatatgctttgtatagaggattttgccaaaagtttatacaaaattgcacatctaaactgcataattctcatacaagaagttaaggaagtgctcactggattttgcttctgtatagttcacttttatctgtcttcacaagggtaggaagtaaatgatctcaaatggcacatgttcagacaatactgtgtttggctttgtgatgtctcatgtctttctcttggctaaaaaaaattgtttaggctatatataacttgtacctgaagcaatctggacaacatggcttaaaatggaaaataactgaaaaaatcctgggattttaaatttgccaaaaatacccttggattagtcaaaggctttacaagagtgttatagatgatccaaaatggaaacaatattgataacatttcttttcgtcagcagctacatattccagttttataactttattatatacattttttgattattaatagaaagtcagccatccagagttttaacttctgtggttgaaatattgactttgtgaaatttttcactgacaaatacttgttaggagggacctaagggggaggggaatgttaccagtccactgaaaactttaggaaatgttcattgtgttgtgtaaatactttcccaccagcaccaggtaatatattctctatgtttgtagaattccaaagatcaaaagctgtaaggacgtttatgtgaacttgacgcaaacttgtggaggaataaggactgagagtaatgttgtgctttttctttatcttcccgtcgtataggtcgactctcaggttatatgacttttattgggcacacgtcaggggtggaagtggtagaagtgggttaacaatttcaaggcctggcaacctaggtcaaaacctctaataaagtcagcagtaaacataactagcaacttcattccactatgtgctaggaggagggtgaggcaagttgaaaggagatgaccctatccccacactctcaggatgtaaaagggcagagtgctctctacccttaaccttggctttttagcaccgtcagtctctgtcctctcccaggagagctgccttggctccagagttgagctagtagcattgtgactagagaggtagtgtggaaattcgctgaggacctcaaaattttacactgccttaaactgttttgtttttgcttaaactcgtgctgtctaaatgtgggtgttttgtggcagagtctgatcaccccgacctagttatagccctgccagtgattctaaagtggaacttttccccctcattcatatggatagtctgagtccttgaagctagggagatatcaaatattctaccagttcctacatagcttctttaaaagtcctagagactaactcacaggaagtctgaagcccagagcgtctgtttataaactcctaaatatgaggccacaatatttaggttgagcactagaaaatttctattttgcaagtggaaggagacttgaatctataattgctgtagctttttttcccttctatcataagaaaatggataccatctgctttaccctcagcccagacttgtcttttgaattttttacatacatcttaggggtgagagattgaaacaagtgcatgaatgaaaagcttattgaaacataacacagcccctgctcaccatttcagtaagggaaaatacatgtttctgtttccctctaatttgttttctctggtgccaacatttctgatttcttctgtctctaatacataaggaataaataccatattttaaattgacttacatgcctgcgagcatttgccagataatcaaagcctatgactctaactttttaaagcacagaagaggaattatattttatggtcactcctctgtgtttctattgatctctatattgtgctaaaattctttcagrtaatttttttcttgttgaagctgtgggatataatcaatgatgccaagctgtctgagaattttatagaataatatccaaatatattgatcctgcctctttctgcttctatgtaattaaactttcttttgatgtttatttttaaaatgtatgcttcacacaacaccaataaacatctaagagatgtgatataatccaaggcaaagaaaagtaagaatcagttaatgtctattttatctgcacagcattacgaacagaaaattgtaataaaaaaaggtttaaccaaactgaaaaaaagagagacaaaatcttggttttaatttgaaaagatgattgggagtgatctcagaagagagttcagcaggaagcaaggaagaggctgttgaccttgagtgcagcctcaagaatggaacctttttgaaatattttaaaggaaatatcttgtcatccagctgttatggttaataatgaatagttttctctgggtgaagcttatccatcgcacacctgatgtgctggcccctgcgatttccccaaatgttggaatgttgcctgcataatttgtggtaatgggggactgtgttcctgcttttacctggttacaaaaaacaaaacaaaacaaaacaaaacaacaaacagaaaaaaaaagagagaaaagatgctagaggaagcagtgtgacagacagatcatgagatgctgacggagagaacagagtggtacctgtttacccacttggaccatgacagtatcaaggctccaccccttgctgtcccttcccaagaggtgctctcctgggagtttgatcacagtgaaacaacactcccgttttctttttcctttctttctttctttcttttttttttttttttttttttttgttgagacagagttttttgctcttgttgcccaggctggagtgcaatggcgtgatctcggctcaccgcaacctccgcctcccaggttcaagcgattctcgtgcctcagcctctggagtagctgggattacaggcatgcgccaccacacccggctaattttgtacttttagtagagatggggtttctccatattggtcaggctggtcccgaactcctgacctcaggtgatctgcccgcctcagcctcccaaagtgctgggattacaggcataagccaccgagcccagccccacactcctgttttcatagcccttttttgtctgtactttggtacatattccccaaataagattattatttacatctgtcatgatgaggcagtgatagcagcaagtgtcactttgaccctcacccttggaaagtgggctatgcatagctagagttagaacaggaggttctaaccctgcttccacaattacttcagtaacaggcttttgtatccatgattacttaagctgacttagatgcat

SEQ ID NO: 95214 - DNA, 134518 bp, Homo sapiens
ccccagggcagctgagcagacccagaggtagctgccacacaatccagcagtaagaacatggatagtgccttcctgctgctcagtagtagcccaactttgtagaggtgacacaggctgtgcaacaggtgatgtcaggacatagtggagctgagatgcaaaatttctgagtccagggtctagagaattccctggcaccaggggcaaagctagctatggagtacgggaagttcccccagccaccttccagctgcaactaaacgctgagtgtcaaggacctaatgactgtcaatataatgggcatgtcaacgaaaggttatgaggggctccctatgtcaagctgtggctcagacagggacatcatttagctagagacagccacaccaaacaaaaggttctatcaacaatttctaaaagtctgaaaatgttttagagagtattaaaatgattttctgacctatttttgctaaaacatatttcactgggtaagcaattttgagaactacatagttttagaagataagacggactctgtacatatatatgtgtacatgtatgattttgacttacatattgtgtttaaatattattttatattcagtattttggttctctgcttctaccctttcttccacctccataattcatacagcagccacaatatttttttaaatcacaagtcaaactacatgacacctcttcttaaagccctcttctgcctttttcattttcttttttttttttcttttttgcagacagagtctcactctgtcgcccaggctggagtgcagtggcacgatctcagctcactgcaacctctgcttcccaggttcaacagattctcgtgcctcagcctcctgagtagctgggattacaggtgcgtgccaccacgcctggctaattttttgtatttttagtagagccggggtcttaccatgttgcccaggctggtctcaaactcctgagctcagataatctgcccacctcggcctcccaaagtgctaggattacaggtgtgaaccaccgtgcccagccctttttatttttcttaaaatgcaaaccaaaatccttaccaaggccaacaagccactacatctcattgttagcgctcttcccctcagagactcctacactttaccacactggcctttctgctctttgagaaagagacatatggctcctgcatcatagatttgcttctacctggagagttttccctcagaaagcctcatgagtctcccctgtcattatttagtctctgctcgagtgtcacctcgtgaggaagtacagtgtaatagttataaaaacagacccagaagccagactccctaggtgtcaatttcaatgttaacatttagcatctgtaaggccttgacaaaattaacttctttgtgcctcagtttccccatatataaaatcagaatgattatagtatttacctcacaaatttgttgtgaggattaagtgagttaacatatataaagggcttaaaagagtataattcagtggcccaggacaaacacttgaaataaaggatttcctttatttcaaaaaaggcaaaaggcaataaaagaaaaaaaagaaggattaccttcaactaatttgcttcttagtaaatgactgagtcattgcattactcttcttttctaggacagagataaaagcactttgcaacatgaatctgatctcttaaaacctctgcagcagaggcccttatatctgcccactcccagttgcttttcctgatcctttgacacctttaacagacacttgcctgtcctcaaacattgtcatgtgtaaaatactacaacgtgtaaaaaggaaacattttgcatacagagatttctgcttgcacttgtctatcatttatttattcatttagtaatatatattgaatgtctgccatgtctgacatttatcatctgccaaaaataactaggtgtgtctattttctttaaggaggagcagaaattgatagcccgggtacatgctgattctggtagtaagtaatcagagatgaaaagtatcaggtaagaaaaactggaatacatgccagaatttgaaaagagacactttcatctcaaaatcaaaatcaaaacatactgctagttactgagtaggcatgggaagacaacggaagacctagaactgtcgcacatacagctttgctgagagctggatgagaaaatagaacattgtccttagaactatcatttttcctgctttatccccataccatagttttatttcgacaattccttattgtttgcatctcagctcaagactctctctaaagaaaatcattgttgcccttgctcacagacatttctaaatatccctggccaaaatgttctgacacataagtgtgtctcagaaccgacagtttcccagcagctgaaggaaatgaccttagttcccaaagaaagtctaacttgcagaaaagttactcgcttaatgaacatagggcagcattttctcccctccaatatttggattcattttgttgttgttgtttagcgacttggcattcatggagccagttttccctttgataataaatcaattgtagataaagaagaaagaatgaaaagatatctacatctcctggggctcccactcccaacttttgttattttcagcatggaaggtagaggcagaactgtagttagtgtctccaaggaccagtgcattaaagtaaccataacaaatcctacaggctgtttaagaggaaacccaagggccatgttcttcccatgatctttatgcacaattctcatcaatggtgatgggaatttccccacagacctagaaaggatgtgactcttaattacaccccttgataatcacactgattcaagtttaagttcaagaaaatcttaatcagtctttagcttcagatcaaaatattacgttggagcccactttcattttaggttatttacatcttcatgaatactcttttcaagaagtgttcccgttctcatgaagattttcttggctgtaccatatggcactccttcctccactccaatactccctggggtagttggaatgaaactattgccttacattgagtttatcttaattatttgaaggaacaaaaatattaaagctagatttccacatactagtggattgcttcagtgggtatggaaaagtggaggctaaaacagttgtctgtaaaactgaagtttatagtacttcaaaaggcttcacttatttgccattgattgttgaagaaagttcacattctttacacatgatagtcaagactctttgtggtttgattccaacacacctttcctgcctggttttctaaccctacccacaacaccttatgaagcttcaagtttactgaatgcttcactcacattctgcaagttgctgagattgaaattctgtgctttctctatcaccacaaactactatttttacaaaaccttctcaaattctccacctaaatcactcctttttttaatccctacaacgtttacctctatttattggttatttcataataactggtattatatagcttttgaatatcctagacatctctctccactagattgtaagtcctttccccaattacttatcactgtgcttgcctaaatagatggcgatagtagcctgatagttaccaccccaaaatccattattcattttccttcatagaaacagagtttaagctggacatatgaatatccagcgagagattacacattcccagtagctgtgtcagttacttacggtcatgtgccaaatctggggctcaatgtcctatgaacagaagctagtggaccactttcaattcttgattttaaaaactctgagtttgtatgtcttgaccttttgcacgttccgtggagtgagcacatgtgtgatggaaatccagctttgaccaggctgatgaagataaaacctgtggagtaaataagacggaagtaacctggcacagcaaatcactttgtgcaacagggccttgcaagcctgggcttcctaattttagccagttacacagatgagaataaacatctattttattttggtaggtttttggctttttcttttttttgactgcttgtttgcatgttttcttactacactacagtttggcctctattctgaataataaaaatgctaaattatcaaatgcaaaggtaacccacagaatggcagaagatatcttcaatttcatattctacaaaaattcatctctagaatgtataaaaaactcttagaaatcagtaaaataaacttgggcacccaaatagaaataattgacaaacaataggaaaaaattacatcacaaaaaagagaatccagaaagccaacacacatatccaaaggtacttgatctcagtagtaatctaatgcaagtgaaaagcacaatgtaatgccattacacactaccagaatggttaaactgaaaaagataagggcaagtgttgaaaaggatgaggagcaactggaacttaaacatactacaagcgggagagtgtattgtcataactgctctgaaaaactgtttggcagagtcttgtaaaataaaatacaacaaatgctatgacttagcagttccactttaggtacatctacagatacttatataaaaaatttttatagtatcactgttactataggtccaaactgggaacaacccaaatgtccatttacaataaaatggatatgtaagtatcaatatgtttatacaatggactactacagaactactacaggactactactacacaatgctctgtaccaggcattgtgataaaacctggggatacaaattataaaccaagtcaccacaaggtgcctatagactatagcctaacaaagacatttaccaaaaagtgcctgcaaagatatattacaagacagtggttacacgcaggaactttggagtcaggcagccctggcttctctgccacttacagtagtgggaccctgaacaagttcccctgagcctcaatttacttaatatattgagtaaattagtattatagtacttagtttatattattatatatactatatggtatgctatatattatatataatatacatatacttattatactatatgtatatatatagttattttgaagtattgatgagaatgtgttcagcacagtgtctggaatatagtaagtgctcaataaatcttaactattatgattactattaatattattttagcaggagcagcaggagaagtatggtggtgctcctaaggtagtgtcaattaaagggcaggaaataaagagactctaacagacagggcaataaagaacgaatgaaaaggaaagaaccagtgaatttattctatatggtcctaaaataaccatcgtgactacacgggaaaacaataagggatgggccccatcttctaccaaaaatgttaactcctacccagccttcaactcataaggtaccacttcctcaagtcatgtgtctaatttcataaacaacatgaatatcttagagctcagtattttaagccaggaaaagagataacaagagtggctatcaaacccctttctctgattctctgatattcctctgctttatagcagaggctacgaaggtacactcagaggttaagtaatttagaaccagagaatcattagaaaacagagtgagcctgagaaggatttttagcccaaaatggtaagctatcccttcagctgatccccttatctttgaaataacccccaaaaaaaaaaaattaaaatcacacttaatctactgcagcctgggtaaacaagaaaggcttatcagtggaaaagaaatttttagaaattcctggaaaagataaagaggatagaatggagttgctgggaaaaccaatcacagctgagacctattacccagattcactcaaaagaaggtatagagtcgctaaacaggggttttgcaacaaaagtcaggaactatccaaagttcagaggtggtagctagtggctgggaacagaagccagagcagacagcaatttcgggacattgcagagctgtagtagatctgtactggtctgcagacagacaataatttgcactgtaagtaactggggaactagtgcctgagacttctaggaatgccaatggtactttgggccctcagataacttgggctaccacaagtgatagacaaagaagacggatggagttgagcatttgaattaaagttttattcaacatgctttgaagtttcttaacatttggttgcaatttacgtttataattatatgaatatatttctttgacaggtcacaattttggcactctctaaagggcctaatttgacatgcaccataaatcttttttaaaaaatcacccagacacataattcaacttacagtatttccattttaggtggaactactcgtaagcagaaaggatttctagcatgacttttgtctttgtagctcaatagtattaccctggatttgggagagaaggtgaactcatttcaagaacggggaactaggtttttcagaacattgcagtagctgtagaaatgtgtgttgtaatggagacaagctacagggaaacatagaaagcttaatccggaatgctggaatggtgaatatggtaaatataactaagaaacaagagggaacttatcaaatttaaatgaaatttttgacatttgaataaaagatttcctgtgtggttattcaaagtaaaattattctgccccagaattccttttgcaaattaccctttaaaccaattgtgttttattgaggaaaaatgtgattcttttctctttttagccttttgttacagaaaatttcaaacatatacaaaagtggagagcttagtataatgaactgcacatagtaatcaccccctcaataatgaccacattagggccaatcctttttcaatttatcagctgttgactcaactacacttttcttctcgtagtaatggaagcgataatggaagtttaaaaataacgaagcagaacctggcaagggccgtaccaggtgttgtgcaaacaaaggactatgtgaacatttttaatgtgagaatagcttttagagattaagtccaaagaatgaaaagactttgagatgggtcttgaatgatggacactatttcaacaggcagagatgggcaaggagggtaaccgaagcataagattacaagttccatgaggccaggaacattttctatcttgcttactattgtgtttccaatatttaacagttccaatccttgcttgataaatatatgaattaattaatcaatgccatttattctgctttggttacctggcccttgccaggttctgctttgttatttttaaccttcccttatcgcttagactacaattttctctagcaatgggcttctttacattcatcttatatttcattactgtgacaagaaaagtgtagttgagtcaacagctgatacactgaattaaaaggcaagaaatatcacaagaattaatgctaagattttacaaaggaattcacagttctgttggatttagggtttaaaggatgtctctatggagctaatcattgatataagaatttattttgtgatagtcaatggtaccaattagtagttgaaaaggcagataaatcacataattctaagagaaaaatcagtgacaaagattttttttctttttgttttttgagtaaaataaatggttccatgtatatgggcatctaataggtctaagggaaccatactatgaatttgacttgaattttaaaagtagatgtaaataaatagcttgactattctacctaaaattgaccaaataccaaaactatatttaactttaattcgctagaatccctatagtgcacatttcaagaggtgtctctcttttgttgttggcacaattcaacttaattatgtgattttccaccccctgttttatgtatttgttttatttttacctttcttgcctttaactggatttattgactagtttttacctccatatacataggaaatgcttggagaaaaatcaatgtgttttatgtatacaatccaccaaatttaaactcttcaattaataagccacatatgagtgcagccaaaaagaagattaaggctctgaaatcaggattttgaatcatcttaaaacataatatgaaactgaacacaatgtcttagtgttctttaccacttaatactactgatcactctcatcctttgggaagttcttatcttttagggcttcagtgatctactttgcagggtgttctcctgacctttctgaccctctcacaggccatctatttctgtggtttcatctgagttgtctatttagatgccactccacacacatacatttattcctctaactcaatacctactgtaaacattctgctggagagcatgctcaacatagcaaaaaacaaattctgtgtattttctaggagtcaccccctcatctgtaatcttttgatggygagaaccagtgttgaattatagttgctttttcttatcccctaaattatccctggccttcttaataaatcagtctccaaatatcacagatttcctctagcacaatgtcccgtgcatctgtctctttttacactatctttattcttgtccaggccctcattacctgctgcctgggctattgcaatgaactctgatctgatcttcaacccttttttcccactcattcaacatactagcaatgaaattttcatagaagtgaaactacgatcatattttttcttcaaaaaactccaaggtgttctctttccttcttaaattcagattcctcactttgacaytcactaatctcccttctgaatccatcagtctccctcctcctgtcatttatttcctttatacaggctaaatcttacccctcttgctgttctctagaaagaccttttctttttccaccttgccatgattcaaaatcctgatttgactcaggtatatataattcaagaaaccttctagacaggcttcctcagagtctatgtacaggtatggacaaactgctgtcaaacatttgagaatttccatgttatattaattggctgtgttggaagacaaaggcagttcttggtgcatctcaaatgttgaagcattttgtcacagctcagagtctaaagcctcttcccaaagcatcttgtggttttcagagccttaaacttctttttggctgcactcatatgtgacttgttaattgaagagtttaaatttggtggattatatatataaaacacattgatttttctccaagcatttcctatgtatatgctatgtcaaatttcttcccaggttgggcagaaaaatctctggacttccaaaaactttgtctacttaaaaattccaataatatatcagatggaaaacttttactcccctatcactggaaaggctgtggcccaaaagatttgaagtgaatgggtggggtgggagtagtctgctctttttatccctctccccttctctcaccttggaggaacagcctattgctagaacatcgctttcctcttcctttttgacaccctgggtgttaaggagaggagggaataaaagagctggtagaaaatatattatgtaactggtatccaatatgtttccatctgtttctagtggcgtctgccaatgtcgtgctctctacccacaagatgtgtatgtatttttcttgggatgacttagcactgttattacattactaagcaccccatcagcaaggggctttctactctctattttttgccagtggccatgccttcactgtctctgtactagttatctattgctctataacaaattaccacaatgcaatggtttaaaacaggaaacatttattatcttgcagtttctgaggttcagaaatttaggcatggtgcaactggatcctctgatgcaggctctctcatcaggctcaaacaaggtgtcagccaggttctctcatgaggcttaattaagcaagtctcatctaaacacttggctaggaaaggatttgcttctaagctcatgtggttgtgggcaaaattcaagttcttggcacctattggactgaggaccagtttctagctgattgttggccagaggccacctgcaattccttgctgcaagagcctcccaacagggatgcttgcttcatcaaagcatgcaagccaagaaagcaatggagagagtttgctagcaaggtgcaaattatgatcttgataatgaaatactggaggtgacattccatcatctttactatattctgttggatagaagagagtaacaggttgtaaatacagggaagctgaggtcactaggggccatcttagactccaatctgtaacagtctcctttgggtaagcctggaccactcccatcctcctaccttattctctatcttccttcacttcrttcttcatgtggagcttcaaaagaattgaagttctcttctgcatcttgcaatggccacaaaaaacctgtctggggtgargggtcattcccactttcccaggggcactataccactgtttcttctctctgttgtcacaatcaattccagcaagcyttataccttctccaaatgacaagctgacgctagagtttatattcatgtactccttgcagattctagggaacacaagtaaaggcttgtcaaaaagtggcccaccctctccatctgagaggacctgtaagttctgcaagttaggaaacatcyttcagagcatgtgatggcagtcttcatattttacagacacccctaagcttcatgaatgattctgttaaactggtctcatagagagtaggaggaaaaaccacagaacttcccaccaatctgatgctacttgactttaaccactatccctcatctcacagtcttcttgtacaagcacagaaagtgcaggaaggtttgagggctgtgaccagaggcaggttttgtcatctattataagtgctaaggggttcagggtaaagaggatataagttttccctcgcttaataggacatagtggtatgtaatactctttgaccccaggagtagagccctagttgccaattctgagaaaaatctccctaagcatcctcttatatgtgcaagtctaagaagaactctaggtgttaggctaccagagcctcctctacaccattaacctgtaatcctggatccttgtagccaatctaagtactggtcccatagtctcactttatctacttcctgccatatcttatatttagttgacattttttaaaaagtggtcactttgtccattgtcctagtgatatttaggttttgcactcttagttattgcctctctatcctgtgtcttttcattctcccaaaacaagacaatctcattcactccaaagcttcaattattcagtaactgtgaaatctgagcctcaagccccaatcacatcttcatttgtgcatccctatatttaaatgcacgttagtagagcatgcgtagaagagctgaggttccttagaaatgctaagtcatttctcaccttgtagaaaagaatgaaaaactatagactctttgactgttacaattaaaaggaaactctgagattgtcagccctcttcatttatcagattaggatcctaaaggaaaagttgtttaggagaagttcaaattagtttgctttactcaaagtacactgctttttctactgtataatacagttgtttggaaaaaaatattaagatcataccgtatttaccaaaattgcatatattacaggtattatacaattaaaaccacatactatatatatggtgggattttaactgagagttgctacattgttaaaaaaaaaaaaaaaaaacttgtttggaagtctgtcctaagcttgcatattataaatgaattgtgcttctttgttttatgagagttgaaatcagacctcttaaacaatgcttacagaaagtactgcttctcttgctacaactggtagtgacccatgttgggggtgacagtacaattgagtctaccagaatgtgagaaaaggagtttttatattgcatctaccaaaaaggaaactccattttagttagaaagaagcttgcattaattcaacatttggatgaggtccaaagtcagttgcagtaaatcttgataactactgcttgtttcaagctagagccaagccgtttgtttattttaaacgcttgctcgatgggttactcccctgggaaaatgaccttgttttcatctcaggcccaagggaagcttcttatgctgtggaatcttattccagaatgtgtctggaatgaagaaagttgcagcctatactcagctagcatgatcatctcattcacttcatcgacaaagcttttgactttctaaaataaaagtaggaagacttggaaattttaacgcttcccttcatcctccaacaccctcatccccatcatccaaaatcacagctgagaactgctcagtgctacctaagttacttagttctcttttacttttggtgccccaraggtgatagaagtaacaacccccatacagtcagaggaaacccagatgattctacggatgctctgtgggtatgaagcaacttgacaaataggccaactgcaaataacatgggcatctggaaggagcagaaagcaggtttgggttgacatgtaaatgtggagcctgtggtcactctagagtaacaccctttccttctttatctcccaccccaacacacagttaggaaggcatctgcaatgcagacattggttaggtaccaggcctctcctgtacacacttctaacttgtaaatattcctcaaggtgatagtaccttttgatatctcaatcattaacttgttaatttgatgattgtttttcttttattattatactttaagttctagggtacatgtgcacaatgtgcaggtttgttayacaggtatacatgtgctgtcttggtttgccacacccattaactcatcatttacattaggtatttctaatgctatccctcccccatttccccaccaactgacaggccccagtgtgtgatgttcccctccttgtgtccaagtgttctcattgttcaattcccacctgtgagtgagaacatgtggggtttggttttctgtccttgtgatagtttgttgagaatgatggtttctagcttcatccatgtccctgcaaaggacatgaactcaacttttttatggctgcatagtattccatggtgtatatgtaccacatttttttaatccagtctatcaatgatggacatttgggttggttccaagtcttgctattgtgaatagtgccacaataaacatacatgtgcatgtgtctttatagcagcatgatttataatcctttgggtatatacccagtaatgggatggctgggtcaaatggtatttctagttctagatccttgaggaattgccacactgtcttgcacaatggttgcactaatttacactcccatcaacagtgtaaaaacattcccatttctccacatcctctccagcatatgttctttcctgactttctaatgattgccattctaacaggcatgagatggtatcttactgtggttttgatttgcatttctctgatgaccagtgatgatgagcatgttttcatgtgtctgttggctgcataaatgtcttyttttgagaagtgtctgttcatatcctttgcccactttttgatgggattgtttggttttttcttgtaaatttgtttaagttctctgtagattctagatattagccctttgtcagagggatagattgcaaaatttttctcccattccgtaggttgcctgttcactctgatggtagtttcttttgccacacggaagctctttagtttaattagatcccatttgtcaattttggcttttgctgccattgcttttggtgttttagtcatgaagtccttgcccatgcttatgtcctgaatggtattctctaggttttcctctagggtttttatggttttaagtctaaagtctttaatccatcttgaattaatttttgtataaggtataaggaagggatccagtttcagctttctacatatggatagccagttttcccagcaccatttattaaatagggaatcctttccccatttcttgtttttgtcaggtttgtcaaagatcagatggttgtagatgtgtggtgttatttctgaagcctctgttctgttccattggtctatatatctgttttggtaccagtaccatgctcttttggttactgtagccttgtagtatagcttgaagtcaggtagtgtgatgcctccagcgttgttctttttgcttaggattgtcttggcaatgcaggcccttttttggttccatatgaactttagttttttccaattctgtgaagaaagtcattggtagcttgatggggatggcattgaatctataaattaccttgggcagtatggccattttcatgatattgattcttcctacccatgagcatggaatgttcttccatttgtttgtgtcctcttttatttcattgagcagtggtttgtagttctccttgaagaggtccttcacatcccttgtatgttggattcctaggtactttattctctttgtaaccattgtgaatgggagtacactcatgatttggttctctgttgtctattattggtgtataggaatgcttgtgatttttgcacaatgattttgtatcctgagactttgctgaagttgcttatcagcttaaggagattttgggctgagactgtggggttttctaaatatacaattatgtcatctgcaaacagggacaatttgacttcctcttttcctcattgaaaacccttaatttctttctcttgcctgattgccctggccagaacttccaacactctgttgaataggagtggtgagagagggcatccttgtcttgtgccggttttcaaagggaatgattccagtttttgcccattcagtatgatattggctgtgggtttgtcataagtagctctttattattttgagatacgttccatcaaaacctagtttattgagagtttttagcatgaaaggctgttgaattttgtcaaaggcattttctgcacctattgagataatcatgtggtttttgtcattggttctgtttatgtgatggattacgtttattgatttgcgtatgttgaaccagccttgcatcccagggatgaagccaacttgatcatgatgagcaaactttttgatgtgctgctggattcggtttgccagtattttattgagtatttttgcattgatgttcatcagggatattggtctaaaattctcttttttgttgttgttgtgtctctgacaggctttggtatcaggatgatgctggcctcataaaaggagttagggaggattccctctttttctgttgattagaatagtttcagaaggaatggtaccagctcctctctgtacttctggtagaattcagctgtgaatccgttctgtcctgaactttttttggttggtaggctattaattattgctcaatttcagagcctgttattggtctatcagagattcagcttcttcctggtttagtcttgggagggygtatgtgtgtctaggaacttatccatttcttctagattttctagtttatttgcatagaggtgtttatagtactatctgatggtagtttgtatttctgtagtgatatcccctttatcattttttattgcatcgatttgattcttctctcttttcttctttattagtcttgctggtggtctatcaattttgttcatctcttcaaaaaaccagctcctggattcattgattttttgaagggttttttgtgtctctgtctccttcaggtttgctctgatctcagttatttcttgacttctgctaccttttgaatttgtttgctcttgcttctctagttcttttaattgtgatgttagggtgtcgattttagatttttcctgctttctcttgtgggcatttagtgctacaaatttccctctacacactgctttaaatgtgtcccagagattctgttacattgtgactttgttctcattggtttcaaagaacatctttacttctgccttcgtttccttatttatccagtagtcattcaggagcaggttgttcagtttccatgtagttgtgccattcttagtgagtttcctaatcctgagttccaatttgattgcactgtggtctgagagacagtttgttgtgatttctgttcttttacatttgctgaggagtgctttacttccaattatgtggtcaattttagaataagtgcgatgtggtgctgagaaaaatttacattctattgatctggggtggagaattctgtagatatctattacgtctacttgttgcagagctgagttcaagtcctggatatacttgttaaccttctgttgatctgtccaatattgacagtggagtgttacagtctcccattattattgtgtgggagtctaagtctctctggaggcctctaacgacttgctttatgaatctgggtgctcctgtattgggtgcatatatatttaggatagttagctcttcttgttgaattggtccctttamcattatgtaatggccttctttgtctcttttgatctgtgttggtttaaagtctgttttatcagagactaagattgcaaaccctgctttttttttgctttccatttgcttgggatattcctccatccctttattttgagcctatgtgtgtctctgcatgtgagatgggcctcctgaatacagcacactgatggatcttgactctttatccaatttgccagtctgtgtcttttaatggggacatttagcccatttacatttaaggtaaacattgttatgtgtgaatttaatcctgtcattatgatgttagctggttgttcctttccatgtttagtgcttccttcaggagctcttgtaaggcaggcctggtggtgacaaaatctctcagcatttgcttgtctgtaaaggcttttatttctcatttacttatgaagcttagtttggctggatatgaaattctgggttgaaaattcttttctttaagaatgttgaatatcggcccccactctcttctggcttgtagggtttctgccaagagatccactgttagtctgatgggcttccctttgtgggtaacccgacctttctctctggctgcccttaacattttttccttcacttcaaccttggtgaatctgacaattatgtgtcttggggttgctcttctcaaggagtatctttgtggtgttctctgaaaagctgaaaattctaaaaaccagagtgcctcttctcctccaaaggatcatagctccttgccagcaacagaacaaagctggatggagaatgactttgacgagttgacagaagtaggcttcagaaggtcagtaataacaaacttctccgagctaaaggagcatgttctaaccaatcgcaaggaagttaaaaaccttgaaaaaaggttaggtgaatggctaactagaataaacagtgtagagaagcccttaaatgccttgatggagctgaaaactatggcatgagaacttcgtgatgcattgtgcaaccttcaataggtgattcgatcaagtggaagaaacgatatcagtgattcaagatcaaatttatgaaataaaatgagaagacaagtttagagaaaaaagagtaaaaagaaacgaacacagcctccaagaaatatgagactatgtgaaaagaccacatctacgtttgattggtgtacctgaaagtgacgcggagaatggaaccaagtgggaaaacactcttcaagatactacccaggagaacttccccaacccagcaaggcaggccaacattcaaattcaggaaatatggagacccccacaatgatgattgtttttcttagctaaagaaagaaaactgcagaagaagagctttgtgactgggaggaagataccacagggacaattttggtgcagctggttttagcccttgaaaaagcttagaaggagggttatttgaacatggctgtaaaccatgatcttactatccctggaaatctttgtgtctggagagcagaggagagaaaaagaaagataaggtaagaaaataaaaagagacaaaagtgagtaataaaacaatacagacaaaattaggctggggcacacctggtaggccatccagttgacacattataaatagtcaatttctaggagccagacttccactgctagtttctgcaaatacagtcttgtcttccatttgacgtcatgtaaaaattgctttgaccaggaggcttactgaagatacattaagatagcaacagcttgtctggaaacagtataagaataggctccttagtgaagatctcaagatgattctatttttgtgccaggtgaagcagccgaggctagaaacggtaatctgtgcaaaacagaatctgtcagatacatcagaccagcactgctgcttctgctattgttagttatagggcagaagttgcaaaagcgaaaygaggaatgagaggcaacataaactcaatgctcagattcatagactaatctcccgaataatttttcagctatctcagacacaatctctaaaaaaagaatgaaacaaacaaaaaccccaaatctgaatggaaaaataatctgctagtgttccactctcttggaaagtttacttgaggcattctgactgaaatgacaattcaatgggggaaggaataagtgcaagtcccgtcttctcataaccaaaaacgaaaagttgcttacccacacaaaaactgtagcacctccccaactatattggagcaggccaagagggaggtggtgttttcttggcagttcagattttcaaaaatgaaaattgtcctatctcatgttctatactcacagcactcagtgtttattagtggtaaggtattaataaaagcagcatactagaaaatagcttccttagagaggtactcaaatttttatcagggtctgtggaaaccatttagtgccctgcaattcaccaactaatagctgagatacaaaataagttttggcaagaatctaagaaccaggaatctcttgtttaggccatgattgaatctgcttataaagtaatagtaaaacacaggtgacttgttcattcacaatgcttggatcataaaattcaattcttggattcgaaaagcccaataagaaatatgttggcatttaagaaactrgttaaaaacatattttgcagctatagctttaatgaaaataatgttttcccaaacaggtagaatgaatagcttgacacagaagacattggctggcaacttcacttacagtttgtaatatgtaaagggaagagacaaatgtactgggaaggtagtgtgttaaaacactactagtaatacaagcataggttctccaagaaaggtgaagagcaagaagtagtgagaatcttatggtagtgtattcaattttaagaaaaaatcacttaaaacaatagagatttacaaaacacataaatttgaggtagtcatttactttatagaatacagtttcatagagtgatgtcaacaaaatgacagactaggaatctttacgctctctttccctgacagagacactgagttaacaacaaggtttcgttggaaacakaagaatagaccgtgtatctacattctagcttgtttgggggctacacaaaagactagtttctgtctctcctaactccaggtgctgacaggaccagcggcataatatggaagccactgaaaacagacgataacactgcagcatattagagctatagttctctgagcagatgccagcaggagcaagagataagaaaagttttgagaggtcctaggacctctgagtttattagtgaagtttattattccctgcacaaggctagcatgcaaagtctcagaaaggtggtcatgtatttcaaatgcccaaatctcaacaaaaaaattacaacaatgacgtcttctgtggaacccctctagtgaatttttcagtcctgttactgtatttttcagctccagaaatttgtttttttttttataatttacaaaaaaattgctttacaatttacaaaagattacaatgcatatgaagaaacaggaaaacatggtacaaaggcctaaaattaaactccagaaacctaccctaaagaaatacgtatctatgcactgaaataaataatttaaaataaatattataaagatgtttataaaactgaaaaagaacccagatatacaactaagtaaaatcagaaaaataacaaatgaacaaaatgagaatattaacaaagggttagaaattgatttttaaataccaaacaaatttttggagcagaaaaacacaataattagatagaaaaaatcactagagggattcaacagaagacttgatcaggcagaagacagaatccgtgactttgaaggtagatcatttgaaataattgattcaaatgaggaaaaaggaaagaaggaaagtaaagaaaccctaagggatgtatgaaacactatatgcttgatctgtacaggccaatctatacattatgggaacgtcagaaggagaaaatagaaaaaaaggggcacatagattatttgaaaaaataatggttgaaaaacttgctacatctgagcagaaaatgggcagacaaattcaagaaactcaaagaaatacaaccaggataaacccaagataaccatcccaagacacaagacacaacataatcaaactgtctaaaatcaaagaaaaataaataattttgaaagaagcaaaagaaaagtgacttattgcaagctaggaaattttaataagaatatcagtggatttctcagcagaagccttgcaggtctgagggagtgtgatgatatattcaatatgctaaaagaaaaaaaattgttaaggaagaatattgttttcagcaaaactatacttcagatataaagataaaggagaaataaagacttttccagattaaaaaaaaagctgaaggagtttattaccactagacatgctctgtaagaaatgccaaaaggaatccttcaagttgaaacaaagggacagtagatagcaatattaagccatacaaaaatataasgctctctagtaatctaaatacatggactaatacagtaacctgtattatagtaattctggtgcatgaaatttaaaaacattaaaaataattgtaaatctatgttaatgggtgtataatatgtaaaaatgtattttgtaacattaatgatagaaagtcagggatggagctgtaaagcagcagttttttgatgtgattgaaagtaacttgtttcaatttaaaatagaatgccatacctttcagatgttgtatgtaattgaaatagtacccacaaaaatacctatagaatacacacgaaaggaaataaaaaaggagtcaaaacttgttgctacaaaaaattaatgaaacacaaaggaagccagtaagagacgaaaggaaggacaaaaaggtataaaataggggtacctaattttttggctaccttgggctacactggaagaagaaaaattgtcttggaccacacataaaatacactaacacaatagctaatgagctttaaaaaaaaaaatcacaaaaaacarcctcataatgttttcaaaaagattacgaatttgtcttgggccacatccaaacccatcctgggctacactcagcctgcaagctgcaggttggacaagcttggtataagatacagaaaacaaaatgacaatatcaagtcttcccttatcagtaattactttaaatgtaaatgaattaaactctccaatcagaagacatagattggctgaatggattaaaaaaaaaaaaaacaygatccaactacatgctctctaaaagagattcactttttagatgtacaaatacacataggctgaaactgaaaggatggaaaaagatactgcatgcaaatagtaaccaaaaggaagcagaggttgctatactaatatcagacaaaataagctttaagtcaaaaatgttacaaaaagtaaaaggggacattatatattaatgaaaggcttaatttatgaagaagatataatatttataaatatttatgcaccaagcctcaaaactcctaaatatgtaaataaaattttgacagaattgaggaaacaaatatcaacactgtagttgtaggaaactttcatttcttcattttcagtaatagatagaataaccagactgaagatcaataagaaaataaagaactcagacactacgatagactaattggatctatcagacatatacasagcacttcacccaacaatagcagaatatatatttttctcaagtgtacatggaagatctttcaagatacaacaagttaggccataaaacaagtctaacaaattctagaagattaaagctatacaaagtatcttttctagtcacaatggaataaaattagaaatcaatagcaaaatgaaaaaatgcacaaataaatgtaaattaaacaacaaattcttatataacaaacaggtcacagaagaagtcacaaggaaaattagaaaatatattgggacaaatggaaatgaaaacacaacaaaccaaaacttatgagatgcaatgaaagcagtgctaaaaggaagatttatacatgtaaatttgtacactaaaaaaaaggaaagatcttaaatcaacaacctaactcaagaaactagaaaaagaagaacaaactaaacccaaagttctaacaaaacttagagcagagataaatgaaatcagaaacagaaaaacaacagaaagaaatcaactaaaccaagaattggtttttttgaagagataaggagaattgacaaatccttagctagattagctaagaaaaaaagagatgattcaaataaattgaaaataaaagactgtacattacaaccaatgtcacaaaaataagaataataacagaatattatgagcaattttatgtcaacaaattgtataacttaggagaaatggatgaattcctagyaacacacaacttatcaagactgaatcatgaagaaacagaatatctaaacagaccaataattagaaaggagatcgaatcaaaaatcaaaaacctcccaacaaagaaaagtatatgaccagatggttttactggaaaattctatgaaatattacaagaatcaacacaaatcctgttgaaactcttctaaaaaattaaagagaagtgaacacattcaaattcattctataagatcagcattactctgataccaaggccagacaaagctcaagaaaactacagaccaatatctctgattaatgttgatgagaaaatcctcaacaaaatactagaaaactgaattcaacagcacattaaaagaattttacaccatgaccaagtggaatttattcatggaatgcaagaatgttttgacatgtaaaaatcaatcaaattaatatactgcattaacagaatgaagaccaaaagtcacatgatcattgatatagtaaaagtatgtgacagcatttaataccctttcaataaagtattcaacaaactagaaatagaaggaaactacctcaacataatagaggccttatatgaaacatccacagctaacatcacattcaatagtggaaaactgaaaactttttctttaagattgaaagcagggtaaggatcccagcacttgtcacttctatttaatagaatattgaaagtcctagtcagatcaatcaggcaaaaaaataaaataaaataaaaggtatccaaattggaaaggaagaaataaaattatttctattcacagatgacataatcttatatgtagaaaacctaaacattctgcaaaaataaaaactattaaaactaataaatgaattgagcaaatttactgggtataaaatcaacacacaaaatgagttgtatttctgtatattaacaatgagcaaaccaaaacaaaattaaaacaattccatttgtaatggcatcaaaaagaagaaaacactttggaataagcctaaccaagaggagaaagacatgtcaaaaactacaaaacattgctgaaaacaataaaacattgctgaaaaaagttaaagaggacacaaataaattgaacaatattctgtgttcatggattggaaggcaatattgttaaaatgtctatattaccaaaagtgatatacaggttcaatggaatccctattattaataaaatcccagtggcattttattgcagaaatagaaaaatttgtactaaaatttattttagaattaggaaaattcatactaaagtttcaaaggacagcaaataatcagaacaattttgaaaaagaacaaagttgtagaactcacacttaccaatttcaaaacatataaagccacaataatcaaagtgtggtattaacataacaacaaatataaaccagtggaatagaagagatgacccagaaataaaccctcatttgtatcatcaaacaatgttcaacaaggatgtcaaaaccactcaatgaggaaaaacaccaccattcaacaaatagtgctggaaaactagatattcgcttgcaaaagaatggtgcactgtgtcttctactatatacaaaaattaactcaaaatgaataaaaagtcaaaatgtaagacccccaaactctaaagctcctagaagaaactacatggaaaaacctttatgacattggaattcgcaatgttttctctcaggtatgaaaactaaagaacaggcaacaaaagcaaaaataaacaaatgagactacatcaaactttaacccttttgtacatcaaaggacacaatcaacagagtgaaagggcaccctacagcatgggagacaatattttcaaatcatacatctgataaggagttgatatccagaatacataaaaactcttacaacacaacaacaaaatcaaataacccaatttttaaaattggcaaagatttcgaatagacattcaaatatctatttatctccaaagatgatatacaaatggccaacaagcatttgagaagatggccaacatcactaatcactagggaaatgcaaatcaaaatcacaatgagatactaactcatacccattagagtggctactatcagaacaacagaaaacaacatgcattggtgagaatgtcgataaattgaaaccttgtgcactgttggtgggattgtaaaatagtccaactgctatggaaaacaatatggaggtccctcaaaaattaaaagtagagctaccatattatccagcaattcaacttctaaccatatatctaaaaaaattgaaagcagagtcctgaagagatatttgcacacccatgttcacacagcattatccacaaagctgagaggcagaagaaatgtaaatgttcatcaaatgacaaatggataaatgaaatgtggtacatacatacagtggaatattaatcawccttaaaaggaaattctgatacacacactacaayattgataaatcttgagaaaattatgctaagtgaaataatccagtcataaaaacacaaatactatatgatacccctagtcaaattcatagaaacagtagaataattgttactagggttgggaggagggggaaaggagtagttgttgtttgataggtacagagtttcagttttacaagataaaaaagttctgaagatctgtttcacaacaatgtaaatatacttaacgctactaaactgtatatttaagaatggtaagctagtaaatttttttgtttttcaccgtgaaaaaaagacaatttcataaagtatactcagtagaattttaaaaatatttcatatacgtttttctctttgtagattctccagacctttctctcagtatctacacattttaacaatagttctaattattattcagaatactagtagtaattaatagaaccaaaatagatatgaagccagatctgtataactccaaatctgtgcacattttaccatacaaacgtaactttttctttgcagcttagttttacgttgtttttctaacacatgaactaaaggaaaaggagaatgttcatctgagaaaatcttcaaaagatttgtatttttacttaaggaaaaggaaggaaagtaattaatcttctcttccatagaagaccaggaagacgttctgtgaggaagacataggtggaaatacggaaagcagaaaagacaacttcggggtggccgggagataacagaaggtaatcagaaaatgagaaattataagaatagttctgactctcaactccttacaaacagcccacaactcattattctctggctccctaacgagtctcacctttctattacctccatctaagacactgtctctgccaggctactggagctgccaccatgacttatttctgaagaaatccctatttctctgtctggcagttgggaagtctgggagagttattcagacctcagtagagacagaaaagtattccaagtataatatctaaatgcatattctcaaacaaacactatcattcttagaaattaaattccatagtattaaaaatactgccttatacattagatggcttatgggattgctgttgatgccctgcctaggtcccctttactatgagggggcaccaacctaccgtgagctggctgcaaaaaggatacagctccacttttctcctagtactgttgtgagctgacaggaattgccttgtataaaaatgcctgaacagcatggccaacatggcgaaaccccgtctctactaaaatacaaaaattagccgggcatggtggtgggtacctgtaatcccggatacttgggaggctgaggcaggagaatcgcttgaacccaggagggggaggttgccgtgagctgagattgagccactgcactccagcctgggcgacacagcgagactccgttgaggaagggaggaagggagggaggaaggaaaagagggagggaggaagagaggaagggaggaagggagggagggaggtagggagggagggaggkagggagggagggaggaaggaagggacgaaggaaggaagggacgaaggaaggaagggacgaaggaaggaagggacgaaggaagagaaggaagcctgagaagttataagcatagcttgyggttgatgactcaataattcagggctacaaaagctcaacccctttgcctcaatttgggataatactgtggtattattttatgctctagagcttctcatgtgatgggtgaagccagactttatccgaagcctattttcgtttggccttcccctctgccctatcctgctgtcggtagtttttcacagctttttcccatgtcagcactccctcaataaacaacttgcaaaaaataccctggtatcagactctcttccagggaaccaaacctaagacatggagaaaatagatttctaaatctaattgccttggaatctaattggtatataggttttgttattttttgtgtgtgtgtgatggactcttgctcttttgcccaggctggagtgcagtggcgygatctcggctcactgcaaactccacctcccgggttcacgccattctcctgcctcagcctcccaagtagttgggactacaggcgcccgccaccacgctcgttttttttgttctgtttgtttgtttgtttttgtattttcagtagagayggggtttcaccgtgttagccaggatggtctcaatctcctgacctcgtgatccgcccaccttggcctcccgaagtgctgggattacaggcgtgagccaccgtgctcggccagtatataggtgtttttatagaaaaatgcatttcaaattctaacaaccaatctattaaaacatttttgaaaataagcctgtgtatgcatctaaaactaagaaacwttttttttcaggttttattattaaatagcccaggtaaacacatatgcagagaaataactaaagtctccttcttccaggtaatagcagactaaataactcagaactatcctcctgctgaaggcaataggaagtctggcaaagtattttttaattctgcttaaaaatgtcagagaactaataaaatagtaaagaattatgagacaagatccatggaaagatggaggcttaaggaggtgagctagaatttggagggacttttctcctgggagaaattcaccaactctatccaggggctcccaaattaagtgcacttttaatagcctctgggagataagggttcagataattaactccagagcctgctgaaaagaaaaggatttatgtgaacattttgggagtaaggatgaaccaaaaataggccctcctagagatggtagcttagctaccaatattttctcgttttttgttgacttttatatgaagttcagaggtacacatgcaggtttgttacgaaggtaaaattgtgtcatggaggtttgttgtacagattattttatcacccaggcattaagcctagtaccccttagttatttttcctgatcctctccctcctcccatctcccaccctcaaaagggccctagtgtgtgttgttcacctctatgtatccacgtgttctcatcagttagctccatttataagtgaaaacatgcagtatttggttttctgttcctgtgtcagtttgctaagaataatggcctccagctccatccatgtccttgcaaaggaaatgatctcattcttttttatggctgcatagtattccatggtgtatatgtacaacattttcattatcaagtctgtcgttgatgggcatctaggctgattccatgtctttgctattgcgaataatgctgcaatgaacaaaaatgggcatatgtcttagtaatcgaatgatttacattcctttgggtatatacccagtaatgagattgctgggtcaaatggtatttctgtttttaggtctttaaggaattgccacactgtctccaccatggttgaactaatttacactcacatcaacagtgtataagcattcgtttttctccacaacttggccagcatctgttatttttttttttactttttaatagccattttaactggtgtgagatggtttctcattgtggttttcatttgcatttctctaataatcggtgatgttgagctttttttcatatgattgttggtcacacgtatgtcttcttttgagaagcatctgttcatgtcctttgcccactttttaatggggttgtctgttttttctcaaatttgttaagttccttatacatgctggatattagactctcatcagatgtatagtttgcaatttttttccattctgtaggttttctgttcacttgcttgatagtttcttttgctatgcagaaactctgtagtttaattagattccatttgtcaattttttcttttgctgcaattgctttgggggtctttgacatgaaatccttgcctgttcctgtgtcctgaatggtatcctatgttgtcttccagggattttatagtttggggttttacgtataagtcttttatccatcttgagttaatttttttatatggtgtaagaaaggggtctggtttcaagtcttctgcatatgactagccagttatcccagcaccatttattgaatagggaatcctttccctgcttctcatttttcttaggtttgtcgaagatcagatagttgtgggcatgtggctttatttctgggttctctattctgttccattggtctgtgtgtctatttttgtaccaaacagattcacagctgaattctactagatatacaaagaggagctggtccctaccatttgtattgaaactattccaaaaaattgaggaggagggactcctgcctaactcattctatgaggccagcatcatcttgacaccaaaatctcacagatgcaacaaaaaatgcaaacttcaggccaatatccttgatgaatcaatgcaaaaatcctcaacaaaatactggcaaactgaatccagcagtacatcaaaaagcttatccaccacaataaagtaggctttgtccttgagatgcaagttgggtcaacatacacaaatcaataaatgtgattcatcacataaacagaactaaagacaaaaatcacatgattatctcaatagatacagagaaggcttttgctaaaatccaacaccccttcatgttaaaactctcaataaactaggtgttgaaggaacacacctcaaaataataagagccatctctatgacaaaccaacagccaacatcatactgaatgggcaaaagctggaagcattttccttgaaaaccagcataagacaaagatgccctctctcatcactcccattcaacatagcattggaagtcctggccagagcaatcaggcaagaaaaagaaataaagggcatccaaataggaagagagaaagtcaaactattcctgtatctagcaaacctcatagtctcagcccaaaagcttcttaagctgataagcgacttcagcaaagtctcaggatacaaaatcagtgtgcaaaaatcactagcagtcctatacaccaacaagagacaggctgagatccaaatcagacacataatcccattcacaactgccacaaaaagaataaaatgcctaggaatacagctaactaaagaggtgaagtatctctataaggacaactataaaacactgctcaacgaaatcagagatgacacaaactgaaaaacattctgtgttcatgaatagagagaatcaatatcataaaaatggccatattgtccaaaacaatttatagattcaatgctatgcctattaaactaccatttgggttctttacaaaactagaagaaaactattttaaaattcacatgaaacaaaaaatgatcttgaatggtcaagataatcctaagcaaaaagaacaaaactggaggcatcatgcyacctgacttcaaactatactacagaattacagtaaccaaaacagcatggtactggtacaatactttcaatatttcaaattgaactaatataatcctacattgctagtaaccctagtcatctaccagaaataaaagtaagtccttcctggagtaaaataatttcatcctaggcctccagttatttctataagtaatttacaaggtatctcagtcagtttgggctccattcttatgacctaattacctcccaaaggcccaccttttattatcatccattatggattacagtttcaacacatgaattttgggaaaaaatatgcagtttataatgcaaagtctgacatacaatatagtaatcagacccagcagtagataaaatgacatgaacaaatcagcaggaacaacagacagtagagatgaacccacaaaaactccacacagcggagttagtagagaggcactttaaaataacaatagtcattatgttcaagaaaatgacaaaaatttcagcaacatattggaaatggaaatatataatcacagattagaactcaatggataacatgatgaaagggtatagcagcaggtaaaaagtggtgaggagagaattactgaattgaaggagagatcagaagaaaaaaatccataatgaaaccacaaaaaaatggggggaaaacctagaagagaaggtagaagacacagaggatagagtaagaatctaataagtaacaagacatggagtctcacagagacaggaaagagagaaaatggtcaaaagcaatatttaaagagataataactaagaatatctcaatgtgaataaaaccacagattctaaaatctcttataaaaacccagagttaactaatcaatttcagctttctaaggataaaattttttaaatttaagcatacttttagaaatgttatctatagaacagaaataatagtcataccaccaggattactgtaagatcatatacggtagcatatttggacactatatagaaattaattgtgatctcaagtgttttgtgttttaatataattctaaaytaattaatttactaagagttaaacatcatgtaaaagtcttgacacaataataagtcttaaaaatgttaggtaaaaatactccacaaaattagtgggtttaactcatataataaacactcatcacaatatattagttataatttattaattgttctccctcttagtctttatagtctttgtctgtgatatttattaatcttaagaagctgttggaatactctggaataactggagccaagtaggatttttctggcatcaaggaaggaacatggaagaaaatcagcagactaaatttacaaccaaaattcaatagtccctagatgattgtgatatgagatcaatattcatttatatgcacgtgaagataaatatcatgaaagttccagtatttatatgatgcccaaataagtctttttttaaaaaacccatatccgattttcaaaaactgccattagataattatagaaagttatagtgccagaaagttaggaaagcagaaaacttgaaactagctcataaacatttcaagaacctaatgagggttattttcacctacagatattgatcaaactccagaagaggacagagtagtcagccaaatttactatcctcacatgacctttcttggttgtttatcttttttgtactctgctgaatttcaaatcaagtgtctcatgttaaagcagaagaaaattttactaagtgaattaaaggaactggcttccagagccaagtgagcaaggaagcaccaaaatgatttttcccccccgacacattaactttcaaaattttaactgtaggtagttggaattagggattcttcaaccgataaaaaatagtctacctgtactccactatcatagtagcttccactcagtacaatactagatgattttcttttcacgttaaatttcattacaatgttttcagcaggagccaagtttccaagaatgaaacacaatcataggtaaacaattataaccatataaaattaacaatagatttaaattcrtgtcaataaattttgagttaatttgcttactaaatatgtatttagtgatcacttacagaaagacaagcacagagatagaaagatgaaaagatacaaatctaacttgaaggaggttatactttaggacatttatgcaatccacaattacagaattgttccataactgctgagatgcacaacacttatataagatattttggaactacatgcagttgtttctaagtattgttgggaaaattggggaaaacttcagagaggtgcgtcaaagagctacgagagagagaagcatcaaaaggaccaggcattctagtctacaagaataacttatgcaattgacttacaacacgcaaaaaaaaaaaagtggatactagaaattacaatattcatgttgctgaagcatgaaaaaaaggaaaagtagaaaattaggttatttagattggtatggaccagataataaacgaaccaagatttcattcaataggctgattgttttcaaaagaacccaatggattttcaagcacccctgcagaatccaaagagagacaaatagatgaagatccaggccgtttctcttccagtagactgacatcattttatccatttattttggggattcaggcaatattttattgaaaatcactgttataagcaatgagagccaccagggaatgctagcgaggttttcccaagagctgaattcatcagaatgtgtttcacagcattagtttcaaacattttcaatatatttccattttcaaagccatattgtctatttttaaaagacaaggagatatgaaagtaacatagaggtaggcatacaaaagatgactgagggcaccaattgggttctaataaacagtattttttgctgttttggatcatctttaagcagatgacaacatactatatatagcatgcataatcctgttcctcttgaagttaccaggtcttgtttgacagtctcagatctgtcttttaatgaacaatattgttacatcttatagcccwtcttaaatatacttcaacatatatgaataataaataaattactggtagcagagctccccaccttaggaaatatgaatccataattctgaattctaacattacacaaaactaatttgtgtgacctttaatgaaaactgaattcttgtttacataatggagaattcattatgtaggagtagtccaggaattaataattaagcaragccaaaaaggcgagaaatagcaaatgcttatcttcagatctctacaccataaaatctctatttggtaaaatctaattggtatgaaaatgactctttaaaccttccaaagtaattagagcattttcaaaaatgttttcttataaaatatggytcccaaaatagttcatactggttattttgagaaggtgcgattttttaaaaatctacatataaaactcagaattcattctgccattattgatgaaaacatggaaacaagaacaattgcaccatatggaagactgtctagacaagaatgttaggggttatgactgaaataatttattgtttgctgagagccaacagtatgcttagcattagacaacacatcaaaagaataggactgtagccattgaactcacaatttaagccagacacacaaacattgaaataataaatcataacagctaagaaaattgtgtgaatttcacaggaatgaatttgggtgttgatttactttattagcaataaaaaattaagagatgccagaaataatcatcataaagattgtcaatgcgtgttattaatctagccccagaattagctacctgactgaattttaaaaagcaaatttgtgacatttaacaatcatgagaatgagtattttttgcagcagcatttataaaacattttatcacatgctgatgttatgaaaagcaaattacgcttaatgttcataccttctttgtgtgcatacatttactatcacccattttttcattctttcttgccttcatgatcactggtctttcaataaataaaaagagtaagccagttagattaattttctgttttttatttaagggcacatttttatatgcaatcatatggatgtaaatgtcacccatgctcaagaaacttcaaatatttttattgttgtcacccttccaaagagtgctaaaagtattaaacaatagtcagctttgagattagaaacctatgctagggtttaattcataaatattctgtgttacactgctgtggaaattaggtggttttagatggtggtttttaggctttgactaacgtaacatctccggacctttgttcctttacctaaaatatgggtaatacacagagttttataagaattaaatatgggaaatctataaaacaggtggccttggtaaaaataacagtgagcaagtatctattatttaaataacataataatgtttctgcatgtatgagtttatcatgctagaaaaatataacaaaaaccagagctaacagaaacagaattatttacagtaaaaccccaaggaaaggaaagtatttgctttacgtttttggagaaataaaaggttaagaattaggggagaaatctccaagagacacaattgtttcatttaagaacaattctatataaagttcatagctgtttaacaggagtgaatgcaagtttaaggttagtgctttgaaagggaattgttgaaacccatgagcgtgaagtaacatttatgtagataacggcaggatgtccaaccaagaagacccacgtgtgtgcccagagaatgtaatacagatacctacatatagttagaataagatcctataagatcacattctataaaatgtgctgcttagctggttttacttaccaatggccttagtatcaagactaaggtcaaaagtagggtacacattgtccagacacacagaataatccctgcacaggttgtttaatactggagttaatgtagattacaaggggatttgtctagattctatttatttcattccacaaatacttcttgaaaacttgttatgtgccagggattcataggcaccgggaatacaaaagaaacagagtaggtgaaacaataaaaacaaataagacaaacaaagacttttattatgcttaccttctattcagagaacacagaaaatacacatacaagtgagtaagtctcctaatatactcaaaggtggtgtgaggtatggaatacaaagtagggaagggggagggaatgagctggagaaatgaaggatgcaactctaaagatctagaccagaaaagacctcactgtgaatatgatattgaaatcaaatatctgaagaagcagaatcttaaactagcaatccatgcatatgtccatggaacaaacatgccaagaagagggaagagcaagttcaaattgactagaacagtgcctggcatagagcaagtatctccaatatttcttcaatgaaaaggaaaattgtgttgggctaagcaagatgagttttggggaatgacaagaggaggagagtcattcttttcttcttttggtgatgggacactcaacaaacaacagaggagcagatgcatcttccagagaggtgatctggttctgcaatgccagatgccaccatgaccactgaaagccactgtggcatttacttgggatggggcatctgatcccttggtcctgtcctgcccactcaacgtaactttgactttgttctcttcagttactaaatccatggctcagcaatgaacttcctactcccagcaactctaagaggctgctcctgaggtgtctcccagcccatgagctctgatgcagtgcattcctgccaggaacttcatttcagcctcaggtgcaggtgcaggtaccacaacttacatctctttacatgaccagctctacagagtccacagtaatggcactgtcattttataatgacaattggcacaaatcagttagtctacactggacaaatataaggaaaaatatagcacttatttttcctatttttcatattatcaagcaacagtcataaagcagtcaattaagttaattgaattggaataaggagaaaattgtttataattacctagaaactcaccttctatatttcacaaggaagagaacgcaattcagagagtctcaacagtttatggcatgcatgttacaaaagtgtatctcttctatgtacatttcatgagttatagttcatttacattggctcacataaacattcaagtctctaaaattgagtagtgtgaacagtgcccaggttaaaagtaagactggaaagaatttgctaatatatacaactataataatttgcgaggctgtaatgagctgtgggttagcccgtcatttattcctgcatctcaccatgatcctttcctgcagctgttctgcaaacatccattccttcccttccctgggacagatctcagcgacgaaaactctaagtctctaatttattgaatgttcactctatgctaggccctgaaggaagggtgccacayacagtgcctcttttaaaatcaccaataacctgggaaagaaggtaatcttattatccctgttttatgaaaattaaagctcagatatgtcaaataatttgttcagagttacatagcttaagttcccaaagcaggattaaactgtggggcttaaactgtaggatacagaattaaactgtaggatacgagaacttgagatttttgttatattctccacatgcctaagtattaatcctgataggagagcaggatcaggcaggggctggtagtgtcagcctgacaatattaaacagcttcccaaggggccccctgaggcagaaaatcttatatgtctcccctctctcgggaaaaaaaaaaaaagtctgattttatttgagataggaatgtacctagctaaatayttttcttatcatcccttccagctagagttggctatgtgacacatgactaataatatttaaataaaaggctgaaagaaattctgggaaaggctatgtttacctaataaatggggacgagttggaccagaatattccctcctttattcctttctcaaatgtagacaagaagctggtagaactgcaggcgccatcttaaagccataaggmaaatcacagagatcttggcagtgaayttgaactgctgaacccacagcagaccgcctaccctcagacatcttatcacagaaagaaaatataggcataccttggagttatcacacgttcccttccaaaccactgcaatagactgagtattgcaatacagccagttacacattttttggattcctagtacctataaaagttacatttacagtatactgyagtctactaagtgtgcaatagcattacgtctaaataaatagtgtatataccttaattttaaatactttattgctaatgatcatctamgcttacagcaagtcataatctttttgcttgttgagggtcttaccttgatgttgacagctgctgactgatcaaggtggtggttgctgaaggttggggtggctgtggcaacgtcacaaaataagacagcaatgaagtttgccatattgattgactcttcatgaaagatttctctatagcatggggtgctgtttgatttaatagcaacagggtctcactatgttgcccaagctaatctccaatgcctggcctcaagcgatcatcctgccccagcctcccaaagtgctcggattagacatgaatcactgaaaccagcctagaacttctttcaaaattagagtcaatcctctcaaaccccaccgctttttcaactcagtttatttaatcttctaaatcgtttgttgtcatttcaacaatgttcacgttgtcttcatcaagagtagatgctatctcaagaaaccactctttgctcatccatatgaaataactcctcgtctgttcaagttttatcatgagattgtagcaatttagtcacatcttcaggctccactgctaattctagttattttgctatttcctcctaagtcacctacagtgacttcctccactgaagtcttgaacctctcgaagtcatccattagggttggaatcaacttcttccaaactcayattaatgttgatattttcacttgttcccatgaagcatgaatgttcttaatgacatctacaattgtgaatatttttcagaagatttttcattaactttgcccagctccatcagagaaatcagtatttatggcaatgataaccttacaaagtgcatttcttaagtaatacaactagaaaccagcaagccagattgattcctggatccatggacttcagaatggatgttgtgttagcaggaatgaaaacaacattcatctctttgtacatcttcatcagagctcttgggtgatcaggtgtgttgtcaatgagcagcaatatttttctcagagcagtatgtctcaacagtgggcttgaaatattcagtaaaccatgctataaacagatgggctgtcattcaggttttgttctttttatagagcacaagctgagtccatttagcataaatctttttttttttttttttttttttttgagatggagtctcactctgtcccccaggctggagtgcagtggcacaatctcggctcactgcaacctccgcctcccaggttcaagcaattctcgtgcatcagcctcccaagcagctggtattacaggcacctgccaccacacccggctaatttttgcatttttagtagagacgaggtttcaccatgttggtcaggctggtctcaaactcctgaccccaggtgaggccacccgcctcaggctcccaaagtgctaggattacaggcatcagccaccacgtccagcccatttagcataattcttaaagaattttcagaatagccaatgagcattgactttaaattaaagtcaacagctgcactagcccctaacaagagtcactgtctttcataggtgaagttcgtgacactcccagacaattacaatagtgacatcaaaatatcactgatcacagaccaccataacaaatatactaatgaaaaagtttgaaatattgtgagaattggccaggagtggtggcttacgcctgtaatcccagcactttgggaggccaaggtgggcggatcacgaggtcaggagttcaagaccagcctggccaacatggtgaaaccccatctctactaaaaatacaaaaattagccaggtgtggtggcacatgcctgtaatcccagctaccagggaggctgaggcaggagaatcgcttgaacccaggaggtggaggttgcagtgagccgaaactgcgccactgcactccagcctggcaacagagcgacaccgtctcaaaaaaaaaaaaaaaaaaargaaaagaaatattgtgagaattgccaaaatgtggcccagagacaaagagagaacctgctttcaggaaaatggcaccaattgacttgcttgatgcagggtggtcacaaacttcaatttgaaaaaaaaaaaaaaaaaagtctgtgaagctcaataaagcagagtgcagtaaaatggggtttgcctagaagtctttacttatttaagctatttttgactggatattctgttacttgtagatagtcttactagtagctgacacaggagaactcaccttatcttggggtccattctcctccatctgttcaactcttacatcccaaacaccatcaaccaaagacttaaatattgcacaaaataaagaattaatgttgagcttggcactctgatgccagctgttgccatacttcaccaaaaatgcaatgttttccctttctgccctttgttcactctcttttgtatatttgtttcttccactaatttttttatgctttccagaagaagaaagtactctgcatatgctaggaatgtttaagtacttcctaaataaaatacaataaatccaagagtaacctgaacactgagagacatttttggtagcttttgctagctatttaatgttcaacacttgctttcaagatgtttttctaaatagtaaaataaagagttatatcaagtattagtcagtactatcaagtggcagactaatattaaaaatcatgtaatgatctccagattatcactatcttcccttgattctcataaaactaattaaatcaaggaatatgttatgatttggttttatgtaagtcctaatcaaaaaagggccatgtcctgatgaaacattttcaaaatggccagggtagaggataaaattcagtcttgtgaaaagaaacgttctttctcaaagttactggagttttctgcacctgctcttgtgacatcaatagaggaattaaatcacctgataattaaagtggtcatcagagatgtgttgtgttgtaacttacagccatggttctcaaagtgtggtacccagacttacaacatcagtgtcatctgagaacttaacaataaaaattctcagcccctggaaatctgttttaacaaatcctctaggtgatcgtgataatgctaacatttgagaacaactaaactttccgaagtaaacatatttgctaaagtactttttactagattaacaatgatagaaggaaataatggaagtttctgggggaaaatctggaaggagagagaagaaaggaagaggacaaggggagaggaaggagaagcacgatggctgcttgatgaggaacacttttttatgattaattcccaacataacctttacaaagttttctatatatctataaaagacatgacaaacttgttacaaatagctttttaaagaaatatatgtgattgaatttttttgtgtgtagaaatttccttaactgaacacttttgtcaatttcactccttcctctcaggtcttgatgtaacatcctgatattgttttttctccctttatacccatcagattcaatgttcttcctggaagtggatttcctgttatctttagggaatctttgcaggaaaatactcttttgaaagcagttactgaaatccttcttcaaaacttttgtcatttgtttggaagtttaacctttcacttacataaaattttcactcttgcatgtgcttgtgactcttgccacgtaacatgtgagctcctttattctagggacttggtgccattaattgttgtcctctcaatgacaagtaatagaacttgacaaataataaatactcagtatatgtttgataaatcaacagtgttatcaagagatattaatcttttcaagacctccacttctccacctctgctcctctactggatatcttctctctgctcccccttcttggccccagtctacctccttgtactgacttcttcttaggtttggccaatggagagctattataggagactggagggagacagaagagtgagttcagagtgtacattcccctgctgcctccctccctgtgtggtcaccttgaattggctgtgtcccttggcctaaggtcactaattctttcaaggtggctgtgtgcaggcagctcttcttttccactctagtaaccaattcttcccctcgttcttttgggagaaaggatgataacagctctgctgacactagccacatgactacaccatcctctgtggttcctatacaccctgcccatacccatgtaaatagatccattattaaaccatcttgaaattatcctaatctagatgtgtcatttgtttactgtgagaacactaacttttataactgccagattttaagagtataagtaaaactttacatattttacaatattcatcaacaactgagttctcagtacatgtgattttttacataaatatgctatttttaatattcagcaagtctaatatcttacatttggggattttaaaactcaccccctccctactctactgtggaggtggtgcagaaggactctaagtcaatctgtgtctgtctgtaaaatgctctgttaaaggcaggattcctgcaaataacttcacacatgcaaatgacttcagagaaggcacaaatatacatctaaaacrcattccatttggggtttttttgtttttgttgttgttgttgtttgtttgtttttttgagatggagtctcactctgttgtccaggcgagagtgcattgacacaatcttggctcactttaacctccgcctcctggrttcaaacgattctcctgtctcagcctcccaagtaactgggactacaggcatgcaccaccatgcctggctaatttttgtatttttagttgaaatggactattgccatgtcagtcaggctgttcttgaactcctgacctcaggtgatccacccgcctcgcctcccaaagtgctgggattacaggcstgagccaccgtgcccagcctccatttgctttttgcaagcataataaaatttttcctgtgggtataatatccttgatttattactcacactttttgtctgttaggtttmcgttttaaaccattttttttcagcaacaaaaacacttgyagacctttaaaaatatacttttaagtctgtattttttaaaaagcccttccaatggttccaattaggagccagggtgaagcccagtgtgtatcctagtggcataggattaacattaagtatttttacctatttaatttttttatgtttcatctatcatgcagcacacataatagattagaaaaagttcccaccattagatgagcaggaatctagagggaaaatccaccttcagtgaagaagacctcagctttccatcttaagtatagctttttgaaaaagaaatgggataagcagattatatgtcaaataaagtgagcaaactgattcagcaaggtgcctgtgctcttctagtcatggtgaatcctacaaggcctatatttagtgatgaggaataagcacttgttgagtgactattaagtactaggcattttatccacattatttcatttagtctttatagttaactccaaaaagactaatatctcaaagtgttaaggtaacttgccaaatatcccaccattaatacataagttaaaaagaataggacttgaaatgctgcaaaaaataaacagatgtaagttcttcattctttaaacaagcaaatatttaacttaaattttttcttccatcatgactctttaatacaagatttttaaaaggttatatgctgtaattaaagtgaagaccatcttgctgagtttgtcttctttcaaagccatgttagaaactcctactaactcttcattagatttagagggaaataagcccttcctgctcttggtcttttatacactcagcagaacaagaccttcacaagcaagcattacccctttctgatgacgacaatgcattaatccaccaagaatatgctagtattgatatataccaagtaattttgtaaatataaggccttttcatttaggaaaaaattttaaaaaggcattaaatcatccttttccctaggaagatatccttctcaggctgaatttgtcaaagaccaccccgaaaataagctatataaattcctgtgaaggcctgtttaatttatggcccagggaaatgtgtaagtattagagagtcacgccaagagactgcttaactgggttaactgacctgaaattttctgggcctttacaagacttgaaattttcaaacagcatttatatatgcttattatataatagccagaaaaataaaagtgaaaggaactaaatagacctttggagtgaaggcctctttctcatgtagacagtttaatagctttttgtaaaataataccattgctattaaagatacttctggaggacttttttcatccataaagcagtgatttcctgtgagcactgcagtatgttgccattggctcatcaccactgaaaggctgcttctggaatccaacacaactggatctctgtgattactcttcagcaaattcacatttagcaaattataaaaagggacaataggtcattatctcattttaaaaataccatttccgtagacaggtctctgtcatagtgatattcatgtcttaactttgagcacttatgaagcaattcatcttttccattttttcaacttcctgccagacactttatcagaggaaattaaataagttcccttgaaatctttatgtcctgagtaaacaaagtgtaagaaaaactttcagaaatcatcaaataccgaattttttaaatattaagaatgtttatattttttcacacactacttttagtgctcttaatggtattactaacttgcaaaactgtaaatggcctcaattaaagtggctataaataaatagtgacagcaacaattcattgaacacacacacacactatgagccacttactaatttatacggttggcacatatatgctctcaacagctccaacaagagattcagagaagttagattaaaagcaatacaattaaaattcagaaccatgtctgactcactctacattgtgattttaatcatgcaacagtacagccttcccagaatgaatctagaaggtgagcaataaccaatttcccctctcctttctccaaagatattatttataatcctctcacaaggcaagagaagacaaggagcttgatatggtcatattttgtcatacaatggttttaagggaagagcaatgaacctgacttcagactgacaaactgttacacaccaggcacatcacttgttgtcttgtgatttttttgtataaattatatataacataaaaattatatacaaatatatgaaaaagtatataaaaattatgtaacaaaggaacattatataaacatttgtggggaaggtacaaaaatgttttcattggaagaatttacatttattaagggcactgtggacattcacattctgtcagtatttgaaaggtatatattttgatcycttttttaaaataaagagactaaagataaagttaagtacctggagcaaggccacatggctattaaagttatcatctaaactaaagcaccccctcaaattctcaaattgtgaactttcttatcgtaataacctcgccatttccggttgatttccaacagctgtttttgttattgttctcgatgttttcatttcctgcaccccatttacagagagttggtttcagaataaatctttccttcagcaaattaatttgtcctgctttaattctcaccaaacggttcatcaaaatgtataaggtggactctgtggcagtggttcccaaactttgctgatgttgaaatcatctagggatcttacactattcgaatcctgcttctacctccccagaaattctgatttagttggtaygggctgtgaactggaatgccaggtgttttaaagctcctcagattattctaatgtacagcaaaatttggttaccactgtcctagtaattgtttagacttctcttggactgaatctccaaaactccccagctcctgctatcagactatattactcaccatccctgcttattccagtcatctgaggacctccaagaccttcctcctattctttgaagatgttagcagtggtaactccagagcgattactgccataattcttggcgatttccatgtccaggcacataatcctttcaacattttatcctttcagattcttgactcctcttttgaactgtggttatctttcactctaccaaagtcacctctcaaaacatatctctgtatgttttaccaataactgcattattcccaacctcaagttcaatcaggcctctctccagccaccacatcatatctttctagatcatttatcttgtcccttactcaaaaaattacttgactttggacctcctcctattattctatcacctttttactgtgccttacccaagtcatattctcacctgcttcttatccagattagattctagaagtcaccagtgtaaacactcccttacatacactcttgactcttagcccattttcccctccatcgtagtcctctggaaaaactctaaacctagctagatagcattctctatgtagttctcacatgcaccaatggaggagcacagagctgaaaaaagaaatgcactcaacatgctcactgggctcatttttatgaccattaacctcaagtgggccctcagtgctgctaggcaatttgattcattttcctaattcgttcactcacccactttcagagtggtgattcttcactctgagttgatgacctagattattattctgctgaaaactacgaatcagttgggagagaacattcatatgggtctaccccaaacctaytatgccatcttcatctgagcttacatactccattttccctcatgctctgtggataaatcctctgtgttcttatttaacaccacttcttccactgcacactggattctacccctctcacttacttaaggtaatatttatctccttctccagacatcttttccattagtatacaaatatactctaacagtgcctatttaaagaaaaaagtccttctttgaccccatatcttcccctagctactgcctcatttccctgattgtctttactgaaaaagttctcataggagttatctatccttagtctttcaatttgctccacagttatattatttccctgaatatcctatttttgttgaacccactctgtaacaactatgaaactcttccattgtagtgcaaaagcaatcatagataatatacaaaaaacttgcaaggctgtgttctaataaactatatgcacaccaataggcatgggccacatttggtctgtgarcygtagtttgtagcaacttgcattatacagctcctgtttctttcctgaacctagtctgtttagaatgtaaacacttgatggcaaagatttttattaatagtagatcatcaattaacaggcatagtatatagtgaattaacatttttaaataaatattgaatgttrcataaatctatttctcttttagtcttatttttgtaattgttacttttttctgtgatattctgaatgggttgagcagtaccaaatgatattttttgttgttcaagaagtaattgtgtatgttttagttgaagaaagaaaaatccagctagtggacttttttagattctctttatgaaaaaataaaatcaatcctctgcatgttttatgattaggcacattattattattgtttggtacctttgaattgcattttcttaaaaattaaaaatggaattgaatctgaatcaaattggataataactgtgttagtccattttgtgttgccataacagaatatatgaggctggctaatttacaaaggtaagaggtttacttagttcatggttctgcaggctgggtagtatgataagcatggagccagcatctgtttagcttctggtgaaggccatgagtgaggtcaaaacgtggcagggaaagtcaaaggggaaacagacaggcatgaagaggaaccaaacagaaggaggaagctcgctttgtaacaacccactctcaaagcaactattccattctcaaaagagtgagaactcactaccagcagagcaggagggtgacaccaagaaatctgtaagagatccacccccatgacccaaacacctcttattaggcccagcatcaccaaattggaccacatttcaacatgagttattgttgggacaaagcatactcaagccatgcartaatcaaatctatgttcaatgttttaaaataaagtaaaattaaatattgacgatcacaatccatttttctgagggaagttgttttactgctacacaaggaaaatggtcatttcacaaaccatggaagatgcacrtgtgctcaggctcccgaatatacatcatgctgggaaacccacatgaatccttgtatagttgtttccagtggaagattgccccaataccatcaaatcccactgccatgaaactctacatttgttaactcaaaaatagatgaaaaatgtctgactctcagcagcccatcttactggcaattgtctatatctactctgattgcttccaggatatgttcaggctgaagtatcagtgtctataatttacttatttatttttccagccatataaaaattttcaattttacgatttatattgaagttaaagaaagtattgtcttcctgaagttttttgatctcctctgttgtgttcccaaattacatcttaaaagcatcatcctagtgctcctgaaagaagtcattatgggaaaatagcaargcctctccttttcctagtgtcacagaaaatgcaggaaatgttcaaagactgcaatgagttccccaaacacaaaatgtttctgcactcaacactttactagcatttgcagccacatacatttagacatttgtgattcattactagaccactattctcataagaacataaaataagaattaagaaaatgatcatcattcttaacaacagaaaatctgctcttcaaaattgctgacagaaagccaaattaataaatagtattagtcaaactaattgaatttatttattatctaaagatgctcttccacacagacagtcttggaaaataaggctacacttcttgtatttactctgaaagtaaaaatcttgtctgtatagaccttgaattatcactttgtacttttctaaaaacaaaagtgcactcaatttacaatatgtgtttctaaatgaaaataaacgactttcattcagatgtttgtgaaaccaaacacagacactgtcatttgagaagcagaatttatgggaaaagaaagagagaaaagatggttctgggatagttcaaatcccaaaggaagagaaggacacatatcacttagcaagaattcccatcagaaacaggacacatgcatttcagacaacaaaaaaactgaacgggacccaaaaacaatagacagataaggaggtttaaatgagtgaaaactactttttgttgtttatgtagtagtcttacaaatagattttagaacaattttccagcgataaattttttaattttactcaaataagaaagttgtttaagatatttactttaatattttaataaacatggcttttaaagggccatccgtgtgctaaaaagtatcagaattaaaatatttgcttgaggtttactaatgacaaaaatctcgtgtcagtattttaaagaaaggtaacagattaataatacagaagctgtgagagctactttggaaagtctcttcttaaaatgtccttttagaagtaagttaccatcagttgaacaccctaccttttacaccattagactagtgcatagcctggaagttagttatcttccagcatgggaggagtgttagtccaattgagaagaatatactaaatgctatcaactatttttgttattgcatctcaaagaatattaaggtttagtgcaattctatgcagaatcccaagcagacatgtttaacttggcaaataactctaaacttctgtaagataaaatgagcaagacaaacaagtagatttttgtgaggaacaaaatcataacatgaggaatttgtcttactagatgttaaaatttactataaaggtacaacaatcaaaactgtgaaacttaaacaggaatgaatagatcaaaggagtataatcaagaccccaagaatgctcacatacaaaaaactagtatatgctacatgtatgatcagtaagaaaatacataatcagcaaaaaaaaatgcataatacataagaaaatagctgataagcagaaaaagaactattccataatgatcctggaaaatgtatcaattatttgagagtaaaaaaacaaataattccaagtgtatcataaagttaaaaattaaaaatttgggggattcctctttcagttttggagccccccctctctgtctctgcacgggggagcttcttcctcctgccttctcccttgttttttgtctactaaactctctactccttaaamccaaaataaataaataaataaataaaaattcaaagcagaaaaataaaaaccaggagaaaatataaacaaacattttcaaagctttatatggaaaagttaagctttaagaaatggaaaactcacaaagaaaacaattactagatttaattatttgtaaatactatcaagaactgccagtatcaaaattaaaggtaaactctaaaatggaaaaatacttccaataaatatggattcagataatgtctttaagacataattaattcttatgaacctgagagcaacatatcacacaacaaattaaattgagaagaatcacaaatgagcagttcaccaaagaaaaaatttaaatgtttattaaacatattaaattggtcatctccctaagaaacaaagaatgtaattaaaaataagacaacttttgcctataaatggaatgaaaagagcgctgtgatctattgggggaattataaattggtaaaagtttcctgggagaaagatacacagatatttgccaaaacatttttaataataaagtcaaaactgaaacaacttaaatatctaacaataggggaatagttaaataaattmcggttagtaagattatgcacttggataatattcataatcggttactttaaaaaaaaaatccagtaacaaaactgtatattgaataatccaagtttgatatcacactctcacacaaatccacatacacatttttgtagaaaaaaaaacagaaaataggcaaatacattgtttgcaatcttttgatcattcagatttgccttattgtcttggkatttcttagaataactgcaaggggtatgtattgttatttttagaaattattatttaaaataacatgtgcatgcagtaaccatgcatatgtctgatcttcaggagaattgcaggagatagtccccatcttcaagaagcttatagttccactcacaaatgtgcatacacatgaaagacaaatcacatgtagatgacaaggtatattcaaatatcagcccatggaataatttgtattttggaaatctgaggcattgtggattagagtagtcaagggggctgagtcttgaaggaagttagtctgataagaacaggtaagtgatcaagacttgagagcagataggacaggacatgacacatcctgaagacaatgacaaagcatgtctggcaatatatcacatgtttgtacgcttttgatgggtattttaaagttaaaaggtatctggaaaaccaacataaaggtactactgtactaacacatcagagtatttacaactgtcattttcttgcagagattctataatagcttgcctctctgagaaaagaggtaaaactcatttttaacagtgaccaatgagttaattaagtgtatgagcattctaaactttatcacaattgtagataggcaacattttgtcattgtgactacatctcaactccttagggacaaatagaactgtccactaacagtggctgtggtgagcagggctcatatatgtgctatgcaggaaagacagaactttcccatgacctaaagagactctgcaaagtgaccacagatggtttataccagaaaagctggaaaaattatatgaagtcctgtgaaaaaccttagtttggraaaaaaaataagaggaagcaaataaataggaggtcaccagcaagctccaaattaaaggaggtctctctgaatcaccctttctgagattttagcatatggacttcctaagtcacaaaggcctggagagaagatgagaaccacagtaaattccaaatcccggagttttattatcccattgttacacactagagagatttatggagccgctcccaaaaatgttgtaagtgtgctacagaaatggcttgttctccctgagccttttaataaagaagtaaggcagtgtgccaggaagagtacagagtgaagagtrggtgactagaacttcagctatcctgataattctctgagggaaatggcacatcatacttaacctcacagggttttcactttcattatctgcaatatgaagacagtgttcaaaatcaaagaggcacaaccagtcctgagcaagctgagaagattgctgctcaggaggactatccagaatgttcaaaaatagaagatgccagctgattccatacaaattccaaatagtgtcaggtacactataggccgcaggggaaaagtctagtgtctctgggctcagagtttctagaccaggagagctcttggcctgccactctcactttacagaaataatacctgacatttgaatgcaagctagcctaagagttgaagtaaacaatactttatttataagataaataataattgcaggtaaataatatatctaggagaaacataatattttacagatgcaaaaactggaagcatagagaaattaagccacttggcagagacgagacagctgtcatggcaaagtcctcaagacagggtcacccattccagcagcaccctcttaagcatttggctctgtcttccttcaatagaaaagagctgggacttgcctgagattaaaaatagttaagcattttgcaaataagtgcttagaaagatctatttaatatcataaaaaatagaaaataagcacattggcttgcctatcagaaagacgtgtggaaattgagacatgaccaaaaacaacttactagaaaacagctatactttaacactgtttttaaatttcattgagatgttttgaataatcaaagatgtaacctccagatatcaatgtttgttacttttaggctaagagtttgtgggaaatcaatcctacaactttttctctcaccattaatcaaaaaataatgatagtttcctgtagaggaaagttttgagaggtagtgattaagagagtcaaccctggaggtagctggcttgggttaaatcctggtcccaacacttaatggctatggcacgttgtcttagtcactgctgcatcctgaatgccaaccaaagggtctgacacttaagaaactggtaataaaagtgtaatgaatttttaacacttaatttgtttttgaagaaaatggggacttggctctctctctctctctcccagccccccacaaccaccacacaatcaagacatgttttgaaaggatggtatagcataccatttctgtttttttctttctctttatcacttgtgagaatagctgcttctcctaggaaagtgacatttgtagaacagcagcatgaatgttatgttatgaatatattaaccatggattaaaatagttctaacaggcacaaataagacatttacatttggagcctaaaatagccagtttgtctactttggtcacattagaggaaagctgtcactccacttgccctcccatggacctatctgattggagcctttggctagcatttattttttttgaaagaagcaaaaaaaagttgaggaagggttcagatggtatctcaaactacctaagaaacacaaagccctttagctaggctttgaagtttgttcctctgagcttgtgggcaaacaaaaagcattagcagcattcaatgaaaaataaaaaatcatgcaagaagaaactaaatattttaaagcacccgtaaccattaaaataaatagctaatgtaatgccatgtgtaatctggaaaacaagaaatgagtaattagggggaaagttcatttcagtggacgacgaattgcccttaaggtttctgactgcctactttaaattactataatatttacattgtaaattcagttataattagactacccaattcctctcaaacaatacagactaagaggctttggttaacatcctagctttattactagcaagttggacaattaaaacaaataatttgaccttcttcaactttagtttccacaagtttaactaagacaattgaaacagatcatttccaaagttcttttttagttccaaaacactatgaattatcaggctaataacaaaaatgcgatgtagaagatgaactgcattataaatgtctatttaatgttttaattcagtaattcaataataatggtcaacatgtatagagccaggcattttttgacactttacatgtataaatacatttaatccatctaaaatttccatgaaataagtcctaatattaccccagttttgtaactgagaagacaaagaaaaagtacactgattataaagctagtggtcaagcaatgtagctgggattcaaactccacgcaatctggctcagaatccctgtgttcaattcatcactctgcaattctgctagtgcaaatttcaaaatgcagatccagaggagaaaagaccctgcccctggctattatagcagttggtaatgattccattcatgcaaaatgtcatgtcttcctagatgtgctttttcaggtagaaaaaagaattttgaagactaaaatttatttttttcccacagaactattaattacatatccccaggccctcccatcttttaaatattttccctagttataaaattacttcatctgattgctgggatttaaaagtaatgctgattggccaggcgcaggcgcagtggctcacgcctgtaatcccagcactctgggaggccgaggtgggtggatcacctgaggtcgggagtttgagaccagcctggccaacatggagacaccctgtctctactaaaaaatacaaaattagccaggcatggtggtgcatgcctgtaatcccagctactcgggaggctgaggcaggagaatcgcttgaacctgggaggcagaggttgtggtgagccgagatcgtgccattgcactccagcctgggcaaaaagagcaaaactccatcttaaaaaaaaaaaaaaaaaaaaaaagtaatgctgatttattaatattttattacttttgtcaaaacatgtagaagtgaatactgcataaatacctcgatcctataaagatatgattagcagacgcctttgttaaatatgagtactggtttcttaaaatataattactatttgttctggccaagactatcataaaatatggaatagatgaaggataaaacttacacaaatggtaacttacctatgcctgtaagtcttatgtgaatgtgtatgtgtgtatgagttactaaatacaaaggaagtcaggtaaaattacagcctattatcagcaattcctgaagaaaaaaatacagcagtaaagttttaggtattatgtgttgctaaatttgcatagacttactaagttgagttcatatggtctaattcagattaattcaagagcatgtgatgaactggaacttatttatttcataacagcaaacataggcttctgccattctgacacaaaacaaaagtaatggaaagaacaggtatggtagcacttctctggagaaaactccacatggaaattaaaaagctgcctaatctctcttttccacctccattgtgggaaatgcggcagctgctgatgcacggaggccacatatgatgggaatacgggagcttcaggtgatgagggaatggattcctctaccctacacttcccaaaaggggaaaaatacattttttactggaaaaaaacctgtaaaaagcacacaataaaccaaataaattatgaaacataattatgccatggtcatgttgcacaataaaaatcactattaaagaaatgaagattaaaaagaaagccttggcaatattaagccccataatctgcttcctctttcgatatttcagtagcacaacacttatcactatcttaatggatgtgcacaatatgtagggtatgcacttaataactataaatacatatgtaaaataaaatactatcaatggcaatttatcttaatgctttcattctcctgggttatttccttctgaccaacattctaagaggggtaagagaaaataccagtgggcttgagaccataaactgcatgatttcatttatattacatagaaaaaagcaaagttaatcaacgttattcaaagttaaaatagatttggaaggataggtaatgaatgaaagggagcatagaagaggtttttacgtggccgggcacggtggctcacgcctgtaatcccaccactttgggaggtcaaggtgggtggatcacgaggtcaggagatggagaccatcctggccaacacagtgaaaccccgtctctactaaaactacaaaaaaattagccgggcgtggtggcaggctcctgtagtcccagctactcgggaggctgaggcagcagaatggcgtgaaccgggaaggcggagcttgcagtgagccgagatcgcgccactgcactccagcctgggtgatagagcaagactccgtctcaaaaaaaaaaaaaaaagaggatttttagggttcttgtgatgatctgtcttttgatctggttactagctacaaggatgtgtttaattcatcaaggtgtcataataaatatgctttcagtatatatattttaatttttaacacttgtaaaaaatactcttattttatgtttttaaattatattcttatgcactaacaaacaactatcagaaaatgtaattttaaaaaataaactattcaaatctattagaatgactgttgaaaaaagttgaccacaccaagtgctggtgaggatatagagtagccagaactctaatgcatgttgctgggaaagcaagatggtacagtttggcggtttctcataaagtcatgcacatgtgatgagatccagaaatctcactcctaagtattttcactagagaaataaaaacttatgtttagacaaaaacatgcacaaaaatgtttgtagcagcattactcaaaattactcaaaactggaatcaaccaaaatctctctcaaggagtgaatgcataagcaaactggtacatccatataatggaatactcctccccaataaaaggaacaaactattgatacacaaaacaacatagataaatcccaaatgcattaygctaggtgaaagaagtcagtctcagattgcatactaagattacatccatttgaaattctggtaaagagaaaactacagagatgaagaacagatcagttcagagttaggagtagtggggacaattttacctcaaaggggtagtgtcttagtccatttagtgttgctataaagaccctgggtaatttacaaagaagagttttacttggctcacaattctgtgggttgtacaagacgcatggcaccagcatctgcttgtggtgagggcttcaggctgcttccactcgtggtggaaggtaaagggcagctggtgtgtgcagagatcacatggcaagagaggaagcaagatgcagggagggaagttccaggctctttttaacaaccagctctcagaggaagagacacagaaagacaaacatcacatattctgacttatatgtaggagctataaaagtagatctcatggagataaatagtagaataatcccagaggctgggaagagtgtgtgtgttgtgcaggggttgaggggatcaacgaagaaaagttggttaatgggtacagacagataaaaggaatgaatcgtaatgtttgataacaaagtagagtgactacagttaacaacaatatattgtatatttcaaaataacctagaagagacagcttggaatgtttcctacatgtagaaatgataaatacttgaggtgatggatatcccaaataccctgacttgattattagactttatatgcatgtaacaaagtatcacatgtacctcataattatgtacagatattacgtattaacttaaaaatgaacttcaatacatattttgcaccatgtaaaaaattaactcaaaatggatcacagagctaaatgcraaacctaaaacttctatgaaaaaaataggagaaaaatatttgtaactttggattagttaataatttatttgatatgatatcaagtgtacaatacacaaaagaacaaattgataaattggacttcatcaaaattaaaaacttctgttctttgaaatatcgtttcatagagaggatactttttattatcactgctaacctgcggaggtagcagtgagccgagattgcgccactatactctagcctgggctacagagcaagactctgtctcaaaaaaaagaaagaaagaaaatcacataatctttatttagtatatatttaaaaattatcaaaacccagtaataaaaatataaataacccaatttaaaatatgggcaaaatatacttgtagaaaaatgaaattggatccctatctctcaccatatacaaaaattaactcaagatggattaacgacttaaatctaagacctgaaaccataacaattctagaagaacacctagggaaaattcttctggacattggcctaggcaaagaatttatgactaagaccccaaaagcaaatgcaacaaaaacaaaaataaataaatacctaattaaactaaaaagcttctacacagcaaaaacaatcaagagtaaacagatagcctacagaatgtgagaaaatacttgcaaactatacttctgatagaggactaatatccagaatctacaggaaactcaaacaaatcagcaagaaaaaaataataataatcttttttttgagagagagtcamgctctgtcgccctggttggagtgcagtggcacgatctgggctcactgcaagctccacctcccaggttcacgccattctcctgcctcagcctcccgagtagctgggactacaggtgccccccaccatgcccagctaattttttgtgtttttagtagagacggggtttcaccatgttagccaggatggtctcgatatcctgacctcgtgatccacctgccttggcctcctaaagtgctgggattacaggcctgagccaccacacccagccaaataaccttatttttaaatgagcaaatggcatgagcagacatttatcaaaaaaagatatacaaatggccaacaaacatatgaaaaaaatgttcaacatcactaattatcagggaaatgcaaaataaaaccataagaagataccaccatactccagccagaatggccattttaaaaacttgaaaaccaataggtgtttgcatagatatgagaaaaagggaacacttgtacactactggtgggaatgtaaattagtacagccactatagaaaacagtatagagagttgtaaagaactaaaggtagatctgccattcaattcagcaatctcactactgggtatctacccacaggaaaaaaagtcattatattaaaaaaaaaaaaaaccccacctatgtgtatatgtttatcatagcacaaatcacaattgcaaagatataaaatcaacctaactgtccaccagccaatgagtgggtaataaaaatgtggtttatatatgccatggaattctactcagccgtaaaaaacaaagaatgtcttttgcagcaacttggatggaactggaggccattattctaagtgaaggaactcaagagtagaaaaccaattactgcatgttctcactcataagctaagatggctactcaaaggcatacagagtggtataatggacattggagactcagaggtggaagggtaggaggtgggtgagggatgaaaaattacctagtatgtaaaatgtacactgttagggtgatggatacactaaaagcccagacttcaccactatacagttcatccacataaccaaaaaaatggctggaccsctaaaagctgttgaaataattttgttttaatgggcaaaatatgtgaagagatacgtcaccaaaaagaagatatacatatgtcaaataaacacataaaatagtgatcaatattactacccattagggtcatagagattaaagtcatgctgggataacattacacacctattaaaatacctaaaatttaaaaaaactaatcatgtcaagtgttggcaaggaagtggagcatctggaactctcattaacttttgctgacaatatgaagctgtaaaaccactttgaaaaaaaatttaggcacttaaaaaattgaaatacacatctatcatatgatgaagacattgcatttctaggtctttacccaagagaattgaaagtacatgtctaaaaaatgtatacacaaatgtttgtagcatctttatttgttatcactgagaactggaaacaacacaaatgtgcatcaacagttgaatgaattaataaagtttggtaaatagagacaattgaatactaatcggctataaaaaggaatgaactactggtatacataataacacagataagtgtcaaaatactattctttaagagaaaagccaaacaaatacatactgtatgattccatttataaaaaagactagaaaatacaaactaatttacagtgaaggaaatcagatcaatactttcctggaaatatggtaggttgaggtgggactggaatgagggactataaaagaacatgaagaaatctaagggagtaataagtatgtttattatctgaattttgtttatggttttctatacatatgcatatatcaaaacttatcaaattgcaccctgtattagttttttattactgcataacaaattattgcaaacctagtgacttaaaactaacctatcatcttaccatttctgtgggccagaaatacaagcatgagctaactggatcctgtacttgggatctcactagactgaaatcaaggtgtcagccagggctgtgatcacatctgagacttaggggtctcagaattcaatgacttgtggttgtaggactaagatccccattatcttgctggctgctggctagggattctccagttcctagagcttgcccccaggttcttgtcacgtagccatctcacaacatggaaattgacttcatcaaaaacccaccttacaggcgtgcagtggctcacgcctgtaatcccagtactttgggaggctggggcatgcagatcacctgaggtcgggagttcgagactagcctgaccaacatggagaaaccccgtctctactaaaaatacaaaaaaatcagccaggtgtggtgctgcatgcctgtaatcccagctactcgggaggctgaggcaggagaatcgcttaacccaggaggcggaggttgtggtgagccgagatcgtggcattgcataaaggccctaccctcataacctaatctaatcctaattatctcccagaggctctgtctccaaatattatcacattgggggttagggcttcaatgtttgaattggaacaggagggccacaaacattcggtccataacagagaggattatacagggtgtacactctcaggagtagaaatttgggggactatcgtagaatgctgcctaccacataccttttaaacatgtgcagtttatgtccacacaaaacatcaatgtacaaaaaagacaaaatgacataagggaaagaaaattatattatcatcagacttctggacagcaatgtattatcccagaaaaaagtagaataaacttgaagatacatacatatgtatgtatgccgtggattttatgtccaacaaaatttaccttcaagtataaagggcacacatgaatttttatcagcatgcaaaaactgaaggaatgttgtttctattttcctccttaggaatctactatggtaggtactttagacaaccaaaatgaatagaaaattatcggtatgaggactgaagaggagtattaaacatatagttacttgtagagccagatgaagtgaagattaaaggaagagagtataatatataatggttttatatttaagcaaagtagtgaagttataaaaaattgacataatgtgtagaatatgcaaaatatatttgaacaattctcagtaatttttcatggtggagattttggtatggttattttaagactattctgtttataacatgggataaagtaataattacgggaaattctaattttattatctcctgcattcatgggaaccaagattcttgatacagaagaaagtagttgtagttaaagtaaaaacaatccctgacacacacatctctttccctaattttaattggaaatatatcagtaagatctgataaactattttgtatgtacatacagatatgcctatggtatatgtatatgtgtgtctacattcatatctatcaatattttctctcttgcgcatctcttcccacaggagtctctggctacatgctcccgacaagacaatcacaaatgtcaattgcacgtaactccttgcgaaggacaaatgttaaggttcttttccactaagcccagtccatctcatttctctggcttccctcataaaatgatgaacagtctttgcatccgtcagtgataacagagtctcagcttcccatctcctgtgaataaattcttgggggagggaagcatctacacacctatctaaaacaaagaggccttaggctacataaatcaaaatatggggtagggaggatttctaactttgcagaaacaaagttcagccaatagatacaattactattactaaatagtacacttaatgcttcagtctgaaggtacagtcaatcctccatagccatgggttccaatgtctcagattcaaccaacctcagattgaaaatattgtggacaaaaatataaaaaataacaatacaataataaaataatacaaatttttaaaacaacatagtataacaactatgtatacatcatttacatgatattaagtattataagtaatctagagatgatttaaaatatacaagaggatgtgcacagttgtatgcaaatactatgccattttgtataagggacttgagcatccacagattttgttatccacaaggggtggagggtactggaaccaaccccctttagctactagggaagaactgtactgcattttggttccttcactggatttcagagcttctcatccaacattagcattgggaaactcctggatgaaagggaacatctcccataaaaacaaattcctgtaccaccattgcaagatagaaagtgattactactccccacatgaaaaattctccaacttcaccacatcaaagtcaggaagctattgagcattcaacattctagaataaggcaacccaaagctttcattgaacaaatatggtttgattgcacaggtttgtcaaagtgccatgtggtttttgagttcctaaacaccacaatgtccccaagcaaatttttaaaacacaagttattccttcaggatgccaagattccataggaacattatcctctatttcaaaaataaagtataaagctatttgaaaataaaatatcaatcagtcaatgccgaaactgtaggaaagactgaatgttgcctgcctttggaaatctgtgtcattccagaacataaaggccaattaccatatctgctcagaaatatatatcagaaatatatatcagagttggaagctctttagtggagatggatcttagaggcccctttaagacataggcttttagaaaccttctatattaaagcatgctcttacatccttccaatcctataacagaataaacgtttcaaagcaccgacctgttaattaccttatttaatcttcactatgttgcattcatttgtaatgttgtttcttattcaattaagtaaagaagcttaacttctagatgcatattatgtgttttaaaaggctgcaaaaagcataagaataaaaaattattttccccattagcttatcatcaggaaaattccagaccaaagaaaggcatggaagtggatggttatggagtaaacttctggaagaaacaaatgtggaagacacagcttttcctctttgtaacttaagccagaatcaacctacttttatccagggggtaaactgagagagaaagaaaactctctattgactattgcgtgcatgccaaaagatcatagactttatctcaatgaaccccatataggcgttattatccccattttatagatcatgataaaaacatgcccacagccatatgtgtggtctttgaaagtacaccatcaaacccagacctattgattataattataaggcctcttttcctttccatggtatctcactgacaaaacctgtgttgcctggtctgtgaccacgtcttggttaactgaaggagaacagaaaattgtccttttcagctgaaactaaaaccagatcaactgacgactccaagatgttaaaaaatggtccagataatcctgactaaaaatacaatggacaaacaactttatcaatttcagactatttttcccggtctcttgaattttgcatgtgaatgtttcatttaaaaacagcctcatcaagcaaagtttaaagaagtgtgtccaaaaaaattataggtttttcccccaatctttagaagattttcattgctattgctacgaaatacaaaaagttaaacaaaaaattttgttttccaagctgaaacatgtatttgtaaatccaggatagttaaacaagaaaactattcttgcagaaaatatctgaaaaatgaaataagcaatattaagacaaactgagtaaggaagtggtgattaagtggagtaaagaccgaggtcatgtacatctgtgctgtgtaagggcccacttcattttttgataacttcactttttcacccttaacagggttaaccctagaatgtgacaagggtagcctatgacaggcgacattttgaagtcacatttatacaacctctaccccaaacccaaagacctctctctctctgacacaaacacacacggaaatttatatacttttaatatacacaacccaaggtagtcttttacaatttaccagagtcatttattacttagtggcattccagctctcacacaaaatcacgatatttcctgtgcttccctccatgcacgttttgttcacttctttgcacaagggaactgtgactctagcatgctgacttgtcgtagaaaataaagtgggaatttttggccatcacttttaatttagagctactggttcatttctagaataacmttaaacaagagaacgattaaaaaaaaaaaaaaagagaragaaatgaatgaataggttatcactgccatctggtggtgaaaatgcaagaaaacaggatatacattctgatagctcaaaatagaattagtttgggaaaagcattgttttataaaatgtcaaaaaatgttcagaagtttaattaagaaatgattatcaaatgtttgtgttactgatatgactcagagtagtcgcaatacggaatatatgatctcttctgattcacattttttttttctcaatttccaggaacatagaggtgttcctacttttcaggcccaagaaccatagaaaaagttaaatgatcattgcatccgtttcacctccccatggcactcctccttcacagttgttatttcaagagaactaagtatttacaatcatgctatgtggtgggcacagcatacaaaacggacatctcatcacctgcttgcctctatcaggctctgaaggtgtctttcctaggaagttgtcaacataattaaatcagacaaacttcaagataccattgcttttgacagtgtggagtttcaacatgacagactttgactctgcagggggattccacagcagctcccatcatatctaagcttctattacacccaagcttctatcacacactaagcaatgtgatctcacattacacagcatactaaactctctatataggaaatcaaactttcttacgttgcacacacacacacaccatttgtttgtttctgctttcaagtctttatgctttcttttattttcacttgtattgcctatcatattatcctcttcaactacccaggtccttgccaaacgtaaaaattcactgacttgaaaatgcctcaaaggttatctatatattactttttagggtttgctttctatatgtcagacactgtttcaatcattttatgcacatattagtatttccaaattctcaaaaaaactttggagaattattattcctatttaagcgtggagaaaacttggctcagagcaatgaataactcatctaagtctgcactgggagtgagtggagaaaccaagttttgaagcaaggtcagtctaatttaaaggttaaactcattccttccttgctcatcattctaacagggctttagtacacacacatatatgatgtaagaacaatacatatatgttcttacatccctttcctgtgcaatatgatccattcctctcaagaaagtatgaatgacatttcctttagcaactccagagaaccctcattagctaatgaagtggtctcttggttaacagtgtggatttcaaaatcagaaagcattctaccactagcaactttacagtattgcaaaagtactaggcttcagatcttcagttttgcccctttgaaatactaataaacctttttgaaaattaggtgagataatccatgaaaagagcttaactagcatcatgcctgtgacatgttaagcactcaataaaagttggcgtttattatttcagtctcttttatatactggatattcaatgcagattgatgattaactgttttcagcgatatgaaaaggcctttatgaaaggaaaagagctcttcagaatattggatgactctgaatggtgactctagaataacagggcaagactctatatgggctgtagaatcratcatatgagagatctgggtagaacatcttcacatattggaaaatgtaggggacaccacgctcctggggtttctaggctggcagtgaacacatggaaaattctaaatgtgaaaatgacagctttgtcagtttgctcctcgaggcctgccaaagactgccacagtccctgtccatctctagtaaatcacagtaactaattcagctcctacaccaaatttggcttcttctatgacttttcctaacataaaaacacacaaaaaagaatagcagcacaaaaaccacataagtcccagaaatcatttccagatgaaattttatatgttctgctttctagttttggcaagtcattgaaaagtaaaatagcaaccactgtgagagaattcttatatttctggaaaatgatgttccaatgttatttttaaggaaaggaatgtttatccttcgttccgaggaatgataaaaatgttcccaaattaccctttaaaaaggcagtgattttacaaaatatatatatatacacacacacacacacacattaattcctcactttatatcttaaataggttctttgaacctattgcttgttaaacaaaagtttaaacaaaacgacatataacaaaaccaattttaccaccagctacttgatataaataagattcagttcctacaacaaatttctggtcacaaaaacatcaccagacttctaaataaagagccaaagcacttctaatattaaacatagaaaaatatttgaactatatatacattttttaactattaatatactcaagcaggataattatctacccatttattccagctcggggttgtaggtgggtgagtctgtctcagcagttcagggcaccagtcagaaacccaccctggataggccgccatcccatcacagggcacactcaggcacacacactcacactcactcagacaggggccatttagacatgctaattcactgaatgtgcgtatctttgggatgtgggaggaaatttgagtacccagagaaaacccatgcagacatggggagaatactcaaggttcacacgacagtggccgtaggaagaagcgatattttttctcatcaatgcgatgagaaaacaaggttgaatgaaacattattcacttacctggtgcttgagtgtgtggtatgtgtgtgtatgtgtctatctccaaagataatattatttattaaaccactgtcccactcccgtgagcactgatgtcctaagaatcccacccctgctattgatacggaagtggggaagggaagtgctgggaagggaagtgctggtgtgggccctttaaatgatacggaaatagggaagggcgtggtccctgactaggactccaccacctgccttgtgaccagggacctaggtgaggacaggcatttttgttttcctgcccaaatgttgcatttttcaagaccaccctggcgtgccactcccccatcctatgcctatgaaaacccccaacaccctaacaggcagacacacaaacggctggacatcgagaggagcacatcactggaggaacacgcaggtggctggacattgagaggaacgcaccgacaagcaccagcaggccaacaagccaccaaccgactggcagactgacacggagtttggctggggcagtcggaggagagcgcccaggccatccagcagcccaactccagaggaaaaccatcttccttctggctccctcatctgctgagagctacttccactcagtaaaaccttgcactcattcttcaagcccacgtgtgaaccgattcttcaggcacaccaaggcaagaacccgggatacagaaaggcctctgtccttgccacgaggcagagtgtctaattgagctgattaacacaagctgcctatagacagcaaaactaagagcccccagtagcacacactcactggggcttcaggagctgtaaaaattcacccctagacactgccatggggtcgaagccccacatcctgcccatctgtatgctcccccagagatgtgagcagcgaaacactgaagaagctagccactccctctctcgcatgccctgcgaaggggacaagggaacttttccagtttcactatgaccatggcaaaagctacatacctcaagactgcccattgagattagaaaacaatacaaaatcctgacccttaatccagctgtcttacttctaggaatcaacccaaagatacattagtaaaaacagaaatatacctgcttaatactggtttttttttctttgcaacttttattttaggttcgggggggtacgtgtgcaggtttgttacatggctaaattgtgtgtcatgggatttcttagtcacccagataataagcataggacttgataggtagttttttggtcctcaccctcctcctaccctccaccaccaagtaggtcttggtgtctatggttctcttctttgcgtccatgtgtactcagtgtttatctcccaggtgagagaatatgcagtatttacttttctgctcctgcattaatttgcttaggataatggcctccaactccatcgtgttactgtaaagggcatgatttccttctttttatggctacatagtattccatggtatatacataccacattttctctatccagtccatcattgatgggcatttaggctggtttcacatctttgctattgtaaatagtgctacgatgaacacatgcgtgtatgtgtctttatggtagtttgggtatatacctagtaacgggattgctgggttgaatggtagttctgttttaagtcctgtgaaaaatctccaaactgacttccacagaggatgaactaatttacattcctaccagcggtgtgtaagtgctcccttttctccacaacctcacatgcatcggttattttttgaccttttaataatagccattccgattggtgtgagatagtatctcattatggttttggtttgcgtttttctaacgattagtaatgttgagcttcttttcatgtgtttgttggctacatgtatgtcttcttttgagaagtgtcttcatatcctttgtccattttttaatggggttgtttggtttttgcttgttaatttgtctaagttccttatagattatgtatattagacctttgttgggtgcatagtttgcaaatattttcccccattatgtatgtaggttttctgtttactctgttaatagtttctttcaactatgcagaagctctttagtttaattaggtaccatttgtcgagttttattgttgctgcaattgcttttgaagtcttcatcatgaaatctttgccagggcctatgtccagaatgggatttcctagggtttcttctaaaatttttatagttttgggttttacatggaagtctttaattcatcttgagttgatttttgtatatggtgaaagtaaggggtccagtttaaatcttctgcatatggcaagccagttatcccagccccatttattaaataaggagttctttccccattgcttgttttttgtcaattttgttgaagatcagatagttgtacatgtgtggttttacttctgggttctctaacctgttcccttagtcgatgtgtctgtttttgtaccarcactatgctgttttggctacaatagccttgtagtatagtttgaaattgggtattaaagtgcctctagctttgcttttttgcttagggttgccatggctattcaggcttttttttttttttttttggttctacatgaattttagaatacttttttctaattctgtgaaaaaatatcattgaggtagtttgataagaatagcattgaatctgcacattgctttgggcagcgtggccaatctaacaatactaattcttcctatccatgaacatggaatatttttccatttgttagtgtcacccctaatttcttccagcagtgttttttaattctcattgtagagattgttcaccttcctggttagctgtatttctatatatgttattatttttttggctactgtgaataggaataagtttttttatttggctctcagcttggatgttcctggcgtataggagtgctagcgattttcgtgcattgattttgtatcctgaaactttgctgaagttgtttatcagatctgggagttttggggaagagactatgggattttctaggtatagaatcatatcatctgcaaagatagtttgacctcctttcttcctatttggatgccttttatttctttctcttccctggttgctctggttctcaaggggaatacttccagcttttgcccattcagtatgatgttgactgtgagtttgtcatagatggctcttactgttttgaggtacattccttcaacgcctagtttgttgtgcatttttaacatgaagagatgttgaattttattgaaagcctttttgtgtctattgagatgattgtgtagtttttgcttttagttattttcatataatgaatcatacttattgatttgtgtgtgttgaaccaatctttcacatcaataaagcctagttaatcatggtggattagctttctgatatgctgctggatttgcttttctagtattttgttgagggttgttgcacctatggtaatcagagatattggcctgaagttttactttgtggttgttgggtgtttggcaggttttgctatcagaatgataccagcctcatagaatgagttagagaggagtttgtcatcctcartttttaaaaacagtttcagtaggattggtaccagctcttctttatacacctggtagaatacagctgtgagtccatctacttcaggactttttcttagtaggcttttattactgattcaattttggaactcatttttgttttgttcaaagtttcaatttcttcctcgtccaatctttaccaggttgtatatttccaggaatgtattcatttcttctaggtttcctagttggtttgcacagaggtgttcataatagtctctgaatgatactgtgttccatttctgtggggtcaatgataatcatttttgattgtgtttatttggattgtctcttttttctttattagtctaactagtggtttatcaatcttaattattctttcaaagaaccaattttttgtttcattgattttttttttttgagacagatctcagtctgtcacccaggctagagtgcagtggcatgatcttggctcactgcatcctccacctactggcctcaagcgatcctcccatctcaccctcctgagtagctgggactatggacatgtgccaccacactcagctaatttttatatttttagtagaaacagagtttctccatgttgcccagacaggtcttaaacttctgggctcaagttatccacccacctctgcctcacaaagtgcaggggttacagatgtgaaccactatgcctggccttgtatggctttttgcatctcagtttgattcagttcagctcagattttgggtatttgtttttttctgctagctttgaggttggtttgctcttgtttttctagttcttcttggtgtgatgttaggttgtcagtttgagatctttctaactttttgatgtggtgatttagcactgtaaacttccctttttgcactgttttagctgtgttccagatattctggtatgttgtatgtttgttttcattcgttttaaagaatctgatttctgccttaatttcactgtttaaaagaatttcttgatttctgccttaatttcattgtttatccaagtcattcaggagtagattgtttaatctccacataattgtatagttctgagagaccctcttaatattgattcttatttttattgtgctgtggttcaagagtgtggttgatatgtttttggtttctttgaatttgtcaagaattgttttatggctaagcatatacttaattttagagcatrtgccatgtgcagatgagaagaatgtatattcagttgttgctgggtggaatgttctataaatgcccattaggcccatctggtaaagtatcgtgtttaggtcctgaatatctttgtcagttttctgctttgatgatctgtctaacactgtcagtggggtgttgaagtctcccgctattattgtgttgttatctaagtctctttgtaggtcttgaagaacttgttttatcaatctgggtgctcctgcgttggtgcatatatatttagaatagttaagtcttttgttaaattgaacctttatcattatgcaatgtccctctttggttcttttttgattattggtctgaagtctgttttgtctgaaattagaaaagcaacccctgatctttttcattttccatttgcttggtaaatttttttacatctctttactttgagcctatgggtgtcattgcatgtaagatggatctcttgaagacagtgtacagatgagtcttgcttctttacccaacttgccattctgtgtttttgtaagtggagtgtttattttccattcaaggttaatattgttatgagcagatttgatcatatcatactgttgttagctagttgttatgcaggcttgtgtggttgctttatagggtcaatggtctatgtacttaagtgtgtttttgtggtggccagtaacagtcttttgtttccatgtttagcattcctttaaggacctcttgtaaggcaagtctggtggtaattaattcccttagcatttgcttttctgaagaggattttgtttctttcacttacgaagcttagtttgactggatataaaattcttggttggaatttcttttctttaagaatgctgcatataggcctccaatctcttctggcttgtgggtttctgctaaaaggtccactgttagctggatggggttgcctttgcaggtgacctgccccttatctctagctgcctttaatattttttcctttgcattgaccttggagaatctaatgagtatgtatgtgtcttggggatggtcatcttgtatatagtgtctcacaggggttctctgaatttcctgaaattgaatgtcaacctctctagtgaggttagggacattttgtggaaatgttgtggacaatatgttcaaatatgttttccaagttgtttgctctctttccctctctttcaaggacaccaatgagtcatagccttggtctgttcacataatcccatatttcttggaggttttattgttttttgttcttttttatttatttttgcctaagttgattagaagaaccagtcttcatggttcatgcctgtaatcccagcactttgggaggcagaggcgggcagatcacaaggtcaggagatcgagaacatcctggctaacacggtgaaaccccgtctgtactaaaaaaaaatacaaaaaattagctgggtgttgtggtgggtgcctgtagtcccagctacaagggaggctgaggcagaagaatggcgtgaactgtggaggtggagattgcagtgagcggagatgcgccactgcactccagcctgggtaacaaagcgagactctgtcaaaaaaaaaaaaaaaaaaaaaaaagattgttttccttagcttggtctattctgttgttaatacttatgattgtattatgacattcttacagtgtgtttttcagctctagcagatcagtttctttcttaaaatagctattgcatctttcaattcttgtgttattttattggattccttagatttcttgggttgggtttcaactttttcctgaatctagatgatcttcattactatccagattatgaattctatctctgtcatttcagccatggcagtctggttaagaaccattgctgggaagccagtgtaatcatttggagataagaagacactctggctttctgagttgctagagttcttgtgctggttctttctcatctatgcaggctgatgttcctttaacctttaaagttggtaaactttggatggagctttttgcttttatattttctgaagaccttgaagttttgactgcggtataagttgagttcagtcagccggcttcatttctgaatgatttcagatggccaacgctcagctcagcaactgtgggctgcatgctaaccctggggggctggtagcaggcccacagctttgttctctgtccacttgaggttaagcacctgctatgcaggacgggctgaagtgctctggtctgctgacaacactctgatggggggtgccagcaaaagcacatcatcagggtggtggcagcagagtatgcatgcactgccagcagcatcagcatgatggggtatacatgtgctcacaagggtggggagatagcatcctttcatgagtgctcacaaaggtggctgcaatgaggcagtgtccacacatgccagagggagcggggcagcagcaggaggtccacacacacatgccagtgacaactgagcagtgaagtctgtgcatgtgcacactgccaaaggggtgagggaaggttgtaggtgggtgtgcaccagcaaggcccatctgctgaagctccctgattgttaggtggggtctgccggtgaagtagctatggcagctgccaccaggaagcaccctagttgggcatccaaggctgtgctgcaaatgggcacggccaggcaggcatgctgggagagactgggaggcaagggagtgcacagatcatactagccccatcccatgggcaaaaccgtgccactctgtccaggtatgacaggaaacaaaggccaaagccacctaggggagtgtagtgagccttggggatgaatgcccctggccgtgctccactgcctctattcctatgccaaccccccttggctctgcacaggctggaatactgtccctgccacctctccaagtagctctcctatcagctcaagtttctgtgggggtcataagagtctcctgaagctaggagtctggaggtccatggcaagagtcggccactgcttacctatttaacttatctcttyccccaggaactgcagagggccaggagcaagccttggtgtttcactgccctgggcaaggtttccagcttcctcccgcttcagcccagggtctgcgtcttccttccttccttccactctcttaatgtcttcccttcaaatatctgctcagagtgtgctggtagtccctctatgggagatgctcttcctggctgcatctagtcaactatcttaggtcttctccaagattcttcaatgaatcattatttataatattaaaatactagaaagagtcaaatgtccatcaagaggggactggactgattaaataatgtatccttacacaatggaatactctgaagatgtgaaaaaggcataagccatatctctataaatctattaattacgtaggatatattatggagtaaaaacaaagtaatgaaaaacttgtacactatgctaccattatctgaaaacagagtatgygtttgtgtctagatatatttttaaaaaatcaatggaatgctaaattacaaagttttttttttttttttttttgagacagagccttgctctgtcaccaagctggagtgcagtggcgcgatctcggctcactgcaacttccgcctcccaagttcaggcaattctcctgcctcagcctcctgagtagctgggactacaggcacgtgccaccatgcccagctaatttttgtatttttagtagagacagggtttcaccatgttggccaggatggtcttgatctcttgacctcgtgatccaccccactcagcctcccaaagtgctgggattacagctgtgagccaccgcacctggccagtgaatgctttaaatgttttatacatacataaatattatatattagttatatgaataggtacaagtaattttcgaacacagtaatcttttctgaacatccttaatgacaaatagtctaaagacaaataaaacctgaaaaaacacattaactattctctgtaattcttattgttgatggtagtggtgatattgtcattctgagaccattgagtgtgtcatataggataaagcaaatatatttgtgtcattaacaaataggaatttcaacatgagaaaaagtagctacaaacataaggttaattaagtaaaattaaagttctgtcttcctgaatattaattgaaaatactggtgtgaacctatgatgaattttaccctaaaacacaaattatttcaagggttccttaactctgtcctcagcaaaggcctagaactaatgagtagtactagaactactactaacctagtagtaatgagtactttagtgcccatgttgtggtctctaaagatgattttccactatatggaaagtggggttcctggagaaaggactgattccaaagctagagcaagaaatttacaaaataaacttgaactatcttgttgaatcagaaaagaaggaatgccaagatcatgccaaaggactcactggccaacctgaagagattcccactgccctgaaattagacaattagagyatcaatagaacaataaatacaatcacatcacatgtattaaacctatggtttataataatattcaaacaaacaagcaaactcattggccaactttggaggataatatgcaacaaagtcattattttgaaaacgagtacgtaaagggaaaaaaatcaaattttatcctgctttttctatataaattatactttaaggtaactaaatgactaatgaggataggtttctctgtatagaaatacagaaatattccagctaataaaacagaaaggaatgatagaatttttttgtaaactataatgaattaatggatttaggtaatgattaataagggcttctaaaatcacaaataagaaaactaaccaggcaagatatacctttctatggaagtgcaaaaaatctatcaagtatgcttgacaaaataataataataaacttattattattattccaaatcgactctaaatctaactaccaatttactgaaattacagaaatatataaaatgacaccatagagatgcaatcagcaaaattcagtttctacaacaaataaattgcaagagtgggaaaaaagtaatggagagaagccctatagattaaaaaatatttgagaaacatagtaaccagtggcaatgttgtatgaagcttatttctaatgtgatgcaaaacaaaaacacactgaaaataaattacgagacaactgggaaaatttgaacactgacaatacttgatgatatttaaaaattattgttaatattttaacaatattaatgctaagtgtaataatgaaattgtagttatattaagaattcctagtcaggcgcggtggctcacacctgtaatcccagcactttgggagtctgaggcaggcagacagcttgagctcaggagttcaagaccagcctgggcaacatggtgaaaccctatctctgctgaaaatacaaaaattaaccgggtgtggtggtatatgcctgtaatcccagctacttgggagctgaggcaggagactcgtttgaacccaagaggtggggtttacagtgagccgcaagatggttccactgcactccagcctgggcactgggaaacagagtgagactccgtcaaaaaaaaaagaattcctatctttcaatgatactaacatatttacaaataaaactatgtctttattttgctattaaatgacctagtatgttggaggaaagtaaataaaggcagaaaggaaaaaggtaactggaactggtgatgtatatattggaagtagttacataactctattttggtgtacatttgaaaatttccataataaaaaggacaaataacattgaaatctttactattagcctacaaggacctgtataacctggtccatgcccaccctcctcatctcatcactcttcccttgctcattctgtaccagtgactttgacagcctttctgttctatgaatatgccaagctctttgtctagagaaatatgtaaagaaataataacagaattttccaaaaattttgaaagacatcaaacaaagatacaagaagtgaaaggaggcagtaattatttgccacttttcaattaattctaatatcyttagcttgttaaggcactccattctgtgaagaccttccactccaaacccaacctaaatctgcagttgaccacctgggtggacttcaatggagaataatctcctcaatcccatcctgactgactgggttttgcatcatctgtgtgaccccagagaccagcattagcaagcctcaagttagaagtttttagcaaatgtaggttctgtgatgcctttgagctaaggtgcactagatgataggggagtaatagttgtttcttatttaatttgatgtggaaataagaatggaatgaaatggctatcaatacaatttcagaagtcttctaaaggcactgtcttccttgatggttcttattgcaaggcaactgatctgaagtagactgaagagggaggctggctttagaaacagagactaaaaagtggggacactgggccaggtgcagtggcttatgcctgtaatcccagcactttgggaggccaaggcaggctgatcatgaagtcaggagttcaaaaccagcctggccagcatggtgaaaccccatctctactaaaaatacaaaaaattaggctggcattgtggtacacgcctgtagtcccagctagttgggaggctaaggcaggagaattgcttgaacccagcaggcagtggttgcagtgagccaagattgtgccactgcactccagcctgggtgacagagcatctcaaaaaaaaaaaaaaaaaaaaaaaaaaaagtggggacatctgagttacttaagagtgaagaatcaagagaacttaagtgaagtacaaaagaacaacaaaacaaaacaaaaataagaataggaaacagagaagaaaatgactgcaaactagattctttaatccccaaagattcatttataggaacacaaaacaaattttacttttgtgttcagggccagccataaagatccgtccttaaagagagtgagacgaagggcacattgcaacagaaaggtggatgcatacagagttatataattttgcagccattccacacaccttggcaagggccgatggtttcaaaatccaagaatagctccacatgtgatctctgactgattgggaagaggaatatgcctggcatggcaagagaagagcactcccaaaaatgatgagcaagaaaatcattttctctgctagaaataggtcagagaactttccagtgatgagatctggagattcagaaatcaatggtggtcactattttgctgctttttaaaaggcagagggctgttaataccattcatctcatttattcaaacaaacacattatttgaaaatacattgttttccaagccctgtactagacacagagaatacactactgggcaaaagaggaatggattctgaggacaggtagagtatcccttctttctctatcagtaagtcagttctccagacctatttactgagaggccagacaaaggatttttctaggctcacctttcttagctgcctcttctaacaatccctgtgaagtagagtttaaagttgactgagtccataagagattaatgtacagtaattaaggatgtaaaacaatgttctccaatggccagaattctttactctgcagaatttatgatatatggcaatgaaaataactaaaaccttcaaaaatttagtactcaaaacaggacaaaagagctagatgaaacttgtctgctttaccaccactactatagtcactttaatcccaagataggtaactcaagattggcttcagctgttttgtctaggctgaagggcaatttatattatgaaaaaaaaatgacagtatcaaagaataagttcagttgtctgctttattccataaatataaattaagccattaaaagtaagttagctcctagaaaatgagcagctttttgtctgtgaaaactggtatcaaaattaaagaaacaggaaaaaacagccccacttaacaaaaaaagatacaatatccaagaaccattaaatgctcagattatgagtagatacttttcatccagaattgatgaccaagcatgggtcaggctagtcaaatactcctgaggttcccagaacatatctgggagcagaatatcccaggtaagtgtgaaagcaatgtgccaacaaagactttcgttcctcaaatgccccagcactttaatgttgaattgtgatttttttctactctcagctttggccttgtttttgtgcctgtacctgcttcagacagatcttcacaaatagtgcctttggtcagttaaccataggtggtatgaggtctagattgcgcaaaactaacaagaacttgaagacaactatcttataaaactgaaatcaaagggcttaaaggacattcagtttgttgataaagtagatatcaccttgtagaaactcaaaaggccatatataaggaacatgaataaacatttttatttatttattatttttgttttttgagataaagtctcacttactctgtcacccagkctggagtacagtggctcaactcactacaacctccgcctccccaattcaagcgattctcctgtctcagcctcccaggtagctgggattacaggcacccgccaccacacctggctaattttttttttttttttttgagacggggtttcactctgtcgtccggactggagtgcagtggtatgatctcggctcactgaaacctctgcctcccaggttcaagcaattctcctgcctcaggcctcccaagtagcagggactaaagacgtatgccactatgcccagctaatttttgtatttttagtagagaaggggtttcaccatggtggccaggttgatcttaaacccctgacttcaagtgatttgcccaccttggcctcccaaagtgctgggatttaggtgtgaaccaccgaccatgcctggcctgatttgtttgttttttgtcattgagattgggaggagggataggagttggtgtttaaagatatcacctaatcatttccttgcatacacaggaaacataaaacacaattttccctcatgttggaagttgagtgctctcagggcatagagtgaaggaaagtcctcattttgccctaagcaaatgtttcctgggtatgtggctccaagggaagatgccaatgctaagttctctaagagtactagcaaaatgcttcttgcacatcataactgcttcatagctatctcttcagtactttttccctggtgatccctaaccaaggctcccacaatgggagcatcagagcttgcacattggccttgcagaagctataccaccaccaccaccacacaaaagacttggattaagatcccaaatgcctcccccaataagagccgtttcaaatctccaaactattgtctttattatcatagtttccataaacaaccgtaattaaatgcatactaggtactagtgttttacatttagtaacgctaatcttcagaattttccagtttataaaagagttaactgaggcttagaaggtttaagcaatttacctaaaactacaaagttagcaagtagtggagtcttggttgaactatatgtctcagtcttaaacttatcttcttagtaactcgacgtctaatgagaagataagcaaaacaacaattttaagcttatgaaaatcaataaaaaatcataaattaacagaaaaatacaaattttcagcactgctgctacattttccagttccctttgtctctagctgtgaatgatttcacggaaagaatagagatgaatacgttcggactgaaatagaaaatgttggaagcactcatttaacattgtgcacagtatttctagagaacttccagcaggtggcagtatttaagaacattactggtagtcacaactttggcagctattgctgcaaagagagattgggtgtcaaaagtctttttttttttttttttgagacggagtctcgctctgtggcccaggcgggagtgcagtggcgcaatctcagctcactgcaagctccgcctcccgggttcacgccattctcctgcctcagcctcccgactagctaggactacaggcgcccaccatcacgcccggctaatttttttgtattttttttagtagagacggggtttcaccgtgttagccaggatggtctcgatctcctgacctcgtgatccgcccgcctcgcctcccaaagtgctgggattacaagcgtgagccaccgcgcccggcccaaacaaaagtctttaaacttcggcccaaacttgaatttccagttattttattcattgtccttggaaagtttcaagagctaaaacattacctttttcttataattgtttaatttgaggttcactttaacttgcagatatggaacagtggtttcaataaattacagtaaatttagttaatcttactttggaaattgtgtaaggtctttgatgttgttccaaatatcagttccttccctggaattttgtggcctaagcctcagagcagtattcaaatggctgttattttgtattgtttcttaaatatctagaaaatatgtgaaatacagggtcaggctctgttgacaatgcacaggaatcgttcaaaaggcttacattatatgcttggcctagaaacaaacagaacagtttgccacattttcctaacagttaaaacctcttgcaaactattccacattcagcatttctctctgctctgcaacactcatccctcagtcctgtttagcaaaccatataccttctgtgatcatcactgttgttcccacttccatccattacactcattctcccatttaaaaaaatttcttgctttactctttttcaatccatgtacacaccttgcttcaaaatactttttacgaaacattccctaggcatcattccttgactgcttctgtgttcttcttttgcaactgtgtattttcttggaatgtataaaatcaattttcccataatgtacatgttgtatatgtttatcttgcaattttcagttgaacatgtgtcataagtataggtaagcaagaaggaagattttaccaaagaagagaaagttgtcagttcattaagacaaagtccattatgttttcttttctgtatggtatctctcagaattaaactcatccattgtattattttcttcctgtcagtttcattgccagagtcataataaacttgaaatgctctgacataattaactagctggggaaaggaagaacataactgtcagttaatttaggaaatgactatgcttatcattgctcagataatgtgtttgtgtctcacacacattctcatttccctttccttgtaggtacatcgtgacaggcagaaaaaatcaatcttctgttagaaatagttctgtaacttatttttcaaacaaactaaaaggactttaaaaaaacagcattgaaagaaactaagtgtggtttaggaagaaaggaaatacatttctaacccaatttatgcagtatagttttcccccaagattacctacttactttcaaatacatgctaacaggctgtgtttatacagcccacacatagatgaggaaagcttacacagtaaactccccagcttctgggaggactttgtggctcagtaaaaatgacagaaggattccatggaatgatatagctctatatcctaaacacctttaatccaagggtttatatgaatttgtacaatagctactaggtataaaaatagtgtagtctatgcgtcctggaataatcaaccaatatgaagccaccagaaatgtattcagctggtaaatgtattacccttcagatgggtaaagtgtttctcatgcattggcagtggaatgctcaatgtttgggaatggctggaataaataagaggtttttttaatccttccagagttatctgtattttaaaagtttataactaatgaagtgtccatgtcttgagtttgtgtgcacacgcacatgtgtgtgtgtgagagagagaaagaaagcaagaaagagagagagggaaagagaaagaaagaaagagagagagagagatcctttttgggaaaccactgatgaggctatctggactctcaccctgggaaaatgtccacatgcatatacgcacaattttatataaaattcagaggttttatgggtttactcaaaggttagaaagacttacatcaattgacatgactttaggcagtgcaaaagttaaactaaaactcttcaggaaataaaaatattaggcacataagacattccctggtttaaacacataacacacamacccaccacacacacacagccagagttcttgaattcagttaggaagatgacgcatctaaagtcatcattagctacctcacacaagctctgacaactccaaattgctcctctccctagtttacagttcggcattccagatctcagtgtttttgctcctgctcacctcctctctctcctaattcagctccaccttaagagcacagaccctgtctttcagaaagcctcacctggctgcctaaaccctttctgttcacagcaaggccagatgccccagatatcgcctgcacaataacacatcatttcatgttgaaaccggaaaagttcccttgtcccccatgcagggcatgagatgggggtgtggctcactttttcaggtgctcttttattttagccatctgtaggcagcctgcgttagctcaattagactccctgccttatctcaaggacagaaggctttctgtaccctggggtttcttgccttggtgtacccgaagaattggatctcacgtgggcttggagaatgaatgcaaggttttattgagtggaagtagctctcagcagatgggggagccagaagggagacagagtaggaagatggttttcctgttggagtcaggtcactcagcagccgggctctcctctgaccaccccgtccaaaccccacgttgttccacctgtcgatggcctgctggtgcctgtcgatgtgctctcgacgtccagctgcttgtgtgttcctccgccagtgtgctcctcttgacgtccagctgcttgtgtctctgcctggtagggtctcagggggttttataggcacaggatggggacgtggccggccagggtggtcttgggaaatgcaacatttgggcaggaaaacataaatgcctgtcctcacctaggtctgtgggcgcaggcctggggatggaaccctagccgggaacggaaccctagccggggaccatagccctcctctacctagcacttccctgctggccttccgtatcaatagggcctctaaactgtgagcgatttgagtacaggaactctgagttatttaattctgtgtcctcagatcttaactcagtgcctggcactgagaaatgtttttgaatgaataacagtgcacatatgcgtgtgatacatgcactcagtatttaaattcaggtggcttaaagttcacaacccttgactttgtgttcaagagaacttgaaacaataccacagcctttgaacaagcttgtttaaaaggagcaagtactcatgaataaattatcttctgtctcactttcagcaaagtatactttgaaaggaaatgggccagttcccttataggtgagttctcaagtggtcagtttttggtatgtgaatttttatgataaatatttccctttccttttcattacactattatcgttgtataaagaagtgtacctgtctgtggcataaaatttaaaagatatcaaaagataaacaacacaaagtaacctttcttcctccccagaagcaaccatttgtagtattcattaacctttcacacagagtctaggcatattaaaaaataaatgacatcttttgttacattttaagacatacattcagagaaatatttctcaatatttgacagctgccataaggaagaaatagcatgtagaggtgcttcttcagagacaggctgagtctaaggtgcctgtaaggattccaggcaaatgtatccagaagatagctaaaatagaggtctgagactcaggagaaaaggtcaggtggtagccatcaagggtaacaaactgttgatgccactggaatggtgtaatagctcaagcaccatagactgtgggtgagatgctggcatcacactaaatcctaggaaccaccaatatttaggacagatgcaagaagagctaataaccaaacccaggaagtctaagttagggtcaccctaacggcagatttaatagcagtwgattttcaaaatcaaaggaagagaaaattttacactctactctttaaattacactgatatgcactaaaaaggccagtattgtgaatactgaaaagagaaagtatcagtagttcagtgagatgaaaaaaaaaagtatccatcaaatacctattgacgattactgtgtgctaggaatgtgggaatataatagggaatggtactgtccttttacaggttcgaatttctgtgaaattgtaagtctgcaggcatgccctaagatgatctttcttccacatggctggtggaacattcaaagtggagagatcagtctcaggttgccctgatgtgaatcatccacttacacttaggaagattttgaaagccttgtaaacatgtattttctaacctgttcaaacttgggtctaggaagagaggtcaggaatgcatcaaggtaaacatgcaaaacatatcaaagaataggaggaagagaaggaggagggggagaaggagcattgccaacgggtctgaggcttccatgttctcatatcatcttcattcattggtctgtttaacaaaaaaggaagccattgtaaagatatagaaaaaccgaaacatttttcctactctctactgtccacaacacaatccacatggaacacttctgtgacctctggtctggtctccaaaatgtgtgaggatttctcttaaccagcaatgaagcaattctgacaccaggtatgtgtagattttccccacgccacaagcaaacaagcaactctgcagcagaaaccagctgagtgtcctttaattctattcaattctgagactatttgcctagagatagcatcagatcccacagaatgagggctcagtcccacaagactgccctcccacttccgatgccaaccaaaagccccaggttattttacccgtgcttctgagcaactggctataaatcaggattcccacgctccctcctcaggtttgattaattcgttagagcagctcacagaactcaggtttatttaccagtttgttattaaggatattacaaaggatatggatgaagagatacataaaacaagccatgtgggaaggagagtggagcttctatgtcctccacagtcatgccaccctccaagaacctggaaagtctcagaacccagtccttttttgtttttatggagccttcattacagagtcatgactgatgaaaccattggtgatcaactaaaccttcagcccctgtcccctccctggaggtggcagggtgtggggagaaggctgaaaaattccagccctctaatcctgccttggtcctgaaactacctaggaccaccagccaccaatcaactcattagcaaacaaaaggacacatcactttggagattccatggattttaggggttgtataccaggaaacagggaagaagaccaaatacacacttcacaatatcacaaccattaaattatttcctataatatgtcttgaactctttcacacactgaagatacagagatracagatgagcctctagaagtttgcagtgtacaagtaaattagcagactatacctgctgatattgagaggtgacagcgcactggcagccctcacagccctcactcgctcttggtgcctcctcggccttggcgcgcccaccctggcctcgcttgaggagcccttcagcccaccactgcactgtgggagcccctttctggcctggccaaggctggagccggctccctcaccttgcagggaggtgtkgagcgagaggcgcgagcagaactggggctgcgcagagtgcttgcgggccaacgcgagttccgggtgggcatggattgggctggcctgcactccgagcggctggccggccgtgccggccccgggcagtgagggacttagcacccgggccagcggctgcggagggtgtgctgggtcccccagcagtgccggcccactggcgctgcgctcggtttctccccgggccttagctgcctccccaaggggcaggggcaggggcagggcttaggacctgcagcccgccatgcctgagccgcctcccccacccccacccccacccccacccccaccccccagctctgtgggctcctgtgcagcccgagcctccccgatgagcaccgccccctgctccactgcgcccagtcccatcgaccacccaagggctgaggcgtgcgggcacacggggcgggactggcaggcagttccacctgctgcccaggtgcgggatccactgggtgaagccagctgggctcctcagtctggtggggacttggagaacctttatgtctagctaggggattgtaaatacaccaatcggcactctgtatctagctcaaggtttgtaaacacaccaatcagcaccctgtgtctagctcagggtttgtgaatgcaccaatccacactctctatctagctactctggtggggacttggagaacctttgtgtggacactctgtatctagctaatctagtggggacttggagaactttgggtctagctcaccgattgtaaacgcaccaatcagcaccatgtcaaaacagaccactgggctctctgtaaaatggaccaatcagcaggatgtgggtggggccagataagagaataaaagcaggctgcccaagccagcagtggcaatcygctctggtccccttccacactgtggaagctttgttctttcgctctttgcaataaatcttgctgctgctcggtctttgggtccacattgccttcatgagctgtaacactcactgcgaaggtccgcagcttcactcctgagccatcgagaccacaaacccaccagaaggaagaaactctgaacacatccaaacatcagaaggaacaaactctggacacgccasctttaagaactgtaacactcaccgtgagggtycgcggcttcattcttaaagtcagtcagaccaagaacccaccaattccggacacagtatgagtaggtatagtgtgtcccaccgctcccaggggccccttttacatgcacaagtgcacaggccatggcccagacagatatatgtagaggcaataaaggtcacccttccccgttttggggtaaagaaatgatacagggaattttacactaggaactattagtcctttcttggttgcagttatagggcatatcctgccactttatctaatctgagctctacaacaatccattgctatgtgtagagatgaggaaggttaagaaagatggcaccatctattcactgtgacatagctaatcatgggaaagcctgaatttgactccagacactctaacagagaacatatacttgtgatcatcacccttgctgcttcctatagttgcctatcaccttgaccaaagcatttgggattaaacaatatgattcttatttatggggtggagtgaaggcagtgagggtagagagccaaagataaggtttgagactctttagaaacttagaacagttttccacaaaatgtgtactttggaaacctgtatcagaatcacttggatatttattaaacacacagtctcttgaactccaccccatacccactgattcagaatctttatagggtatttaagaaatattagtttgaactgtgatacaatagtatttaaaattccactactataattacaaaatattgaatgtagtacagtttaaaggaaaattcagaatttctgaaaatgcttctaaatatgcaagaccaygcagtcaggctgcatcttcaccatctaaagcacctattttatatagggaattgagaattattcacaaggcttgattatgtaaaaaggctctggggccaccatagaaacaattctgggcttgccaatgtaaacaactagaaaactgaacaagacgggagaaacaggtttttagacattataaaataggcacaagaatgtgatccttgaaaamtaggaaagaagatgatcactataattgccttgactttcttcctgaagggattttttggaccacattggaggtataagtccaagcagaacactgcagtgtcattgagttgaaaagacagggactagagttcagaaaagctcaggcagctggaatgtgtggggtgcacataagacaggagggcagcaaagaaccattgagaggagctgtaaacgaaatgtttctagaacccaaagggaatccagagatattcaaactcgggtcagccattagtgtacagatcctgttgaagacccagggtttcagtacatcgcccagaagtgtaaaccttggtaatacatataagccagtcatagagcaagaccactctagacctgctctaacagtttaaaaacaagcctccacagcatcaagctgatccacaagtaatttaaatgtctgtcaaacaaacttccacactctttataaaatacagtaaaatctagatacttaactttcagaaaatggatgagaaggatatactttccaactcgtcttcaaaggccagcattagccttgtaacaaaatcatcaagaagttaccagaaaactacagattaattctagagatctaagatgtaaaaattctcagcaaaatattaacaagtgaaatccaacaaaatactaaaatactaccaccacgtggccccacaagtagggtttattccaagaatgcaaggttgtttaatatttgaaaataagtcagtgtaatcaaagataaatactaaatcatcatattaatagatacatataagatgtttgctaaattcagcacctattcttaataaacaaaaataaaaacaaaaacaaaagcacccccactgaatttagtatcatacttaatactgacttaagggctttctccttagattgggaacaagagatagatgtctactctcctaactgctactcaataaaagtgccagtgcaataaaggaacaacaaaaaaattaaaaggcatctaaacaagtctggattgttgaagttacacatggagtcacataagaccaaacaatggcatgcttgaggaatgcactgttgcatctcagtggtctggggattcctaagagcaagtccatacccctataagtgtggggatgaggtgagggctctctgtcaacgaatgagactttatccccacctgcaattactccctaaataatcggggcaggaaatggggattttaggggctcagcttagacagtgtagaagaggaaacaccttcctttctctggagtttgtgaatcagtggcctggctgtgttcaaggctactcctttttggagggaagcagtaccctacaatttgtagttgggtccagagctaagagtgacatctgcaggggagcttgcatctgtggactccggtgtggctatctataggttccagttttaggctttctgtgttataattcccttctgttcttcttaaactatctgataaattttaataaacattatagcctaatgtctgctcccactggagagaatgatctgttatcatgcttgaggtgaaacaggccaaggaaaagcaagtggcacttgggagaagctggtctcaaaatggaagaggggacctgcaggagaatgaagcaatagactgaagccctaccactgatggagacagggagcgataacaaggactgatttgagaaacactgtgcacattacccaggagttcccaaacacagctggaaagcagaaaagtggaaaaatgactaaaatgtctttggtcttatgggatagaggctctaactgttgaaactagacattaaatggaaatgtgacgtaataagctaatgaaggctaaaactcttgggccatgagatataattctggagattccatgcatagataccactaagagacacaaaagggcttgtttttactttgtttttgctttgccaaaggccaaaaggagaggaaagaaaaccataaaagttatggttaaagggagcctataataattctgaaagaaacaatcccacataccataattccaaatgttgaaatcttaaaaaagatcaaaatcttgaaaatataattctggtaaagataatttaaaattatttaaataacatttatttatattttaaaaggatatttgagaaaaaaaagaatatttcatagaycactttacataataaagtaaaatatttttattatgtaaaggtctattgtaattattttattgtgcaaagatctattgtcatagaccactttacacaataagatatgtaaaatatacatatttttgcaagcataaacactcagctatagagtctcacgggtacaacagttatgagcagaaaaaccatattcataaagaaacaggtcaaaaagcaaaatgtataaatgcatgtcaccatggttggtaattgtgtgcacttagttttgtaactacagtcatctgaagtaccgtgaaggacaacataagtcttttgacaagacgaatcaaagattgtgatgggttgccaccgcatttgcagtctcccaaagagccgagaccttgtgaaattttatctttcacaaatgcatatgtacaaaaaggacatcttttcatttatagaggaagcttcaatgtttttatgttgagaaccagggaagcaaaggtacctctcagtctgagagcgtcaggacctgggggaccactgatgtaagttctggagtccaagagccagcaagttaggggttctgatgtccaaggcagaaaaagaaaagtctctactctcaaagataccaatttgccttctctatctattctctccaagtccctagctgattggatggagccgccaacattgagggcagatcttccccacctacaccacacaggctcacacagcaatctcctctcaaaacatacttgcagatactcccccagaaaattctttaccaggtttttttggtattccttaatttggtcaagttgactcccaaaattgagtccacaagttcaccccttgtcaacttggcacccacatgcatctccttaatcacccacacttaatttttttttttgagacagagtctcactctgtcactcagactagagtgcagtggtacgatctcagctcactgcaaactccacctcctgggttcaagcgattctcctgcctcagcctcccgagtagctgggattacaaggcaccagccaccacacccagctgatttttgtatctttagtagagatgaggtttcaccacgttggccaggctggcctcaaactcctgaccttgtgatccacccgcctcagcctcccaaagtgctgggattacaggcatgagccaccacgcccggccactgaattttcaaataagaaaataacaagataatagttccaccaaacatgatgtcgttataatgtgatcgtgattttggggggattttagacttcagggatttggactttagggattttgatttttcgggatttcaacattcaggattatggtattcaagtctttcaggattatgatccaaactcatgagaaaacatcaaatttattagttcagaacaacaataatacaggcacacttggtttctcaagtcacctgcttggtcctccttccaagtgtgcttttcttcctttctttctttccttttcttactgttctaaaggtttctaataaagttccactcctgctctaaaacttgctttggtctctttctttgccttgtgaccctcagtcaaattctttctaaaaccccccacaaaaaaacaaacaatatattttttcatagaaagtagaaaatctccttgtctggtagcaaaactgtgatttctaggttattaccagctgtgtgtgtgtgtgtattgaccatgctctttcactagctcattatcttcagtactgcatagtggttaagagttctggttctgggatcttggaacttgacttttgggtttgaattttagcatcaccacttagtagctttgtggtcttagccaatttatttgacctctcggtgcctaaaatttaccaactgtccaatagggagagttttagcacctagtttaaaaggttctcatgaagattaaacacgttatcatatgctaatttaggcaaagcacctagcacacagtaataaactttagtaacttttaaactcagtaaattttaacaatttttattaaattctaaaccagtaagaaaaatatacatacaatgctatattattcctcacatgatctaagagacccaatatttgaaattaggaaatataatttgccaaaagtaaagctatcattatgaacagtaagttatttacatctgaaaaggattggttagaatcttattgtttactaacaaaatttcaactatatcttttatttttaggttgtgggagacagaaaggaygcatattaatatgttaaagacaattmcccctaggcagaggaatcggggtatggggaaagtaaggacttttgctttcttacaccttcccgtattttttcaattctttataaaagatcatgaattatttggagaataaaattaagataattaaagtgagaggatctgacagtatagtatcacttaattagccagaagttggattgtaccttctgcctctggctttacaaygcttcttttgccccgttacactgtaatccctattcattaaatactattagacatttgtctcaaggtcaacatcatgagtacacttttgactacaccaccaagattaaacagagccattcaaagcacctagtatgacatctagccatagtagatgtcaataaatattagctcccttatgttctactccccagtggcacctattttttatttaacaaatttcattcaagtaatatcagggctgggagtgatggctcatgcctgttatcccagaactttggaagaccaagccaggaaaatggcttgaggccaggagtttgagatcagcttggacaacatagagagacccccatccctaaaacaaaaaacaggaaacaaaaaaatcaactacaacatcagaactctggattttaggggctacttttggttcacctgttttcaaattgttttttgtttgttatcactttttattttcttttttgccataggccaaaatcagagaaaacaaaargagacactaaacttttatatttatatacacaaggcttttatatttaaatacagatgagtgaagtgttccttgtcatatttctgcttaggaagccccaatgagcatttggagagaagggtaaacacagctgcctggaaatggcttttagaaacccattaagctgactratttcaaccactggtgatggatgagggtaggaacaaattccttcgtggtacacgagaacaytgcaagaagttacattttaacctgtctgaaataatgagtaagacataataattaacgtaaatgctcaatccactctcagaatgcctgaggcaaatgttctctccaacgttttctactctaaaagtaaaataaactcctgwgtccactgatattgcctaaaaacctaggtagtgcytgatatatttttaagtatttttaatrtttactttctagttagaaaaacaatctatccacaatgcacaaattgcttaacatgaataaatgtgtatttttwaaaaaatactcatattaatattaaaattgctaaaatttgaataaggtccctagtttagcttacagtagtgtaccagtgttcattttctgatattaacaagctcaatgataaagtaagttgttattatgggaggaagctgagtgatggatacatgggaactcaccaaacagttttggcaacttattctgagtttaaaattaacacaaaataaaacgttttttaaaatcacccttacttttagtattttgatattattaaagcaaactaaatatggcccgagaaagactccatacttctatatttgagtccttgtggatgaactgtaacctagcttagtagtcagacaaaattgaaaacgtaacttcagagtatgcatctgtaactatagctaagtcttggccattccagaggccatacttcaaccattcatacactgatgagtrttaaaactgtgttcaaataaggcaaacaccgagctgtaaccaatccagccattctgtacctcacttccaatttctgtacgtcatttccctttttttttgtctgtaagtcttcttccaccacatggctgcgctggagcctctgtgaatctgctgagatttgggggggctgcccgattcgcaaaacattcattgctcaattcaactcctttaaatttaatttggctgagtttttcttttatcagtattgaaataacaatgacattgtaatttcaaactggtcaaaataatacatcagttaggacctcttttatcgtcagtgaagtttgcttacctaaactagcctagggacgaggctgcattatgttgccttttttttttttttttttttttttttttgagagagagttttgctctgtcacccaggctggagtgctggagtgctggagtgcagtggtgtgatctcggctcactgcaacctccgcctcccaggttcaagcgattctcctgcctcagcctcccgagtagctgggactacaggtgcccaccaccacccaccatgcctggctaatttttatatttttagtagagacagggtttcaccatattggtcaggctggtcttgaactgaccttgtgatctgcccgcctcggcctcccaaactgctgggattacaggcctgagccactgcgcccggcttacgttgctcttgatgcagaaactcgaatgccatcactggcttctcttttgctgtctctcgtcttattccccttgtttggctccagttttagataggtttttcctttgggaagctttgatgtatttaaggagaggaagagatgagaggatagaaaaccccgwggctgttttcagaagtaaagtgaatagttgctaagtagagaaacaaaacaagaagaatgctcactttggtagaggagcagataatggaaagtttaaaaaatgtgaaagtatacacaaccaataatcatagttatacaaatttataacaaaacatcactttttttcctactgcctctataattgcagaagagaaccaaatacccttttcatctgacaaactggacaaataaaatttagtaatatgcaatatgatgacagtatagtaagacatatgcagatggggtttggaatcaaagggtacagcccttccaaaaaactgttctactcttttacccaggaatttcactttcagagacctacccaagcaatgacaaatacagatgactacaatgtacaatgatatctatacaacattatttatcatagtaaaaagcataatgtctcaaaatatgggaacagttaaatacatcatggtgtttctgaatgattgaatatttagtaaccattttttaaaaggaaacaaatctgtataaatctgtatgttaagaatgatccggcggggtgcagtggctcacacctgtaatgccagcactttgggaggctgaggcgggaggatcatctgaggtcaggagtttgaggtcaggagtttgagaccagcctggtcaacatggtgaaaccctgtctctactataaatacaaaaattagctgggcatggtggtgggtrcctgtaatcccagctactcagaaggctaaggcaggagaatcgcttgaacccaggagacggaggttgcagtgagcacagattgcaccacagcactccagcctgggtgagagcgcaagaccctgtctcaggaaaaaaaaaaacaaaaatttaaacacacagagagagagagagagagagagggagagagagagtctgcttactagttgtgtgatcttggtcaggttattgaccttctgtgattcagtttccccatatccttaaaataagaaaaataaaagtacccaccacatagggttgaaatgaggattacgtaagttaatataagtaaagtaagcattacttatacttggttcatgtgagcacattattacatgcagttaatgcattgcatgcctggcacatagtactattttcaataaatgaaagctttacacaaatcatataatacaaattcctggatgtgtattgctttgcaggactctaacaaaactttagtcaagtgaactctagggttttctagcaaaaaaatctcagtaataacactttccacctcacaaattaatgtatatttaaaggactagatactcatgcatattttaaatgagcacagggagagaaaggaatcagcagctggactttcggactacaactcaagaagtcagaaagaatgagtagttgctctgaggatcaggactggggatgagagagaggcggcggactgtttttttttttcctttatttattttttttgatacagagtctcactctgtcacccatgctggaatgcagtggcgtgatctcagctcactgcaacctccacctcctgagttcaagcgattctcctgcctcagcctcctgagtagctaggactacaggcaaatgccaccacacccagctaatttttttttttttttttttttttgagacaaagtcttgctctgttgcccaggctagagtgcagtggcatgatctcggctcacggcaacctctgcctagggagttcaagtgattctcctgcctcagcctcccgagtagctggaattacaggcgcccaccaccgtgcttggctaatttttgtatttttagtagagatgcggtttcaccagcttggccaggctggtctcaaactcctgacgtcgtgatccacctgcctcagcctcccaaagttctgggattacaggcatgaaccgccgcaccccgcccatgcccggctaattttttgtatttttagtaaagacggggtttcaccatgttagccaggatggtctcgatctcctgacctcgtgatccacctgccttggcctcccaaagtgctgtgattacaagctggccgggactgtttgttttattaccagcatttgcattctgattaaccttttattttctaaaacataaactaaacaaataaaaaaaaatctgtgttttgaaatgtgtacagctagaacatagaaaagctactatctccttcaggatctctgatataagaaagtaagtatttgcaactgcagtccttggcaccagaaaggataatagttcatggttccaggaaggggaaatatagatgccatcagacgacttcacacaatgcccagagaatgtagactaggtgcttctgttcccagaagcagcacccagacaatgagaagaacaccatgtggaaagaagtggggcagttctggtttctaatgggctctgctgatctttcagctcctctgcctgaaagctcactttcagacaaaaactatgaacttcaaactgtgtataattcactatacatgcatattttattctctgtataactctagcaaggctgaacccctagcaagtcaaaggcttacctgaggtgcccttcccagatttatcatgtcccccgggtagtgcgtccggaattggtaggttcttggtctgactgacttcaagaatgaagccgccgaccgtcgcggtgagtgttacagttcttaaaagccgtcgcggtgagtattacagttcttaaaggcggcgtgttcggagtttgttccttctggttggttcgtggtcacactagctcaggagagacgctgcggaccttcgcggtgagtgttacagctcttaaggccgcgcgtctggagttgtttgttcattcttcttggtgggttagtggtttcactggcttaaggagtgaagctgcaaacctttcgcggtgaatgttacagctcataaagacagtgtggacccaaagagtgagcagcagcaagatttattgcaaagagggaaagaacaaagcccccacaccgtggaaggggaccacagccacttgctactactggctcgggcagcctgcttttattctcttgtccggccccacccacatcctgctgattggtagagcccagtggtctgttttgtcagggcactgattggtgcatttacaatccctgagctagacacaaatgttctccacatccccacctgagtagctagatacagagtgtggattggtgcattcacaaaccctgagctagacacagggtgctgattggtgtgtttacaaaccttgagctagatacagagtgccgattggtgtatttacaatcccttagctagacataaaggttctcccaagtccccaccagagtcaggagcccagctggcttcactcagtggatcccgccggtaccgggccgcgggtggagctgtttgccagtcctgcgccgtgggcccgcactccccagcccttgggtggtagatgggactgggcgcagtggagcagggggcggcgctcgtccgggaggcttgagccgcacaggagcccagggagcgagggaggcccaggcatggcgggctgcaggtcccgagccctgccccgcagggaggcagctaaggtccggcgagaaatggagcgcagcgccagtgggccggcgctgctgggggacctagtacaccctccgcagccgctggcccgggtgctaagcccctcattgcctggggccgacagggccggccggctgctccgagtgcggggcctgccaagcccactcccacccggaactctagctggcccgcaagcgctgcgcgcagccccggttcccgctcgcgcctctccctccacaccccctggaagctgagtgagccacctctggccttggccagcccagaaaggggctcccacagtgcagcggtgggctgaagggctcctcaagtgcccccaaagggggagcccaggcagaagaggcgccgagagccagggagggctgtgaggactgccagcacgctgtcacctttcagtaggagacagcaagaaagcatctttccataagtagaataaatatagtcaaagtttttccatgacgtttttcagatacccagagaaaacagcttgcaagagcmagagataaaaatgtatgcatattcatagctttgagcctaggtattttttaccgataaactacttctaaacatctgtcattcaagcacattagggacgtactgcttagcacaaactagtctatatccaagtagacaccacaatgagtcaattcacagttattagtatgatttagaatttaactacctgtcttctaaaaagaacagctaacatgtaaacggaaaaaggtactctatgttacaactatctaatgaagggctagacaattagaatcgaattattttgctttttgagacattaaacyctcagttctccttttccccactagtattattttctctccctggaacctttttcttcttcttgttagagatacccaccaaggccagttgctgtccatttacaagcatatattgctattatagtaatacctcacctacctgaagctcagcttcaaggaacttcagctcctcaaactattccgaagaactaggaaataaggaaaatgatgtaaaagaatctatgtatcaatgaatgtctttcaaatcctaactcagggttcatttactcatactgtgcctcaagtttaataggtatctgctgggagatataaatgtatcttgtcagaaatactatgctacttggagatataaaagtgaataaagtaccctcaaagaacttacagtcctaataacattagctaatctggttttgtggctaccgaagaataaagacagcaaaatagaatttacaaagaatcccacagaaaggcacacagatagctgcaagaccaaaattatttttggttctattcttaaatcacagactaatttgaggccagtcactcaaactctaggcattcatttggattagattattttaaagttcctattttgttctccaattctatgaatacagttttaaaacagttcacaatctgacaacaggagactttttttttaaggcatgagaagtcaaaaaacacagcagtatggagtcatttactataggagtgaattactccatcttctgcaacatcataaatattgttgacaacagcccacaggctggaaaagcccagacgggcaacttgtatgttgttatgtttacatcctttatctaatcattttaaaattcattgacttgtttattatctatgatcctccaccagaatatatgttcctcatgagcaggcattttatctgtcttgatcactgaaacagtgcctgtcacagaggaagtcctcaatattttttgaaagaaaaatattctccttttgacaaatattgttttgacaattttggacattaacattcaattttataactacgtttctgggaattatttgtccttatctctaaattaattggtttagccatcattgcctgtatttttatgccataattcccccctttcttggattcctaattttgcttatttttcaatatgttggcatatagtttcccaatgatttttttcaaaatagaatggtatggggcatatattttctggatcattgtatatataaamttgtgttttacacataaaagataacttgccagggtatacaattctcaactatttgagaggggtagtatgctctcctggcatttagagttacatactagagcattcactttgttcaatcagattagaacaccttgtggcgaggaatggaaatgagggtagaggagggaaatagatacctcttttcattttttcctacctcatctccaaagttacacagtaatggggatggcaagaagaggaataagtggaaagatatttagaagtaaagtctaaatatctgacttgcaaagtaagtgaaaaagaaatctagggtaccttctagataacttgctaggctgacttggctattcttgcttcaaacttggatttagggttaatgtaatacttttgagattatcctccaagctcttttcctcaccatcacattttaatttgtaattggactgtatcttcagtcaaagtccccactagctgaatgatttatgctaggagagtttgaggcttatgaattcttctcaacaaacccttctcttagtgattctttactctgaatttttattgtactttaaccaaatttctattgccacttattgtaattgaaataggttgcctacttgtctgtctccaatggactaggaacacctcaaagggcataatcttatatttatgttttttaccaatgcttggcactgagaataaactgaagcaataattatagaattagtggtcatatacaagaaatatgcatttacaaaaaaaaacacttcacatacaggaagtttgtgagatggctatatttgaaagcattttaattataagaaaacagaactgaagccagactcttcagaattcctccaatttatcattcattcatttattcatcaatgctatatttaggtaccaagcactggctgagtgttgaagacagaatgaatgacaacatccagctttggagtcgattagggactaaaaaagaaagtgcatctcacttagtggtcccacatttcccctagagggcaaagcctgaccttgagaccaggtggaattgtaggggaacttcagatggcagggacaaagcctcattggtcttgtcaggcaacgagtaagcaatcattgcgtgtttgttgaaacaggttgaaaaaaatagtcattttcatcaaatgaactttaaaacggagatgatctaaattcagatgtatttttttaagtcctttaaagtttaactgaaatgcaacatagaaatttatttctggccgggcgcggtggctcaggcctgtaatcccagcactttgggaggccgaggcgggcggatcacgaggtcaggagatcgagaccatcctggctaacacggtgaaacccccctctctactaaaaatacaaaaaattagccgggcgaggtggcgggcgcctgtagtcccagctactcgggaggctgaggcaggagaatgtcgtgagcccgggaggcggagcttgcagtgagccgagatcgcgccactgcactccagcctgggcgacagagtgagactccgtctcaaaataaaaaaaagaaggaaagaaatttatttctatttgtactaaatctaatagaacaagagcgttaaagtccagaagagtcggggatgggcaagttttataaataacttggcctccgcattgaagagcctgcgagatgtgagaccagctgagagcggaagcctctggaaggagacctcctcatctggagggtgggggagggagtgtgcayacttgagcccttgtccttgaaggggattgagcgagccgaggggaggggtaggcggtactcggatttccaatcacaatggagaaacctaagaggctgcggtggttgtggggccccgccccctcctccctccttgcagagccggcgccggaggagacgcacgcagctgactttgtcttctccgcacgactgttacagaggtctccagagccttctctctcctggtaggtttcggctcaggaccctgaatcctggcccacagrcaagcctgatgggacgtgcggggtagtacttgtatggggagacgcgggaaggaggaagaagcacatctgtcctccgcggyctttagctctgagcatccggccgcgggccctgactttgccgctcagtttggggcgcagsgggggccgtgccctggcggaggagcagaaggcagagggtagcagctgcggctcagcggagagacttgttgcatttgcagctaaaaccaggccctacttgtccttggtgggttcatggcggccacatcacccccacggcctgctggcgggagtcgggacacgtgcccgagtagctgggggagggggacggaaccaggtggcctatgaaggctggacgatctttacctcgaatatttgaatatattgccacggtaatagagaaatgcccttgcactcgctgggatgaggagaaaggcacctagatgaccagcacgtttggcgctgcacttatttttacccggctctgacggtctttccaggagccatgcgccagttctttsctgcagggcctcttttctggatgcttaggggcttcgtttactttaccagccttgggtgctccgagtaaggaagtcctagacttgtccccacagaccttactcggggagatctctagcttctgcatgccctcgtgatctgctgttctttgctgccggtgccctgaggaaaagatggttgtgcgcaccgcgagcagtacaagctgcagtaagggcctggggaatggggggaggggaggaattcaaaagcaaaacctgratttttaaaagattacggtgagaaagattctgcaaagaagatctttgttcctgaaattaaggcrctcctttatttctaatgatttatatccacagcagtgaggagacataagggaccaagactcagagatttttaccgtttgtcgttcttgttccttacagcctgcactctgahgttggcacaggcctgtatatcatgcagaccattttcttctcatttcttaaaactcyttttaaggaaaaattgaagaaaagcactttctccagaaatatctgaaagaaaatctggttcgagcctttaaattgtacttcctgaagttttctaaattaaaaggtctatcagaacaacgaatctgtatttatatagccactgtttcttcattttcattttccactgcttcctgggccccctgtataccaaaayggtcgtaaacagaccatctaacaacaataaacttaagtgcagaacaactattcatgtgtgtcgtccttcaaaaagagatgcagcattctttcttctgagcctgtttaaaatgcaggccatgtctgaatttatttcattttaaggtcatctatttgtggaggcacttgcacaacattgcatcttctctctttaacgtccactaggaaactgtaaatgtgatctgtaaaggcgaaagaatctccttttaatttatccttacagatgggaggaaatattttttggaaaaaaaactataagataaaatagttgttacacagttgtctccaaattcagatgctttattccaactttgagtcctgctaactcttactttacgtatacagttaatagactagrcttattgcttagtccattgcagattagaattaaaaactagactgggaagctctggtacagtttgagacaggtatggtgacctcagatgcgacataaaaagtaaaaaacaagtgaaaatcatggacattacaatggrctactacaattataagtaataattrtgaagaaaaggcttatttgccatctgtattctctgttcaagaagacagggtggtatatatttagtgtactataaattgccatggaattgatgtttatttcgataagttttgctctttttttcagttatctagaaaacacatctggttatctgatggcacaagtacatttggtgttactgtacagatcgttcattttccaacaggtttcggttttgttttkttttttacattttaggggtctttagtttggatggttagacagaaactgtttcagagactgatagtctcctaatgtgatcccctgaaacgacaatgtattaagtgtctatctactttccaagaagcttcttaggtgccctaaaaggaattcaggttgatatttttgcagactttgaataaaaattattcattgccattatattgtcactatgtattaagtatgcattctatgtccagtacrctgtaacacattttatgtgagacagagtagaagaatcagtccctatcttccaagaatgataaccattagtagtagaaattatgttcataattggccatttattctttttatccaagcttaagtatgagtcaatactagacccaaacttagtttacatagttmcatatacattcttaatagaggaaacaaacaaattagctaatttaaacaaatgttcacaggtttttagccagaaatattaacaacctactaaatactcacatggaatcataggctgaaggaagaaatccaattctaatgggcttcatgaaagtttttaccttaatgaattcttccattaaatgggtctcatggttcttttttttctttttttccttttgagacggaatcgctctgttgccaggctggggtgcagtggtgagatctaagctcactgcaacctccacttcctgggttcaagtgattctccttccttagcctcctgagtagttaggactacaggcttgcaccaccatgcccagctaattttcttttttttagtagagacggggtttcaccatgttggccaggatggtctcaatctcttgacctcgtgatccaccagcctctgcctcccaaagtgttgggattacaggcatgagccaccatgcccagccgggtctcatggttctttaaaatatattctgctttctagaatatcattaggctcattttaagttgtacttcagttcgaaattgcaacastaacattttaaggatgatttctatttggatttcatatgcagatataygtgtaatgttttgattctttccttgcagtgcaaaatggcaactcttaaggaaraactcattgcaccagttgcggaagaagaggcaacagttccaaacaataagatcactgtagtgggtgttggacaagttggtatggcgtgtgctatcagcattctgggaaaggtacatttcaagaacaccatagatgatagagaagttcagcatgtrtacacagtttctttgggcaccttggaattttattatatctttaaaagatttctttttttcctgagcaatttgaagttgtagatgtaatcccacttcactttcaaatatttaagcatgtatctcctaaaagaattatattctccctatgtgaccataaatagttactacacttagagaatttaacactgatgcaatactatcatccagtatacactattaacatttaaaattctccatgttgtcaaaatcatgccgtttatagctattttcacctcagtccaagatcatgtgtctcatatacttacgtctcttcattctttaagctggaactgttactcaacctttctttgtttcttgtgtcattgacatttttctagcatccaggtgagttctgcagaatgtccctcaatttgtctgtctgatgttttcttgtaattcagctcgggttgaattttttgggtgggattggaactaggtgatgtcatgtccttctttgtgcagaccatcaggagacacatgatgttcaacttgtctcattactgctgracttaatcccctggttcaagtggtcacagcaagccttctccactgcaaagatccctttccctcytttaattaataagtaatctgtgccatgcatggctttgtgaggttgtgggaatattctgttatgcccctgaaacttttacctaatggttttattttgaaatgatttcagatttacagaaaatttttaagaatggcaagaaaataaaactttcataaataattcacctacatttaccaattcttaacatgttgttatttatactctctcaccatatatacatatatacatacatatatgtgtatatatatatatgtgtatgttcataggtagatttatagatacagagatctatagaaatacatagatgtccatgacgtatttgtctatatctatctatagatggctggaaccatttgagaataaattgcagatattatgccctttacttacaygtcctttagagcagcagtccccaacctttctggcactagggaaccagttttgtgggagacaatttttccacagatgtgtgaggggatagttttgggatgaaattgttccagttcagatcatcaggcattrgctagattctctagattcagtactggctcgtgacctgggtgttggggacccctgttttagagtacgtttcctaagaataggacatattctgagatcatcagtgcaattatcaacatcaggagatttaacactaataccattctattatcaccttccacttcaatttttcttacatacctccataggctttttgccttacctcatatgtatcctttgtagttcaaaccacagttaagctttctttagttctcgaagacttgaggaaagaagcccttttcttatttatttcactgaatggattccttatttcttctgatggctgccttraatgtagraacaacaacaaaaatgctgccttgccttcaggagaacacactgtccctttgtatcatatgtaaaggctgcctgaataacccctaaccaagccatgtcttttttcaaaatttaaattctaaagcagcaaactgagtctttactaagaaacagttatcaaaaaaataaactaaaaaacgtagtgcacacccatgaacattttatccttttgcatttgcttctagctagtttcaattgactaggtaactgtcatttaggatagcagctccctatccttttgcatttccttctagctagtttcaattgactaggtcactgtcatttaggatagcagctccctatccttttgcatttctttctagctagtttcaattgactaggtaactatcatttaggatagcagctccctatccttttgcatttccttctagctagtttcaatagactaggtaactaccatttaagatggcagctccctagattacagggaattgaagtaaccacaatttcacgctcactgttcgtgccaataaaaacaaaaactatttcagcttacatcattttgaaaaagacattgagtatgtgccatgttcaaagataaaatactttattttaaacaaccttaggagataggaactgttcatatacttgctgttggatgagatgtctgatgcttaaagakcctgtccacagtctcacatgtggcagtggtggagctgtattttgaacccagggctctgaactcttcaccatagtgacttttcaattttctttttattcaatgctactatttaagcatttagaaaaaaataaatgtattaattaaatactagctagagatttttcttaccttctgttaatctcaaaatttgagcctttcaggaaactatatctgagctatcatgattctataagaagtacctctatgatgttgtaatcataaattttaaatcttcttcagtaagtagtttaattgagactgtgcctggagttatataacactttggctcaactcaagggcttgagagaatagcccctgctgctaccacagttggamtcttcagattcagagactatgatttctgtttttcaatctagcgttcttttccctttatcttttgcaaaatggagtacattttcttagaaattatgtggagactatctaatgaatatttttgaaaaaataaatgcaggaaagaatgactgacttgttgaaagatgcttttaccaattaagaatgtctaaatattattttaacggttaaagataaaagtggttccaaattatgttaatacatggtaaagattagaaatcccactagcttaatagagaaaggaatataactgcatgttggtgtttgtatattacttcatttattcctttctgtaacmtgtcagaggatattgtcatctatatcatatggctgaaatcaacaaaaaccaaacacctaagatcacacagatagtaagtgccagatctggcctttttgagctcatagatggtgtacyttgcccccagaagttaaataaaagcatagcattggagaggttgaggagggacatgcattagccagattcgcgaagcccactaaggcccctttgtacagtgtcccaccatatgaagacttgattatttttggcttctacttttgcccactctctgcagcccattgcttatataataaccatagagagcttttgtaaaactagtggctccgctacttaaaactctccagtcattttacagtgcrcatatgctacacacatacataaaatcccatgaggcctcacaaatcctccctgcctgtttctcagagcagagcaatggagcacacaactgcaggggcaccatacacaccaaggcagcagacctgccagtgcaacatgatggtaccatctctgacttcatctcttctatttgctttctgcctcccaaatgccaatctcatttttgcttaaactcttttgctygcatttcccttcacctggaatgttcttctctaggccacagggttgaccccttcttatcattcagatcttactgcaaatgcatgcctttkcaggcaggccttccctgccttccgatataaaataaacttccttcccagtagcttcaacatctccttgtcttatgcccttcagagcacttctaccttcagagattagcctgatttgttgtttgtttaattcctatttccttcctgatatrttccatggcagcagagactttatcgtaactgtatacctgagtaggaggataatgccaggcacttayatgataaataaatgaatastcctgctattacttgtaagcttcactcatgttttgtcaaacttggtcatggcttctgatttttttacatcttctactaccagactttacttttatcccattatccatctcagactctgcattttaactaccaagaggaggatctgaatgtcgaactcatcatgttgtaagggtcatgaagagctttgaggcaagattatcataaatccttagcttctaagtctgtctttggtttgagtgtttatstttgcttcagtcaactgtagccatgttcttgtggacaaacacagtatataacaaagctcttaggaggagcaaggtaggtacaacgacamattgcaaagtagtttttgcagtgcaagactgggcttaaaagtaaaacataatgaaaatttggtatttgtacaagccacctttggtatttcagccagaaacatgctcaaatagtatttaataataatgtagaagtagcatttcagaggggaagaaacacaaactattgaatagatggcacatatccatttagttaattatttgagaaaggttataccttttcctcccgcaaaattttatgcatactaaacacttggagagagagatatatatgtgtgtgtgtgtgtgtgtgtgtgtgtgtgtgtgtgtrtrtatttttttttttctcttgagagagagagtcttactgtcacccaggctggagcacagtggcagaatctttgctcactgcaacctctgcctctcggattcaagtgattctcctgcctcagcctcctgagtagctgggattacaggtgcatgccaccatgcccggctaatttttgtatttttagtagagacagggtttcactatgttggccaggctgttctcaaactcctgacctcaggtgatctgcctgcctcagccccccaaaatgctgggattacacacgtgagccaccacccctggccaacacttggatataaaaatgaaaccatcaaatattaaggcactggtggtagtaatttattacttaggaggaggaagaggcagaatatatggctgtgtctggtccacacaggactttagattaaaagccttttttttaagtctgtcacaggagtagagtaaaaataaataggttttttaaagccattttagtgatacattaagcaagctttcaacagtggtattcttggtatctaagtgaccttgatccataataagaatactgcttttgcagttaatctaaaccttgctgtttcaaacattttaaacatrcttacagcttaagtgaaatatatatatggwaaattcattgtataaaatatgtgaatacagagggagatttatttaagccaaacaatagcaccagtacttagtcacacatcacgcctctccatttgggggatattcagtgctgcggatgcagctaaattcagtgttacaattattattatttaagtgttggatctcttccttccttttcagccraatatgcacttctcaggcaattctctacacccactgaaacagagacaggatctgacatcctgtgacatccttttctacttaagcactaaattgttttgccctgtggatttcagcagcacacatgtgatgttactaaaataagagtgatattcccagtgctcagtaccttaatagaaccattatagctattattaagttatgttgcattaatttaggacttaaaaaatacaaatgagaattttgtgtgttcttgtcagagattgcaaagaacaaaagcagccttaaaggtgtcaaaacgtgtttaaggaaaaatggataaaaattaacgccagtatttgatacacatggaaatgaggaaatgttttgtacgtgatccccaactcacagaatgatcatttcaaaaatctgcaagtaatttggttgctcagagctaaggacacattcagtcatcgggaagcttcagtcttagagaaaccctcacaagcaagcccactgtaactcacttcatgagaccaggcagccacttagattttagcaacagaggacagtgtttattcattgtattccagggaggagacttgctttatctaacaagctgagtaggtcaacttttcttattgactgtctcccagctctttgctgcatctccgtctggtggcccctgctgcctgggctactccaccttattccaccttattcttcaaagtgcttcctgaactccagttacctacctayctggcccctccccccccattaatacccttcacctgtgtagctgatcacactactattcttagaagaggttgacccttgaacaacatgggcyggttcacttacaggcagattttttttttcaaccaaaartatattgaaaatacagtattcaggggatgcgaaacccacatatatggagagtcttttgcatccggtgaatactgtcctttctgtatacttgattatgcccagattttggtacactcagaggtcctagaaccaatcccttgagtatcgtatattgaggaatgactgtattggcatttttaactgggccccagtattgatgtattctacttagctgatatttttgctaacagccataaaaacagtaagagcaaggactctggtgatgtttcaataggagggataaccactttataaacagtttataaattatgacttccataagataatggaatttcatagctgaaaggttgcttagatgcatgtagaccaaccacctttttttttcctttctttcacttttatgtagatattgagaaaatttaaaaaattatgattccaggcccagcactgcctattccagcattttgggaggccggggcgggtggatcaactgaggtcaggatttcgataccagccttggcaacatggcaaaaccccatctytactaaaaatacaaaaattagctgggtgtggtggcatgtacctgtaatcccagctactcaggaggctgaggctggaaaatcacacaggaggtggagattgcagtgggcggaggctgcagtgagccgagattgcaccactacactccagcctcggcaacggagcgagactycrtctcaaaaaaaaatatgactccagatcaagattaaatagtatattcattrctttagattgtattttgaatgggggacagagaatgacaattggaatagaaaacaaaagaaatctgagactgggcaagtctcaggcacagatttggagtgatcacatgaaaaaacctcccaatcctagattcctctgtccataaaactcatcttcctttccccaccaagacatttgagtggatcagagccaccctgaagattccaagcttcaacctgggtttcaaatcctactctaaagtaaactcacactcctggtgatttaagccaaatctaccatctcagaaagcctccaaattggggtgacctcaaggatggacacattgcccaaggttgtttctgggcctgagtgtatttttgttttcaccattccctctccattaatatagacttgtattcactaggcctactcttgaactaagctggtttcctaatgaatctttaagtctacatgttcttaaagtatagtttgtatcatgtgaactgaatcctcattgagtatctaactccatggtaaaattctcaagatgtttagatctttggtgcttagccatgttaaagatctttctttgggttagattgtgagctgasgcatcctagagtggcttagggttctaatgcctgtttttgcgtttacagtctctggctgatgaacttgctcttgtggatgttttggaagataagcttaaaggagaaatgatggatctgcagcatgggagcttatttcttcagacacctaaaattgtggcagataaaggtaatttcacttaatgcccaaagtgatctaatatttttttcatggccccaaaacacatttggaatgcatcttacagcataatagatttatttgtaagtaggaaaggttgaagttttggaacagttatttcaataactgttaataagatatttataatgtagtttagcaaattcagattattgcaaaattgttatataattataaaatgtttccctctttttcctcattttataaaaagctcttayttctctactgtattctactttttatttctcaaatattttatattcacttattaatggacagctacctaaaatgagtttgctagccrtaagtgatcactgatatgtcactaacaggaaataacaaattggatttatcgcattgtttggcttattttaccacgtttcttctataggccaattttctttcatccgtttctagaaactcattgctactgctaaaatgtacacatagcaaattgacattttcccattggaagtgtatgtagaaaatggttatgtattccacactccacactgccacactagttatctttatcctaaaacagatgctttccctaaaatgaaagtttgaatgcattcttttctttaaagatttcttatctttttataaacctttgtctgtattctaaaacctctggcagggcctgcacagctctcaatttagatataacctgcatttcctcrtggctcatcattctcctctcctccctcagtctgttataaaattagtcttcccatcctggtgaatctggtgttggcagtttcttttcatctgggtccagtttatccttaaggttaaactcaagtatcacttacattaaccctctcccacagaccttctacacatttgatatgtaacattttgggctattgtattataatgccttgtttatatgtatctgagaactagcatgttttagaccccaaaagtattggtacaatgaaggggtggcctgcctctccacccttgtgggcatttctcgtcgggtggaacgagagactggagaaaagagacacggagacaaagtatagagaaagaaaaagtgggccgagggaaccggcactcagcatacggaggacccacgccggcaccagtctctgagttcccttagtatttattgatcattatcgggcgtatctcggagagggggatgtggctggacaatagggtaatagtggagagaaggtcagcaggaaaatatgtgaacaaatgtctctgcatcataaacaaggtaaagaaaaaagtgctgtgcttttgatgtgcatatacataaacatctcaatgccttaaagggcagtattgctgccagcatgtcccacctccagccctaaggcagtgttctcctatctcagtagatggaatatacaatcgggttttacactgagacattccattgcccagggacgagcaggagacagatgccttcctcttacctcaactgcaaagaggacttcctcttttactaatcctcctcggcacagaccctttaccagtgtcgggctgggggacagtcaggtctttcccttcccacagtcaggtctttcccttcccacgaggccatatttcagactatcacgtggggagaaaccttggacaatacctggctttcctaggcagaggtccctgcggcctggccttccgtagtgtactgtgtctctgggtacttgagattagggagtggtgatgactcttaacaagcatgtgccttcaagcatttgtttaacaaagcacatcctgcacagcccttaatccatttaaccctgagttgacacagcacatgtttcagggagcgcaggggtgggggtagggttacagattaacagcatctcaaggcagaagaatttttcttagtacagaacaaaatggagtctcttaatgtctacttctttctacacagacacagtaacagtctgatctctctttcttttccccacagtacaaagtaatttcaatgccttgaagaaactaaataatagctattatktataaatttttaacattctgggtactgtgtgaaacattttgcacatattatttcatctgacttcatctttgcaacaaccttatgaaatgtagggactataattactgccattttatgggagaggaaccttacaaagtattaccaatcatcaaaagccgcactgtaacccagtttaattatgtgaatcatccatagctgttgagtcaaatgatcacatcaaatcgcaatatcyrtatatttcgaaaaaggacacacttccttaagaaaaaaatcaaatctccagggaaacttgcagcgctaaaaagcaaataagcttcctaaaaatattgagtattagaaatccaagttttagtttccagacaaaaccaaacacttcactgccttccttcccttcctaaattttaactttttaagataaaagtaacttaaaattggttttkgtttttgtttttttttttttttttttttgatgtctacctattggagtcactgtttacacttcattttattcctgacaattcattgaattcatagccaaaaayatactttcgggtcatctttattttctgaggcagtttgatgtttggattattgcagtgtagctcaagggagaaaaaagaagccacaggaacattaaacttcaagcccttacaatacagaaaacttaattcacrtatatgttctagaagcttatgtatggttaggcttttagagcatgtcatataggttatgttataatgaagagttgcatttaaagtacctgtttttgcttttctttttaaagattattctgtgacygccaattctaagattgtagtggtaactgcaggagtccgtcagcaagaaggggagagtyggctcaatctggtgcagagaaatgttaatgtcttcaaattcattattcctcagatcgtcaagtacagtcctgattgcatcataattgtggtttccaacccaggtattattgtatactttaagtctctgttctgttaagttcagtgttttggtgtttytgttgttattgttttggactaaaatcagtcccagtattcatttacagaagcagtttacatgtcttctttcattggccctaaatagtggtgtttgcaaaacaaatgcctctgtcccaggccagatgttcaaaaaatgtgacaagagttttagctaaagcaatttcatgtttttgcttcatctggcttggttatagattctgaaggcttttaaaacttttttataaagattatcctgggatggagaatgaagcattcgaacatagtttcaatttgtaagaaacattttgacatatttgaccttttattttctggaaaatcccattatacagaattgaaacagatcaactttgaaaagaagcatataagaaagccattaaacaattctgttttaaagatagaaatagactgaattgatggacaaatatatgctaacaccaaatgctctgacttaaaaattgctttccttgctaacttgacatctacaggatgaacattaaaccttctgactagaaagaatgcacttttttagccttaacagctaaaatatgctctatttgatatactgcttttatctatagtttgccaccaaaattactgcatgttggtgagcatagcaggtacattgagaaaatagtaaagaaactggactgattatctctcacacttcccatagagaaacactgtgaataagagctaggggaatccccacagtatcttgagtattgagagttgagagccagcaaggacagaggttatttccatatttttacttyygcaaaccaagattggagtttattaaatggttcagtcttayatataaaacttctcataaatatatatgtgccaggtagatgtagaataggaatgacaagtagctagcacatagtaagttactgcatcctgtgcctcaggcaggcgtcactaaatgattatgcaactttctacatatagcttcacagctggattttccagggagtcacttccatggaatcaaagttggcaaggaaaagttatccagtcccaaatgtccttgaattatcttagccattgtctacagattagtgtgggggtggaggctgcaggattaactttcagctcttcaccttccttgtgtgcacattttttactttttacagcttagcctgcaagtgctgtgatcctrtctggatcagcaaaagttttatstctgtggttttaaggctatgccacgctggagcaaaggttctgacatagatgttcttttattaaatagaaatttttaatactacgtattatcacagttgtttactgaagaatacctcatgcccagaaaaatttgtggtagcaagatttggtagtttagtaatcaaaggcttcttggtttatgatgacaatcattataattatggaatgttacaactgggggaaacttaactgacaacctggttcaacctgttttgtttttttcaactttaagttaattaatctgcaaggttcttaaatattcttgtttcacataataatgcaaatgtaaaagcacartattgcatttttcatgtcttgcaatcttcatataaggcttaaaagtttgtttttgtcactgtcattcctggtatctctaacaatgaaaagttaaagtatttactttaatctttctggccacatctcatttggggagtggggaagtgggaaaagggaagccagggcaccccaagctgcctaacagttgaagttggttttggtttacttacatatattatttccaaaatttttagtggacattcttacgtakgttacctggaaactaagtggattacccaaacaccgcgtgattggaagtggatgtaatctggattctgctagakttcvctaccttwtggctgaaaaacttggcattcatcccagcagctgccatggatggattttgggggaacatggcgactcaagtggtaaagaaaaaaaaaagaaawaattacttgtgatgttggttttgccattttgaatttttcattttatttcaaattttatttttatagactttgatgtacttaagaacagttgcaaaaatagtagttacttttctattctattccattttgctttatcatttactctctcatctctctatctacctatcatctatctttaccttgatcaattaagcataaatcaattccctcacctttttctccttaagttctttactgtgtatttcctcaaaacaaagattttctttttcataaccacagtacacttcccaaaatcaggaaatgtaaccctgaaacaatattatctaatccagagtccattattcacaagttatcaactgtctcaatagtgtcctctaaagcttttttcctaattcagaatccattctaggctcacacattacatctactatatatccttagcctccttcattctggaacagtttctcagtctatctctgtttctcatgatcttgacatttttgaaaagtcaggtgagttattttgtggaatgcccatcattttagacttgtctgattgtttctttatcattaggttgagctatgaacttttggtgcaaataccacagaaatgaccctatagttttctcatggcatcacatccaaaggcatgtaatgtcagtgtggccaacaattggtgacactaactgtgataactcagttaaggttgtattttgccaggttactctgtgtgaagttactgcttttcctttgtaatttatgagtaatttgtgggaagatgttttgatgctgactaggaaaatgtctgactcctcatcaatttttctctgctaaatttagcatctattaatgatttgtggttgaataaattaccatgatagttgtcaaacaygatctactaattccatcatttattctgtattagttgcattccactgtaagacagaaatttttcatcttccctctttatttatttgttgatatcaatgtggcctcggatttttatctcatgcccaaaatattgtgtcactatcatttgtaatgctcaagttgtcccaggcttttcaaactgactcttaygtctttttttttttaacatgtcccatcatttttgagcactgtcttgcacaataaattgcaccagcctcattttgaactttccccttcccagcactagaatcagctgtttccctaatgagccctgtttccttttagtgaggaatggtagttagaaaccaggatcagggcataggtgtgcttgtgctactggtatatctttgcttctaggccctttgagtagacagagctattacatccattgtatttgctgaaggaggaatgagttaggtaacaaaagcttataaataacttgtatctactcttctataatgtaaaataaaccttacctcaaatgaaatcttatttttaataaactattaattataactatcaattatttaagtagtaagagactgtatgataaaactaaatagtttctttaggaacttaaattgaagtaaagaattgtacataaattagtaattcaaaaagagcaacattaaaatcacattacacttttttagtgcttcgtgttcagacaatttaaaactatattataaatgttttattttaaattaatatttttctcatttaaattaattattctttgaacaattttatgtaaaactgtttttgaacaattttgattctgtttcatagatstaaatctgtttattaaaccacaatatattgaataagctcatggcaaaaaaataataataaaataatccaatattgaaactaataatttaaaatattttattaataataatgatgataaataatatttttattttactaaattcatttctgccacctgtgtaaaggactattttctcccaataagctcagagtataaatcttcctttgaattcagtgggagtttgaaatgcaattttagtaaagggtttatcttggtgctataagaatttgttcttgaagttgtagcataatttatttctgattttttatataagaatgctgacttttttctgacacatatcactttattcaagaattgtttacctccagggactcrtctgaatttttgtctggttaattgtaatggtcctatgtgtctctcttgatcagattaatttgagcatggaaagtttttagcaagtcaactccataactttaagcttggctctcccttcttaacaagataatgtgactagcaagttcttaacttctctgaacctgtttcctcatctataaaataaagataattatgccacctatgtactatgtaaaaagtacttagtacaatgtcaggtgtacagtaaaagttcagtaaatgctaggtgtagttatacattgctaggtgatagaagtgatattacatgtcctctagttcaggactttaattttagtgagaaaaagtgatattacatrtcctctagttcaggactttaattttagtgagaaaaaaaataaggcaaagtaggtgaagtagctattgaagaacttttagttagttaatgccatagctaccactagaattatgtcttctgattcccgtccaatgttctattayattatggctgttatttttcccagaacatctttttaaaatttttcatgttgatctatattgtgtacgtaaaatgaaagagaattaaaccatgctcactagacatgattatgcagatttcataattttcatcaaaattgtaaaaatatcyaattaccctaacttgccagaagttgtrgactaataggggatcttatttggctttaaatagcttttyccttcatatctgtttcagtcatagtagattctaccccacacttttgctcctatttccagagtctacaatgtactcctccaaaggtctccaagraacatataacttaggttttaaggtccaattcaaaggcccattttgtgtagttctttctgatactcttctcctttaaattaagtagacccttatttataatttttaccccactttcataattatgctttatttgggtcttattctaggattttttttctttactrtagaataaaggagcatatattagaaaaatatggaggagaaaagttaaacattcctcaaaccaaaagtttagcatagtccccaactagaatccctgtgatttcacacacctagagagaagcaaagaattttattttctctgtaactatgacacagcaattctgctttgcactaaaattcttgaaagttaaaaggtcagacatgttgctatttgaaggcaaacgtcagccttttkggggaactatactggaatctactggagagtcacttattggagcagttccagttggtattcagtaatttgcatcataggtgaaattgcactaaaagaagaaaatatttttwaaaataatgtaagaaataactgcaatgtcttttttttttttttaaacagtggctgtgtggagtggtgtgaatgtggcaggtgtttctctccaggaattgaatccagaaatgggaactgacaatgatagtgaaaattggaaggaagtgcataagatggtggttgaaaggtaagtgaaagggarcttgattttagatgattaatttcaactctacttaaataaaattataaacattttccatggctgtctgctcagataaactcttaatgtagtaattatgcagctgttatcttttgaaactgataagacttttacactggtcaaacttgctatgccagtctccctagggaaagtaaatattttctctagagaaactctattgtagaggtaacaggagcaaaatgtggaattaacaagtgagaagagtcttcaaattgccacctctcaacaaataaggttgatttatttagaaaagtaaacttagaaactattggtttcataattgccccaaataaataaacttgcttgctgattgctaacagtgtttaagttttaataacargactaactgatgtctcaaatatagaatcattttgttcaattttagtaattttttttttcaggaatttgaactatatgtggagaaaaggaaccttaaaaaagttgaaagagtctttataatttcaattaacatatacctttatwttacaagtgagaaaactatggctcacccagatagtgtaactggtccraggtcttctaatgattgggtgtcaattgcattaaatcctaattttccaatactcagctagagttaytcctgctgcttctcaagtrccagggcctttatgggttttaagagctacaatttgtgctgaaaaaactgtcaggcaagatactcttatcccttttattagttagttgattatgttaggtgacagtggcaagtgggacctyacaattgagatatattttgttctttcacttttattgtttcctgattttatgtgtttggaaatatgtttacagatttgttacaatgattggaaaatgtatatttttgccacagtgactttataaatcttaacttatacaataaactaaagttatcaagcatttatatagtgtttactgtgtagtgcttacagttttaagcattttacatatatattaattcatttaacactcaaaaagggaacactaaggcaataaagggtaaataatttgcccaagattatagttagagacagagcagtagtcaaagtcaggtctggtttcaataatgattgagtcttatttcagtgatgtcttttataatttttttaagtgcctatgaagtcatcaagctaaaaggatataccaactgggctattggattaagtgtggctgatcttattgaatccatgttgaaaaatctatccaggattcatcccgtgtcaacaatggtaaaggtaagacaaactaccacaaaatgtaatatgatttctmgcattgtattctacaaaaagattcatttaaagaggctcagaccagataaaatcatagttcaaggttatttctgtctctcaaagttttatgtaaactattctcattttccaacagaagtcttggacagcaagggcagaaaacttagagaatctaagacattcaatagattgttgtcattctttatataattttgcaaattaaatattaactctgaatcttagcacattcttaaagtattgatcatttgaataagtgtaatagagtttcatttaaagttgatgtactaaactctagattgcctttcatatagcacttgataccttagcaaatacagtttaattcaaaagctatggagcaaatgcacaaaacaggtagaaattaatgattttttaaacaaaactaaaattatattaaaatattttgtaagacaactgactcattttccacaagtcagtgtaaatcaagtgtgtcaataattgggtaattactgagtctttgggtacatacataggaatttgtttattctatctacttttgtgtatgtacaaaatttttgaaattaaaagtttaaaaactgacattaaggtatgtttaatataattagttatatagttaaattgaccctgtgaataaattacccacacgaactggtaaagtgttttggaaattgtatttttttttttttttttagcaattcttgggtattccaagcatcttsccttttaatggtctctaactattacccaggacctcataagttggctaccacctgaaatttcttcctaactaaaagtctttaagcaacttaaaatttcatagaaagtaatccattaagaaccacaattaaaagcaatttaatttgaagactcatatatcaaaatttattaaagtgtatttaaatagagcagtgttcaataaaatacrtatataataaaattaaataagtacttgttacttacaaatatctaattttctcatagtgtatgtttgcatattctatgtataaaacctaattcaaaacataagtattggggaaatgtggacctgtaagtgatgaaaattagattagggaatgagttcaggcctatcaagttttctacaattctttctgttggaacatcggacctttgattattctcttttttcccccctttagagattagttcttgctctgtcacccaggctggagagtagtaccgctgtcatagctcactgaagcttcaaactcctgggctcaaacagtcctcccacctcagcctcctgtctttgatcatttttacttacagtttcatgtcttaatctcgatgctttgttgttctggcaggggatgtatggcattgagaatgaagtcttcctgagccttccatrtatcctcaatgcccggggattaaccagcgttatcaaccagaagctaaaggatgatgaggttgctcagctcaagaaaagtgcagataycctgygggacatccagaaggacctaaaagacctgtgactagtgagctytaggctgtagaaatttaaaaactacaatgtgattaactcgagcctttagttttcatccatgtacatggatcacagtttgytttgatcttcttcaatatgtgaatttgggctcacagaatcaaagcctatgcttggtttaatgcttgcaatctgagctcttgaacaaataaaattaactattgtagtgtgcttctgtttctgggattccttccttaatgattcctgaaagatttcagtcagtctgccaagtcattcttaccacacgtcataaatgtccctaaattccaacatcatctacactcctccctctggatgagacaaaaattcttttttgcaacaggtgccacggtttgttgttgttgtcctgagaatatgattatctttttaaggttataactgaagaagttgtaacggatgtcaatgtatatgacatttacaaaggaagcccgttttaaaaggaagaacccctaaaatggaaactttgttagaattctatttaataatgaaggaaaatgaaagtttggtctggattattcagattgaggctacttggagatagcataacatgtgaatttacagggaaacttaggtagacttcctttaacaaagagttccaaatttacatgtcatatgtaggggtcaatttaggtagtgtttaaaacatgagttttggtgtcatataaacctggacttgagtgctggccttatcrttgattaactgtgatcttagtcaagttaactacttaatcactcctaattctcattttcctcacctataaaacagtgatgataacaacacctcttcaatatgggttgtttaaatgagaaaattatgtaaaactcttagcacatagcttggtcatcatggtagctaacatttaagtagtgcttactgttccaagtgcttcatagatgttaacttagctaaatcatcccaactatcctataaggtagtgtttcttcacctcaacactattgaccttttgggttgaatgtttctatgtagtgggggctgaactgcgcattgtaggctgtttagcagcatctacccaaccaatgccagtcacacaccgctgccgacaaggtgtagccaaacatgtctgcagaccttgccaaatatcccctgggaaggggtgaggagaatcacccttgattgagaaccactgctctaaagtatgtatcctcattttacagatgaggaaactgagacataaagaggcacacaggtaatagccaccaaataacagaatcaggattcaacctaggcaattagctttaaaatcctttctctttgctgggcgcagtggctcatgcctgtaatcccagcactttgggaggcagaggtgggtggatcaagasgtcaagagatcgagaccatcctggccaacatgtgaaaccccatctctactagaattacaaaaatgagctgggcgtgggggcatgcccctgtagtccctgctactcgggaggctaaggagaatctcttgaacccaggagacaaaggttgcagtgagctgagattgcaccattgcactccagcctggcaacagagcgagaccccgtcttgggggaaaaaaaatcctttctcttaagcacagtgtactataatgcagaaaaacttactgtcaaatttttgtatctttttagaataatattgaaattttttaatgctccagcatattatgagggtgctattatttctatattacagaatgggagatggatacagttattaaattccttttttatatcatatttccaaagttactatctagatgtaaggaggagggttaatttaatatatgcttctatttcattgtttcagtttctacgtgaatgttgaatttgcaataagccaatagtttccaaccttgaatttcatggatcagtttagaattatttaaactgtttaaaagggggaatagacgtgtgtaggttaagaagcacaaacacaactttgccaacttttcattttgccaaataagcacatggagaaaaaactaccattttctactatcatacaaaagaaaagacattttaatgccaaaataatgggaagaccacagtctcaaatgtatcagctatcttggaccatggacagaaatgcagaaccttgggatggcagagccaagagctggaagaaggctgggctttcagtttgcatgcagctgcctgtaccagctattgactgcctgcctcctaattgctttttatattaggaggaaataaactgctatcactgttattttaggtatctgtctcagctaaccaattaattctaaatgatatactcccaactatatggcacagtacctgttagataactttttatctaattgagggcatatacttgaacgataaataacaaaataagatgctataaaatcaagaaaaaaaagacttgaatcctcacacattcagttggaacacttgtattttcttaccgtctggggaaacgtgaaaaatggaattaataacattccttaggaatagagcagacgcctagtaacacctggctagtcaatacatggatccagatattccatgggtcaatatccaaaatgcaaaaacgatgtactgaatgagacagacactgatagtttatccatgaaggtactttgatctcatatgattttagaagcagaagtgacttttgtccaagttattttacagaagagaaattgatacccaagtacttttgtggatctattgctgagtattcctgcaaagtggctaaaacaaagaaaggtggaatttagtggtgcaactagctgaaaagcttaggaatggaactgacattaaccaacaccgtattcaaggataaaacaatcgatgtcatcagaagtatgcagtttttctccaactctaacttttttcctctgtacatttatttaattctcaggttctatatagtagcaacttgtctatagcaattccagaattgtatcttctcttgttcagatctaatagaatactgtcctctgctttcctagaaactccagaaaatatctcactgcatcttactggctctgactgaataagatgtacatcattgaacctatgtcaatggcctgagcaatgcattgctctcattgatagatgacttgttttttctggagccaatgcccatgaattgagagtggtggaagggatgaaacccacaagaaagtaaaggcatttccagacattgaaggggaaatagaagtgggtgatttttaaagacagatagatagatagatagacagatagatagatagatgatagatgtcatctctcatggctgagctggaactggaattctcaaatcctgacaccaaatcagtagtcttttccacgacctgttttactccctggcatcagtcttccaacagctatataataaacgcctccagttgtatctgagctctgacacagtgaagtgtttttaggtgtaatgtggacctttcaagggaaaatctctatcttttccattctagtatctggctcaacctgattcctgttattattggagctcccacatagaaatactagtcattgcattagaaaactgagagatgaatataaagcaggaattcttatcccattttggaacaaagaggtctctatgagtaaaattaagcagacaattattagaggaagccataacacattaaattagccagtaaacaaatgcttattgagtatctgtttggtataagtaactcttctagttgttatggtgggaagacagcagacatagtccaggtcttcacagcaacaaaacatattaatgtcactataatttggatattcatctccgcccaaatctaatgctgaaatataatctctaatgttagaggtggggcctgctgggrggtgattggatcacagggtcagatcccttatgaatagcttgggccatccccttggtgataagtgagctttcactctgagttcatatgagatctggcgatttgaaagtgtgtggcacttccccctgccagtctctgtcttgctccttctctggccatgtgacatgcctccttcctcattgccttccaacacgtttataagcttcctgaggcctccccagaagctgactagatgccaacaccatgcttcctgtaaagcctgcagaactgtgagccaattaaacctcttttctttatacattacctttataatgtatataaaggtatttctttacagcaatgcaagaatgacctactacacatgtgtaccaacatggcatttatacgtctagtataggaggcagagtgctatacttgtgttcaaatgttacatttctaatgtcatagctctttttctccaaatccaagtgatcagagtgtcagattctttactttaaaatgtaataagtaaggatataaatgagataatatgtagaaaatgtctttataagttgtcaagccctacacacatacgttatcatcataaaaacaatatggtagtaaaattcaaagtgcctaagttttctgaaaagtcagtctttgtgaactgacagacatttcatggagacaatttagaagacaggatttaagtgaaaatgattataaataacccaaattcatgactagaaaaaaatgtaatatacacatccataccctaaaccaggacaaatctaaatagatcaaggatttacatgcagaaaaaaacctgtataaattctaaaagaaaatatgtacatttttgtcattacctcgatgttatgaggagcttttttctccatatctagagccattaaagaaaggattggttcaatttaaccactgaaaaagagaacttcttacctgaaaacataacacaagcaaagtcaacggatgacaacaacttggagaaaaaacatcaacttatatttcaggctaaggtgagcctccctgttgtataaagaattcttagattcttaaatttatcattattattatttaatctgaagagagtttcactctgtcacccaggctggagtgcagtggctcgattcataacccactgaagcctcaacttcagggctcaagttattctcccactttaccctcccaagttgctgggaccacaggtgtgtgccactatgcccagctaattttacttttgtagagataaggtcttgttatgttgcccaggctgctctcaaactcctgggttcaagccatcctccctcctcagtctcccaaagtgctgggattataggcatgagccactgtgactggccttgatttatttatttatttgagacagagtctcactctgtcacccaggttagagtgccatgaatgtcatgatctcagctcactgcaacctctgtctcccaggttcaagcgattctcctgtctcagcctcccgagtagctgggattacaagctgcaccaacacacccagctaatatctgtatttttagtagacatggggtttcaccatgttggccaggtgggtctcaaactcctggcctcaagtgatctgcccacctcggcctcccaaagtgctgggattataggcatcagccaccgcacctggccccagccttgattttttaaatgtcacagaaaaaaaaaaatcagagagataaatagacattcattgaatatgaagcaaattgttattaaatatataaaagattcttaaatgtgaaaaatccttaactccatttataagaagtgaaaattaaaaggatatactgatataccatttttcaccaaagagaataggaaaaatatatatatgtttgataatgcactccattcattgtggggtaatagaactcatatatttctggaaagagcataaattggtctaaccctcatggatgggaattttgccacatctatcaaaatgaaaaggtacgtgccttttgactcagaaattccatttttgagaattaatcctaccagtagcacaagaacaacttgatgtatgttctactttagtcagaccacattgcttacaacagcaaaagacagtaaacaatggaaatgtctatccacagaagactgttaaaaagtatacttattcatttaatagcatgctactccattgtataaaagaatgagcatgctctccacatatcattacagaaagatgtattggcccatgaaaagagcagcatgcagaaaaatggagggagaaaaattatatactttatattttattgtataaacaacaagaaacgataagacagcaaaaaagtctggggactttt

SEQ ID NO: 95215 - DNA, 31489 bp, Homo sapiens
  misc_feature (1)...(31489): n = A,T,C or G
agcataagggcttagaatgctgcttctagggcttaagactacattcaaatgaaaccccgtctctactaaaaatacaaaaattaaccgagtatgatggcaagtgcctgtaatcctagctacctggaggctgaggcaggagaatcgcttgaacccaggaggcggaggttgcgttgagcagagaccacgccattgcacttcagcctgggcaacaagagagaaactctgtctcaaaaaaaaaaaaaaaaaaatcttcccttgaccacttgccagctgtggggatttgaataggagttaaacatctcgaaatgaggctcggtttttttatctgtaattggggatgaagttaagtggttaagagttgttgagggataaaatgagataatgcatgtaaacactgagcagtctgaatgccatataagttctccataaaggtaaactgaatatgtttaggtatctctagaaaatgacctttctccattaatattatcaaagcagtgagcatttttcattcatcgtatcgcagggtattgttctggaagcattctttttccagggctgctaggcagaactttttctggttttggtggtcttaaatcagtttgagggctcggttctatagcttcatgcccagaaagttcaacttttctattactagccaaagccagtccttccacctagaattagattacatcccctatggtctaatcaaggaaattgcttcagcagttcttccttctcttctctgttatcattaattttccccctctctattggattacttttatcaacacacaaagatagtatcatttcccacctcttaaaaaaaaacaactcttttgacacctatttaatccttcaactactatccctttcctcttttaaccaaaactcttcagttgtctatactcgtgagctccacattctctcttctcattccctcctcttattccctccttaatccattctaatcaggggttttggacagattacatactatgtgccaggcactattctaagggctggacggacattatctcacttaattccctccacaagcctgggagggacacacttcagtacattttgtagatgaagagannnnnnnnnnnnnnnnnnnntcctttttaggttgacaccatgtaagagggagaatatattgtcatgtgctgttgtgtttaggaatgtggacgcactgttgctcttaagaaaagtaagtccactggttttgtggtggccaaaaaaacctgattagagtggattaaggagggaatgagaggagggaatgtgaggagagaatgtggaatcatgattatagacaactaaagagtttttttggtgtaaagaaaaaagagaaaagggatagtagttgagggattaaatgggtgccaaaagaaagagcttacttggtattaggagagaattacgagtcaggatatgcaacttatggtggttcataggcacatccaatattgtggtaagggtaaggttctaaagacaaaagagagaaagaaggccaggcacggtgactctggcctgtaatcccagcactttgggaggccaaggtgggcagatcacgaggtcaagagttcgagaccagcctggccaacatggtgaaacactgtctctactaaaaatacaaaaattagccaggtgcagtggtgggcatctgtaatcccagctactcgagaggctgaggcaggagaactgcttgaacccaggaggcggaggttgcagtgagccgagatcgtgccactgcactccagcctgggtgacagagcaagaccctgtctcaaaaaaaaaaaaaaaaaaaagagagagagagagagaaagaagtacatacaagttgtttcgaaacagaaaacattggttacagagtcttatggcagaaattgacatctgtttattagtggagacaggcaagtgttcttatgcaagcagctagctgtccttgtgtggctagctttgtgtccttgtgtggctgctagctctcattgtatgactcatgtagcaagctgcactttgaaaaaatttcctgtggtatttttttggtggaagcatagtgcatgagtgcccctccctcatggccttctggctctattatcttagggttagacataagcaacttcattttggtattgataactttcacagtgacaatcacagcatttgatataattgatcacttttccctccttccattacttttattcgcatagatttcagggtaccctattggcttctgttttgcattctgtctcagtctcttttgccatgtcttctcatttcgttaacctctaagtgttggagacccccagggcgcagtcttcggacttgttttctcttctgttaacttttcaatcttagctgatctcatctagtttcttctcttttctgtctgccatcacctctctttctcatctagtcctatggctgagaatagtacccaaatgctgatgactcccaagctatattcatatcctagacccctcctataaactctagggtaacatattcaatagcccactgtttatttccctttggatagctaatagatatttcacacatggcatttataaaacagaattcataattttgtctccaaaccttagtccttcttatcctttccatctcggttaatagcaactccctcctactaatggtcaggccaaagatcctggaatcacaccaattttcctgtttctctcatgcatttcacctagtctgtcagaaaatcctattagctatacttttaagatatatccggaaaatttgagcacttttcatcacctcagtgtattttcagtgcccagaaaagtgcctgacacagttgtcatgcaataacgatttgttgaaagaatggcgtgaatcaagttatatcccttctatctgtaacttccttaacaaagctgaacacataaggtctttatgtgctgtaatctggcccacgcgttcctctctattttcatctttcgccactaaccaaccagtatattctgcttcagtcatagtgactcacttcaagtttcctaaatcatcatgtagtctcattcctctgcaccttgcacaatgccattccctcagctgaggtcttttttgtactttaacaatctttcaagagtcatctcagcaaagaaaagttttactctagccgaaatacctccctctgtgcttgcctacctcatgtacactctttcacagcacaaatcacactctactggggtgtgcctgtctccctgtcataatgctaagttcgctgcctttcacctcttggtttggtatttttaacgtgtagcacagagcctggcttttggaatgcagtgaatgtgaacaaatgagtgagtcaaaggactcctctgtatacaaagtttgtttacatacaaaatcataaaacaagagataatataaggatatattctttcacaataaatacgaatgaattattcttcagcagcaacacttcatactgatctttaaaggaaagatgaccgaatatttgctttgagagtagtttattttgttcctcaaaactaatccaaagaaaaagacaggataacccatcctcttcctcttcctggaacaatcattctctctttggactaagtaaaaatattgtaaaagagtaaactctaatttcattttttaaaattcatcaaatttctgtgtgccatatgctgaactagatgcatcaccttccccttctactaccaccacctctctctcttcctttgtctccgtctctcaagattgggagtagctaagtgtcaggtctaatcaaaattgtgctgtaaccatacaaaggatataaaatgctttattatcataagtttgcaactatattttaaaaagcatgcgtgggcagagactgaaaaagtaatatgagaggcagttcaccaatgtttactgagcagtactgtgacccatgcattgttctggatgagaagattacaaagaaggaacagtccctctcctggaagagttcaaagtctcttggtatttatgtaaatcgctataatctcatttgataagtaacagtggtgccacttgctctgttcccagcttagaggacaccaatatgccccaggagtcaaaactactcaggtgtctgtggtccactaggatttatgggcctgtagggaattactgtggagaagggcaactaaatcattaataggaatcaagattgttattggggtgtagtaggggtcctcacatgactaccaaaagctcagtgctggtgtctctgaggcacagcaactgcaaaggccctactcaaagagccagtgtatgggggcaagttgtccccttgcccttcagtgctggaatggctcatagagcctgcccctttcccaagcatggcattgatgtctgctcacagcctcccttatctgtgtctgcatgaagcaccttcttccagcaccagtcccaggaagggctgggccctcagttaattcacagactaagagatgtaaagtatccagtacctctcataggacccaaaacatcaaagacttcttctctcccctcaaaaatggccaagacctgagaagtacaaaatccttttgccctctgggagaaggcaagccgacacactacaatccattctttctgtttgtatcagcctccatctcagaaatgtaaaagactctacttccaaatataggcttgcaaacatgctgaaagacaaaatgcatgctaggtcagagatgcctgctttaaagtctctttttttttttttcctaagagaggtgtgtgtgggtgtatgtctttgagcctcttggctggatcagggtttaaatgctcaggcgtggcggctcatgcctataatcccagcactttgagaggctgaggcgggcagatcacttgaggtcaggagttcaagaccagcctggccaacctggtgaaacccccaactcaactaaaaatacaaaaattatctgggtgtggtggtgcccctctgtaatcccagctactcaggacgcttgagaatgggtggcagagggttgcagtgagccgagattgtgccactgcactccagccttctgggggacacagtgagaatctgtctcaaaaaaaaaaaagagtttaaatgatgcctccagagttctttctctttaatccctacatgtcattgttctgcttcctcagggagaacatcagtcttccagcccatttcagaacagcaaagcccccctgccgccctaccctacccttgccctgaggcttcaggttaacaaggtccttagcacccagtcagcacgagaaagatcctttctttccaagactctctggaaaggactccagtgggctctgcttggtcatatgcctgtccctagaccacaggtgtgttaaggaaaatggggtgcgtagatggaccagcttgggtcacacacagtgcagagaatgtgagggaaaccctcaccggatgagagagggatcaattcctaaaaggaaaagatttttagcagacaacaaaacaaaaccaaaaaaccaagtgtcggccacactagaggtgaccagtaaagctgacttccaaatttctgctgctagggaatgctgatgtcgatcaaagtgcggagagcatatgaaaaatggagtttttaaaacgttgagtttaaggcgcctgtaggatatttgaatgagctggtcagtaatttcttggaaaaaatgacccaggggcattaaaaaaaggtgtatgtttaaaatgtacattttaaaatataaaatggattcgtgtcagggtgcatcaaggtatgcaacaggaaacccaccacaattctaaagtggggaagttcttcagcaattataaatactttttttcttttttaattttagaaatttacagacacttgcaagcaccccaaaagccgcacttcctccaaatatctctggactcccactgcttgacttagttttggggtcacctcatcagagcctacttggcctactggccccagacgaggcggccgcggactacaattcccagcgagcaccgcgaggggcgggggagggggcggggcgagggacggccgcgcgcgccagctgccaggcggggatcgggcggcgccgagctgaggtggtgagggactagctcccggatgtggagaagctggggagaaggcgtgggaggaagatggactcggtggagaagggggccgccacctccgtctccaacccgcgggggcgaccgtcccggggccggccgccgaagctgcagcgcaactctcgcggcggccagggccgaggtgtggagaagcccccgcacctggcagccctaattctggcccggggaggcagcaaaggcatccccctgaagaacattaagcacctggcgggggtcccgctcattggctgggtcctgcgtgcggccctggattcaggggccttccagaggtgcgcatgtgcgagagtgggcggcgcggcctgggcgggggtcgggagagggagtcgggctgctggaggggctggggcctccggggccaccgctcttggaagggggccatctctcatgccagggatgtgcaagatccggggtgcctggggccgggctgagagcccaggaggaagggctccagctccttccttgttccgtagctgccaatggtcataacctgggacagttcctgtctccgcccttgagaatcatccgtaaaaggggagattacacctccccaaccgtcccctcctcccgggttgaccttacggggaaaagtaaaggaggccaccccggtgcaacatctgtgataatatgtgaacttctttggatrggggccatcgaagctcccctgttgctcagcctctgataactgcttggtgctgctcgattagggaggcatcaggttcatgaatggagttgagtgtcggggtgtcagagctgaatttcaagctcagcttggagatcttttcctaacctttgaaaaatactccagctatcttcctgtgagtcagcacaatctagaaaactccctacatttataaatacgtgagactcagtgggaaggtgtacaactgactgttttatgatatattaatacttacaaatcatttaatcatacctttggaacctcgcctgccctatggacagttttaattatgcgtaatttagatacattgccaaattggtcaggagttacaagctgatgttattcataaaagaagggagatcgaattctgtgccaagaatgaatttacacatatagcttcaacctaactacatttgaatgtgttgttattgtggaaattaatttatgttaaccttttgatgtttcgatttttaaagagatgactgtttttgaagtcatctctttttctttttgaacctatatttgcttacccatattaatatatgggtaaatgattttcatttaaccagtcttgttcaaaaacgggagatgccaaaaaagtataaatatactaattttcttaatgtttcaacccaaaagaagtcctggatggaccaaggcaaataggagccaccactcagaagataacactagtgcaataggaagtgtgcgaaggagagatagggaaggacctggggattttgttcaattcagtagctatttactgagccctaatttctgctatacatgtccaagggaataccaagatgattgggacacagtttttgtccttgtgaagctcacaaactttgggatatttttacattcttagaaagggtacaaactaaaaaggactgagagaagtaggtgcatccagactgcagtaatatagtgaaatatcatttttgtgaaatgaactagagatcaaaatcatattcacagtaaatggagaacaaaactgttaataccrtttacaactcttaggttgtatatatcaggaaaccctgttcaaactggcataacaaaagagggaaaggcttattaaggtacagtcagattcaaggacaaaaaaatgattcattcattcagcatacttactgcctacctactatgtaacaggcactgttgtatgtaccgaaccacgtgtagtagcagtagagacagcccttagtctcatagagcttacgttataataaggaaagacatgcagtatacaagaacattaatgtgtgttgtatcacgttatgataaatatttttaagaaaaagtaaagcaggataagaggatggtgcactttgttgccagaatcctcaatttcttagctctggatagaccctttatggtttcaaggtggttgtactgagaactgcagaactctcagggtacctaatgacttgctccaaacctctgctccaagagacttgaccaagccctagcatggcttctagcagcttaaggccatgtccctaggatgatctcaggttcccttaaaatggcttcctgaagaggctcaaagctgccagaatttcctgattgttccaggaaaaacctggtgagaggcccctgaaccctcttttagagcaattagtttagaaagcttgcaattataaaaactttccctgccttttgagatgtaaatctaccacacaaaactgtttcctcaaggacctgggagccccagaaccctgtctcagtgaaatgcgaacattctaggaaataactcttactctccttcctagtccctctgggaagataaagggcaaagttcagtggacaccttgcttcaacttgctcagttgccttgtctcataaggatagaagattgtttctcttccagataagcgctagttaacaaatccatatggcctagtcacacggactaagccctgttagcacccctcagtgcctttcccttagcacaactcagcctttaaagtctccagcctttcgttttctggggctgtgaatgcaattcacattggactcttttccctgttgcagtagtaacagaatacaatctgtccttaacactttagtcaccgattttgtgtgtctttgatagcagtcctcatattcttacaggtttaaatgtaagtcagaaggagtgctctcctcgaagctcgaagtttcattgtgcctcattgggtaccctgctcattcttcaaccagtcactatggcaagaggaacatagtgcttgtattgctacagtatagcttcatcttccactcttgaaaccagcgatggagcccccgctgaaaaacatgacaggttcatcaagaggaaaattggagtacaattaccaaaagtgagggggaatagattctgttggtcagaacccaacaaccaaccattacagcaggcattggggattttgctatgaaatgattggaaaatatgtrtatatattgaccaatgattttcccatttccacattttagcatttgtacaaaacttcttttaaaaaaagactctagtatcaaccttttctgtaccaagtagttttatttaatacttctagactagagtgtaaactcattgaccacagggataatgttttatacttcttcaagccacctatggtatctgtcactatatcaatggtggcgattagaagaaataaaattggctgggctcacacttgtaatcccagcactttaggaggccgaaggcaggcggaggccaggagttgaagaccagcctggccaacatggcgaaaccccatctctaccaaaaatacaaaaattagccagttgtggtggtgcatgcctgtaatcccagctactcaggaggctgaggcaggggaatcacctgaacccgggaggtggaggttgcagtgagccgagactggaccactgcactctagcctgggcaacagagcaagactctgtctcaaaaaaaaaaaaaaattttttttctaaactagcaaaatgaatgtatttctaacttaacagtatcatgtaacaatgtgaatttactctgttcaagttttgtggctatgtgctatttgtcatcctttccaggcatctggagagattaggtcaaaaggtaatagaagggaccagcacttcttcctccatgaagcctttactgatcccctcagtgaaaagtaattgtgcctttgttttcccatacatagctacgtcgtttgtaccttcatttagtgcatgccctatgcagggagataagatcacagactctgaaatcaaactgtggatttgaattccagcatcaccatgtgttaactgtgcaaacttgggtaaatcgcttaacctctctgtgcctcagtctcttcatctacaaaatgtactgaagtgtgtgcctcacaggcttgtggagggaattaagtgagataatgtacgtgcagcccttagaatagtgcctggcacatagtatgtaatctgttattgacattttcctcttgtttagaaggtttttactatcttccatgcttgtaaaatgggaaactctcccattgcttgtaaaacgggaaagttgtaatgatctttaaaattatttctggtgctaacattctttgactttgaagagttagtggaaagatgtctttattctctttttcagtttcagtggccagcagactttttctgtaaagggccagatagtaaatattttaggttttgtaagccagatcgtctttgttgcaatcactcagctctactgttgtgtatgttgtgaaggtggccatgacaatacataaatgaaagagtgtggctgtattccaataaaatgttacagaaacaggctgaggagtgggcagaatttggcctggggagactcctgccatactaggtgaaaagctaagcttcttatgagcaagtaccctcttattcatcatggtatgctttatatactagatcattaaaatgtgttgacttatattcaattgacttactatgaagctgtaagaggactttggagcacccttcctgcctcctaccctctcttttgtttcttcaaaaaatgtttaccttaggagagagctgaagaaaattgcagctgtctgatttgtgtttttcagggctcgaagatacctttgagattattttgttcaaaaccacgatttgacttaattgaggcagatttctctggcctgctcagaatcaaagctaacagtacttttcaaggttgctaactttgcatactaactaggctagttagtagttaagaaaaatgctgagataattttttttcgtttagtacaaagttattgccagagttgattttgtaagagcttaattttcaacagtggttcagtgctgtgtaagtaaacctcagaacaaattgatttgtaagtgttgcctaacatacttgggaaaagtaaacatgttttagttttatgcttagggtatagacttttgattaatgaaaggcctatgctgttattatccctaaaatggcagcttctgatttaaaatagttatcacaggcaccatggttgatattcctgttggtcctgttagatgtggtgtgacttcatttgaggctaaagccattggcattagactttgacattcactctgcttgactggcctgtttgttcacttgctcattttctcttttgcatagccccatcttatgtccctaaaccaaaggaaaattatctactcagtctctttcataggttatgatcatagtattttaagtgtacatatgggatactgttttcatatttttttcacagtgtaattgcttaacataacatacaaattagacatttggacctttgaaggtctggaagcagaacttcagtctaccttctgaagattgagtgtgaggattaaatgagacagagtagatgttactttattaccattcctattttggtattttgaatagctaacatttattaaatgtttattctgtagtaaatggtttatatttaatcctctaaaccatatgaggtacccactattattacttacctccattttactgaaaattgaggcatagggagatatggatttttcccatggtcatatagctagcatgtggtggagccagaattgaacctcttccttcagaaaccatccttttaatcccttactgtttcattcattcaacagatctatattgagcacctgatatgtagcaggcactgtgaaagtactttgtaaaaagtaaagcactgaaaagagcgtagttacttaattgatccctcgcttctcttttcctaatggtttaaagagaattacaccgctatattggcctcagtctccatcagtaggccaagactttctcaagaaaataaactatgctctatatgttattacatccctagtgtccagaatcgtgcctgggacagaataagcacttagtaaatggttcataaattaaggatgaatgaacgaaagaaggaaggaaggaagaaaagcaaacctcctccaaaattctgttttttttcttgctttttaaacattacttaaagaccactgaaycctctggtattgaattttcattgcagtaaaaatcaggataatgaagtaaatggcttcagcaatttatttcaattaatgtaaattagatgccaaattaccatgtcttttgccttccctgtttattttttattgtattctaatttcatcttatcctctcgtcatctctattttaaaaatgcactaggttttcattgctactttactttgttatatacctttgactatgacatttcccaagagaacatttttttcccactatttcagatttcaagatggaggaaaatgggggctcctgcgttcgccctgcatagagtgacataagtagatatcacgggattcttgacccctagccagtggctcatcttgtttgctaggctttctttgattattttttcttactgactttatcccttgatttaaatccctctataaatattaaagggaataaacgaaataaataaatgaaatccagggatgttagaagattttctttagtttttcactttctttccactcatgataattgagcatagacaaacatgcagttcagccgagcgtggtggcttacacctgtaatcctagcattttgggaggctgaggtgggagggtcacttgaggtcaggagtttgagaccatcctggccaacatggcaaaaccccatctttactaaaaattggtcgggcgtggtgacacatgcctgtaatctaatcccagctactcaggagcctaaggcatgagaatcgcttgaacctgggaggtggaggttgcagtgagcagataatgggccactgtactccagcctgggtgacagagcaagactctgtcaaaaaaacaaacaaaacatgcagttcatctttccctcagtagatatcgaaagagtgggataaaaggaaaaatatatatgtgtatatgtatacatatacacacacacatatacacattatatatacacattatatatacacgttatatataattttgtatgtatataaaataatgtgtatatatgtttgtgtgtgtatatatatatatacacaccaaatatatatatatatatacacacacatacaccaaagactataagtcattaagatatctttgcataaatcactattaaaacatggtgggggccgggcacggtggctcacgcctgtaatcctagcactttgggaggccgagacgggcggatcacgaggtcaggagatcgagaccatcttggctaacacggtgaaaccccgtttctactaaaaatacaaaaaattagccgggcgtgttggcgggcgcctgtagtcccagctacttgggaggctgaggcaggagaatggcatgaacctgggaggcggagcttgcagtgagccgagatcgcgccactgcactccaacctgggagacacagcgagactccgtctcaaaacaaaacaaaacaaaacaaaaaaacatggcagggttttgttgttgttttttgtctttttttttgagacagggtctcgctgtgtctctcaggctggagtgcagtggcgcgatctcggctcactgcaacctctgcctcccaggttcaagcgatcctcctgtctcagcctccctagtagctgggattacaggtgtgcatcaccatgcccagctaatttttgtatgtttagtagagtccgggtttcaccgtgttggccaggctggtctccatctcgtgacctcaggtgatccacccgcctcggcttcccaaagtgttgggattacaggtgtgagactccaggcctgaccaaacattgtggctagagtagtatttacatcttctgcatttagcagtgggaatttgtgactgtccaggaaacaaaacttcaatagaaactggtacccctctccaaaacagcattttgcctactcatcattttgtaaaggctaaataggcaactgtgtaacctgcggttaatagagtattaagttaaattcttttgagctaatgaagtcatgttcttcatgtttgttgttatcaatggctataacccagctgattctacatctatatacccattgtttgttgtttaaaaaagaaagagttgtttcatctgattttttttgagcccagacttgggcatttattatcttctaagcttgaaactgtttcacctttagggtttggctaagccaagtccatttttttttttttagcaagcatattaaaatattttatacaatattttggatttggatggagaataagcaagatctttaattttctttagatttgacttctagtgcctttttaaaaacgtttattttaggttcaggggtacatcaggcttgttacagaggtaagttgcatgttgcaggggttcggtgtacagattatttcgtcattcaggtagtaagcatagtacctgataggtagttttttgatcctcaccctcctcccaccctctaccctcaagtaggccccagtgtctgttgttcctttctttatataaagcatatctaggactgcatttttattcattaatatatttatatacaaaatactttataatttcttacattttatactcctttggatctgtaacattattatcattgtgcaaaaaatattctcacattatataagctgtattttatggttacagagctccattttattgttaatgatttcttttgatttggctgttaatttcttttgatatctgaacagtgtatgggtttcgacagaccatgatgaaattgagaatgtggccaaacaatttggtgcacaagttcatcgaagaagttctgaagtttcaaaagacagctctacctcactagatgccatcatagaatttcttaattatcataatggtatgaatttgattaatagtttattcaaacctttatgtacttttctacttcctttattatcttataagacttgttttaacatttgaattccaaaccttaatattacttgcttgcaaggaactttttttytaaatatccttttcatttctcttgtctttttaagaggttgacattgtaggaaatattcaagctacttctccatgtttacatcctactgatcttcaaaaagttgcagaaatgattcgagaagaaggatatgattctgttttctctgttgtgagacgccatcagtttcgatggagtgaaattcagaaaggaggtaatctcttttcagtctttattttagctgattttattgagaatcaatttttttgtatataaatatcctttaggcatgaggagagtaaaaggggagctgtaaaagagagtatttgactcattactttagtaggtaatgacatttacaatcagctgtaaatctgttatcgagccaacacagctagaccaaattaattctttgctttactctttacaaagggacattctaatcctcttatttctgtttgccttttgaggcagatatgctgtttttctagatcaaatacttttatgtttgttctagacatgtttgatgaactccatacaagtcatatagagatagaaagcatccaccaaagtgttctgaaggatttcaagaatgacattttgaagttcttccccaaattcctaactccatatataagaagggttccctagggtttactaggcattttgcctgccatgtccagtgtgctataaatcttatccagagaattattataaacactgtgtttttccattcagtaatgtacattttagttgtttcttagggattccattttctgttgaaattttccatttttttatccattttaaaaaaaggtcatttcctctaatttaacatatttttgatagctatttgaaagtccttgattgcaaatttcaacatctagtcacttacagttctgtaatctgcttctttcttgattgtgagtcacctatttctgcctcttcatttggctcatgtttaattgtatatctggcatagacacttgagtacatattttcctccagagagggtacaccttttcttctatcaggaagataggataaggggctgatcactttgattcaattaggagttgggctgggttgaaactttaatttcatctcacctcttagtataggtgtcttattaggagatacatcttgtatgtgttactgacactcacacccataccctactcttgctaacaagactaagggatctgatgaccacaatactattatgatgtctccctgctttccagcccattcccagcttcccacccagtacactcagccaaagtcttgtaagggggaagcattaggtggggaaaaacgagctatatgtttgtggttcctacagatgacaatctgtaactcaagtccacaaggtcattgaaagcccttctagtttttgcctacctcagcagagtccctctgattatgcaaagcttgatctttcttgtaccttctcctcatactcagcagatatgaccagggagaaagcagccaccgatactaggaaagatttgtccctctcttttcttcaaagtaccacttgaattatctagttggtttattacctgtctctacccctagattgtatactttttgagaatagagagagttctggtcactactctgtagccagtgcccataaagctatgttatctctagctatttaatttgtatttgctaaggttttttcctgggttatttcaaacactggggtggaattgaacaggggatgatttcgttaaacaagtaagtagaggttattcctagaagcctgtataaacacagaaatggcagcaaaaagtgaagaaagattctggagagtaaccagctattacacacacacacaacacacacacacacacacacacacacacacacacagatttgaggaaaactcagtggaaaggcaaaggaatctctacatgacagtaccaaagtcttcattgattacattatgttctattcattaatgttgacattactgagcctttattatcaggtatactcataaacataatttattattatgtttagtatatttttaactaatgctaagaatgtataatatgttacataaacattttcatcaatataaaatcttcaataatttaatggagaaatctttacttttcagcaataattgtataaaaacaagttctcaaccacattagataaataaaacttatttctgtatatgcaaacaatgagaactagattaaagggcccaaatattaatataggtattttatgacaaattcagttcttttaaagctactttaaggttgtcttgatgtcctcccaaagcataatatttgtatgaataccttaattgttccacatttcattataaaatactttagttttctagtagctattggaaagcaaagataaatcatcagaattattacagattttattcctttaaaaaagttcttttttttttttttgagacagagtctcactctgttgcccaggctggatggagtacagtggcgcaatctcggctcactgcaatctcccccccccgggttcaagcgattctcctgcctcagcctcccaagtagctgggattacaggtacccaccaccatgcccggctaaatttgtgtttttagtggagatggcgtttcactatgttggctgggctgctctcgaactcctgacctcaagtgatccgcccgccttggcctccacagtgctgggattacaggcgtgaatcaccacattcagcctaaaaaaagttctttatcaggccgggtgcagtgcctcatgcctgtaattccagcactttgggaggccgaggtgggcggatcacgaggtcaggagttcgagaccagcccggacaacatggtgaaaccccatctccactaaaaatacaaaaattagccaggtgtggtggtgcatgcctgtagtcccagctacttgggaggctgaggcaggagaatcgcttgaacccaggaggcggaggttgcagtgagccaagatcgcaccattgcactccagcctgggtgacagagcgagactctgtctcaaaaaaaaaaaaagaaaagttctttatctagataaagaaatgctctgcattctgagttcatttttattaacttttttagttactaaattaacactttctatattcagggcaacgtggacttactctaactttttgcttttagttcgtgaagtgaccgaacctctgaatttaaatccagctaaacggcctcgtcgacaagactgggatggagaattatatgaaaatggctcattttattttgctaaaagacatttgatagagatgggttacttgcaggtttgtaccttcattttgcataacccttttaagcgcttttgtaggcatastttgagttctagggaagaagtatggtacaatttctttatgataaagaaaagtatcaacctatagaggaaaggtaatagccaacaacatttgctatctgaggcatttatcctgcaggtttaccccaaagtgatctttggaatccattcagtaaatatgcaaggaattctgctacaacgataaaaaaatgaatcaagtactgggtgtctacacatgtcctggtactcatattattccactcaaaactaygtaatccatgtttgtgttatagttatattgtggctgtagggttgaataacttctattgctttaaaaagacaaataatttcatagaggtgaaaagagttacaacctgggtgtcaggaaacccggaatctttttatatatatatatatatatatwtwtttttttttttattatactttaartcaactgcctcttactatgtaagcttgaatatgtatcattttatctgtcctgactctcattttcaaataacagatttaatgtctctctcattttagagcctgcaacatggttgcatcatatatttcttaacttgttaattttagttatcattattatttattatttactgtgtacttcggagtaggtgaaacactttgcatatgttatcttatgtaatctgcatagcgaatgaatgaagtggacatttctacccagttttacagaggaggaaaactgcctcactgaaatatgaagtaattgactcaaggcaaaaacagctaataaatggtactgtcaggatttggattcaggttcttatgttactcaagaaatagcggttttaaagagagagagagaaacctctccattgtgtaataaaaattctaatgggactattattctgagcaaaagagagaaaaacatttttacaaatcttctggtcaatgtgtaggcaaactatagactagctgtttagttaaatttaagtgttcagaaaaattggatttgacacacatagatactaccatttttaagcttttttctaaggaggaccatgattaacccattcctaaagtgtggagaaaaatgtttctcattaaaacaaggtttatgaagagactgacaattctgaaaaaaaaaatgaaattgaaattgtccagtaattgatcttgtcattcaaataattactatcagaagaaagaccctttctcttgctgacccttgcctagaatcaagagactgcccttgcctttgcctgcatgtgacttggatgactattagtcattttcatcagtagctcagagatctaagaaaactctgtacaacagatgctacagttatttttcctcccctgtgttgcctgttagttgcaaattagaacagaagttccaaaaaccttaatactgcttttggatgatgacaggagagacttcttgaaaaaaaggaggatatgattaagggatttccacraaatcccttgtggtcagaaacctggaggatgtaatatttctgcttttttcaatattaaaatagaaattttcttaaatagggaacttgaactgtttagatagaatttgaaaaatgttaaggttatttcttttgtgtgagctttctccttaaaaaaaaaaaaaaaaaaaaaaaaaaagctgggcgtggtggctgaagcatgtcatcccagcactttgagaggccagcttgaggcctcaagaggatagcttgaggccaggtttccaagaccagccttggcaacatagcaagatcttatatctacaaaaaactttttaaaaatttagccggacatggtgctgtatacctgtagtaccagatccttaggaggctgaggtgggaggattgcttgagcctaagatttcaaggttataatgagctatgattgcaccattgcactccagcctgggaggcagagtgaaaccctgactcgaaaaaataaaaaagtaaaaataaatttaaaaatcatttttatgtgactgatttttactgggttattcatttttctcagtactgtagaaatgaattcattgttctgtattataataaagttttgatatatgtgaatgaatattaaaaacagtattcatgacatttatactacctttagggtggaaaaatggcatactaygaaatgcgagctgaacatagtgtggatatagatgtggatattgattggcctattgcagagcaaagagtattaaggtaaaaacaaataaacctttataacctttgtactaaatcttaataattatatttctagatactgatttctgatacttcagacatcttaggatctttgtaattactttgttcatgtgaggaagacatgtaaaatatgtgtttacatggcttcaataaagtgagaaacattatctggctagaccacactacttttacttactgtactatatgttaaaatatatatgtgaagtaaatttggagagtaatgtttgaataattgaatggagggtgacatttcatgtattggtttagccagatgagagggagtgattagtactgcacttgtactcaaaggtctattttggtttcttttagatatggctattttggcaaagagaagcttaaggaaataaaacttttkgtttgcaatattgatggatgtctcaccaatggccacatttatgtatcaggagaccaaaaagaaataatatcttatgatgtaaaagatgctattgggataagtttattaaagaaaagtggtattgaggtatgtgctccctgaatatagcagtattttataatattttgattcagggtcaaagaacatgcaaggaattaagagatttaaatttttagtattaactcttaaaatatctgaaatttggccttcatacgcctagaaaattattatactatttagttttagatgagtagaattaggaatttgttaatcagcaaataatatttcttgtttattcagtaaatataaacataactacttttaaatgggagctatctaatgtttcccaaaggatcttgcagcaagaaagattccctagataataggtgtaccattttagaaaaggacgatatcctgtggatttttaaaatctagcttattcttatgaatgacatttttgattcaaaataacttaacgtttaagtgtatttttttaaatgaaagctagctaagataattataatttaccagaaatcctaaatatgtattgctaagcagcacaagagagaggttatagactttcctctggataaattgaattataggagaatcttagagtagtatcagacaatatatgttgtaatttttacctgtagatagaatcctttctattgtagaaaataaaatactgtgtctcacctttattgggctatgagaaataaaatgagctttgttttaaagcatcatgattttaattcgacagtcagttttcttacttggaccttcagaaagtcaaaagatgactcgtttgtgatttggactgtctacaaggtcaattattatgaaagatttctgttttcttcactttttaatttttcccttcttcctccaatccttttttttttttttttaaggtgaggctaatctcagaaagggcctgttcaaagcagacgctgtcttctttaaaactggattgcaaaatggaagtcagtgtatcagacaagctagcagttgtagatgaatggagaaaagaaatgggcctgtgctggaaagaagtggcatatcttggttggtatctttttattcacccatagtaaaatggaccaggaattaattatttacttatttttaaagaaatgacaaagcacatcctccaaatgggtatgattgtagggaaataggaactcttttaacaaacactgctgatcaaactgttaaactgggacagtctttctggaggttagtttgataataggtatcaaatgtagaatgattattagcacaagctgtgaagtcagactgtaccactgattagccagttgtgataagatgaatgttgtttcctcatctgtaaactggagatatcgagagtacctattaccgtagggctctggaagggattaataaaataatatgagtaaagcacttagcagaatttctagtacatatgaattacactctgaatagtttttgctgctaattgaatgtacatactttttcctccaaattccaattccaggaaagaaatgagacaaatgggccaatagtgaagttaaaagaacccacttaaatgtcctgtgaaaaatagaatatccctaaaaaggattactatgcaaccattacaaacagtgctgtgacctgtatttatttgcatgatcaaatataacaatgtttttcacttggatattaagcaatacacttacttaccaggtacctatgatgatacgcagcatggaactggttgtgggaactgtaggctttctgcttgcagagcttacagtctgatgatgtcaacattttaaaattgataagttattaagatgcataataactataaatcatgtatgaaagcagtatttacaagggtaatatgagcctcaaaataagaagcacaggaaaaactttgggagcatgtgatctagagacttcaggaataacccttaaaccacacatgaagatttaatggacataaatgctgcagaatgtttgttaaagacagatccaatttttattagaagaaaattttagtggaatgtataacaaattccarctatacttattatctttctttgggatgttaagcaagcttctgtataccttagttttctacttagaatataaacacaaaccaaattttataaagccattagaaagaaaaacaaagataatataaaatgcttaacatagtgcctacagatagtaataagtgtatcayttatataggtaaaactctagaattatatgtgtcaaaatgtagtgattatctacaaatagtgataattaggatgattgtgacttttttgcttctattttttaaaaaaatatttctaccacgaatacgtattacttatatgacattaaaaaaaaaacacacacacacacactttaaaaggagaggtaagaaaatggagaagagcatttacatttttatttaaaactcacagcaggccaggcatgatggctcatgcctacaatcccaccactttgggaagcggaggcaggcagatccctggagctcaggagttttagaccagcctgtgaaacatagtgaggccccatgtctacaaaaaaaaaaataataactcactcaccaatgttttatatgggtgacataagtgtataaaaatatatttcttaaaaaaatcaatacttttataagtaaaatttagtaaatagagcttaaaggctggattatgcaaatactaactttttttattttagtgaaaacgattcaaatttcaacacatttaataataaatgagaaaatttcagtagataagcatagaacaaatgtaaaagaaactctcttcaaccaagattgtactattgtatgtggtctaaagtatagtaatagttttactcagaatggtgaattaaagatactgggagcttctgaaatgcatcctattccaaaaaaggggttaacagagagggaggaaaaggatatcgttatgtcagtatgatttagtatctatttttattctttaaaaatggtaatttttcagcaactattaataaatggcataccaatcagaaccattacagattaaaagagatttaagagattatatatatataaacaaaagaccatatgttaaccttatttcattcctgattcaaataagtcagctataaaaggacaattttgagacagctgggggtatctcaacatatactaggttattagaggatattaaggaactattactgattttgtgggtttaatgatattctgtcagataaaaaattatatttatcagagataaatattgaagagtttttggataaaatattatgtctgggaattccttcttctccctttccccaaataaactagggggcagtgcatagaaaacaatattactaagtgattttaaattctgataatttttcaatataaaattggggttctcgcatatgtttgaaattttgcttaatgaaaaatttaaataacttacttagaattcatatataaaatttctaacatttgtaatatgcatggcaggtagcaattatgctccattcttcttctctagctcataagagtttatttttgattgctyagggaaaaccctggacctcaattatactgtaaaatatttttgttccatctaatctttagtattcttatatgcagtgcccctaggtcttactgaagttgccagagttacctgttggttgctgtctgcattatttagctagaatattctttgtctctttaaatgtttgctcagtatttattttacttgataggaaatgaagtgtctgatgaagagtgcttgaagagagtgggcctaagtggcgctcctgctgatgcctgttctactgcccagaaggctgttggatacatttgcaaatgtaatggtggccgtggtgccatccgagaatttgcagagcacatttgcctactaatggaaaaggttaataattcatgccaaaaatagaaattagcgtaatattgagaaaaaaatgatacagccttcttcagccagtttgcttttatttttgattaagkaaattccatgttgtaatgttacagagagtgtgatttggtttgtgatatatatatattgtgctctacytttctctttacgcaagataattatttagagactgattacagtctttctcagatttttagtaaatgcaagtaagaacatcatcaaagttcactttgtattgtaccctgtaaaactgtgtgtttgtgtgctttcaaagatgttgggattttatttatctggggacagtgtgtatggtaagacatgmccttctattaataaaactacatttctcaaacttgatgaaaactgccttgttgctctagaagaaatttaccatgcattttctttctttcctttaaacattaaccaatcttagtgagaaacaagccactcgatgccggggtagagcatctgattgtacttcacatatgtatacgtaacagcatatggtctatgtgggggttggttccaggaccacccacatataccaaaatctgtgcatactcaagtaccacagtcaacactgttgaacccacatatacaaaaagtgggccctccatatactgcatgattcacatgtatttttgatctgcacatggttaaaaaaattcacataaaagtggaccacacaattcaaacccatgttgttcaaggatcagcagtatacacaaatacaaatatccaaataaatttatatattatgaagattatgtatttatttggaggaagcaaattatttgcagttacccctgagagataatggtaattttgcatacaggaatatcttagagatattacgggtttggttccagaccgttgcaataaagcgagtcataggaattttttggatgccaggtacataaaatgttatgtttaaagtaaactgtagtctattaagtgtgcagtagcattatgcccagataaacaatgtatataccttaattttaaaatattgcttaaaaatgctaacaattacctgagcctacagcgagtcaatctttctgctgctgaaggatgttgccttgaacagtggtggttgctgaaggttgaggtggctgtgacagttccttaaaataagacaacaatgaagtttaccacatcaattgactcatgaaagatttctctctagtgtgtgatgctgtttgatagcattttactcacaattgaacatctttcaaaattgaagtcagttctctcaagccactgctttatcagctacatttatgtaattttctaaattattggttgtcacttcgtgttcatagcatctttaccaagagtagattctatctcatgaaaccacattttttgcttatccgtaagaagcaactcctcatccattcaagtttatcatgagattgcagtgattcagttacatcttcaggctccacatctaacttcattctcttactatttataccatatctacagttacttcctccactgaaatcttgagcccctcaaagtcatccatgagggttggaatcaacttccaaactctcattaatgttgatattttgacctccttctatgaatcatgaattctgtttttttgtttgtttgtttgttttgagatggagtctcgctctgtcgcccaggctggagtgcagtgatgcaatcttggctcactgcaagctccacctcctgggttcacgccattctcctgcctcagcctcccaagtagctgggactacaggcgcccaccaccatacccggctcatttttggtattttcagtagagacggggtttcaccatgttagccaggatggtctcgatctcctgacctcgtgatccacccgccttggcctcccagaatcatgaatgttcttaatggcatctagaatagtgaatactttccagaaagttttcgatttacctatttccaacagagcaatcactattgatggcagcaatacccctagaactgtattttttaaataacaagacttgaaagttgaaattatgcattgatccatggcttcagaatggatgttgtattagcaggcatgaaaaacaacatgaatctgctagtacatctccatcagaacacgtgggtgaccaggtgcattgttcataagcagtaacattttgaaggaatctctttttctgagcagtaggtttcaacagttggcttaaaatatccagtaaaccatgttataaacagttgtgctatcacccaggcttttctgtttcatttatactgcacaggcgtggtagatttagcattattcttaagggtcctagggtttttagaatggtattgaggatcagcttcaatgtaaaatcatggctgctttaacgttctaacaaaaggatcagcctgtcctttgaagatttgaagccagacattgacttttttctagctatgaaaatcctagatggcatcttccaacagaaggctgtttggtcaacactgaaaatctgttgttgagtgtagccaccttcgtcaatcatcttagctagatcttctggataacatgctgcagcttgtacaacagcacttgctgcttttcaccttgcatttttatgtaatggagatgcttcattccttaaacctcatgaaccaacatctgctagctacctgcttttctcctgcagcttctccatctctctcagccttcatagaattgaagtgagttagggccttgctctggattaggctttggcttaaggtagtcttgtggcctgtttgatcttctttccagaccacttgaactgtcttcatctcagaaagaaggctgtttgactttcttattatttgtgtgttcacttaagtagcactttgagtttccttctataactttttctttgtatttaaaactttgctgaccatttggcacaagaggcccagctttcggcctattttggcttttgacatgctttcctcactaagcttaattattgctagcttttgatttacagtgagtgatgtgtgactcttcctttcacttgagtacttaggggccattgtaagcttattaattgacctaatttcaatattgttgtgtctcggggaatagggaggcccaagaagaggaagaaagatgagggagcagctggttggtggagcagtcagaacacacacaatatttatggattaagttttctgtctctatgagcatagttcacaacccccaaaacaattacaacagtaacatgaaagatcacggattcacagaccatcataacagatataataataatgaaaaagtttgaactattgtgagaattactaaattgtgacacaaagacatgaagtcagtaaatgctgttggacaaattgtgccaatagacttgcttgatgcaaagttgccacaaaccttcaatttctaataaacagtatctgtgaagtacaataaagcaaagctcaataaaacatggtatgcctgtattatatatggttattgtcacaactttacagctgacataaatcactcttctacctgattagattctaacagtggagcattatctcataaatgtggatatttacctgataaaaatcatttttggtggaacatttacatctatttccaccataaaaataattcatgtaaaactctgacaagaagttgaccttccaggtcaactatacaggaagctgctttcctctgtcaggactgttggatttgcgtactccagagtatgcccctgtagaacagacataagttggagaaaaaaaaaaaaccaccaatttattttaaaaactttaaattaatggtttattttaaattaaaccattaaacaaaaattaatggtttatttattttaaagctattaaaataaattaatggcttattaattttctttacatcttgtcctagttttactctcatccttccggttttcctgctattaagtttattttttcccactcctttgcatttacacatccacaaaggttctaaccccacttcttgttctttcccaggtatcacatctctattcaaggtttcagcgacaatctccatgcagacgaaactcaaatataatcttcaaccccaatactctgttgtgagttctagtcacatctcaaattcttcatattataggccaggctcctggacttcatccctcaagttgctgattttatcattattaaaatcttacagcttttcagtttctcctttttatctctattcagataccaaagcttgagtttgatactactaacccagtgtcctttcaatttattcagtactgtcaccagattacttgttcagatttttgctagttgttaacctttttgaaatcttttagtgactccatgctgatgaccacagaataaaacatacttcaaacgaaacactgtagcctggtcacaacctaatatttccagccgtcgttcctacaagttattgtgggcctcttcaccccagtcatagcttattctcaagtcctacctttatcagcatgaacaattcattcctcaaaaaacttctgctaaaatacctccaaaatcaatttctctgtatgagtataaaccatattggagtccttgtttcgtttcaatgactccaagccaagtacaaggagataattcagttctcactgttacaactacttcctgtgttcctagcagtaggaaatcttactcaagaaaatatcacatgttcagctccaatatgtaaggaacttagaagttgccattcccatccttacatccagaaaaactggacaaactggattttgtcccatccttacatccagaaaaactggattttggtaggtccaaaaatcaatggcttttggacctaccagagaaccaaggactcagggcaaacagccacccatctggagagatatgcacatccagtgagatacaagagcatctgatacttgcttacttttgccacacatccagcagaagctcctggatgccctaagctgataggaacacttaactagtaattttcatgaattgctagaccctgagtatggtctaatgtgagagtgagaaactcctcgtggttgctgtcatgcagggggcaggcgtggaaatactggaaatattggtatttccagaaataccagtgggttctcacagggaggttctgaggattcaagaataatcttccaatggccctggtaggaggaggtaaagaatagtcattgttaaatcctgccagccccttctccctcacaaagaacttgtctccagtagaaaggacttctccccagagggcaatactgaaaactcacctagctaggagaactctgaactctgctcaactccagcccactttcccgtctcacctaagggacaaaaaaatccatagtcagcaggggagaaggcggcaaggaagttgattgagaatgccacagccagggaaaatggggagcaatgggaaaaaaaaactatacccctggaggagaaattgaaacacttgcgaaggtcatctcccaagacacaagcccactaaaagaccaagacacagatgattttagagtgctccctctgttccacaccatacactacaccaataagtctccaatgtaataaaagtggatttcagccaaaaaagctacaagacacagattttctctaaggaaaaaaatacaaaaggaagtcttaaagccaaaaacaaggacactgaaagaatttgcaatctctggtatctatagctataagaaagattaaatcgcattttaactccaagcaagattaatataatttttcacactaaagacttctcttggtacctattaccataggcaatatatctggttttcaacaacaataacaacagaaattgtaagatatatcaaaaacaagaaaaagcagggtctgaagagacaaaacagtcatcaggttcagactcagatatgacacagattctggtactatcaggcaggcaatttaaaatgccatggtaaccaaaacacaggttcggccacttgccacgtgcagagtccaattaaaaaagcaagttctggtataaagaaagtgactttttactccaaaacttgcttaggggaagaagtataggctcttgcctttaagagtactgctttgcttttggagcagaaagcaagtgcttttaaagggggcctggcatgctagcatgaatggcatccagaggagaaggagcaggtgtgtattagtttcagcggcttattgacccctgggcagtttagcaggtgactgctggccccttcatgggaagatctaggtagtaaaagcttttgaaaattctccaggtgagagagagttttgcagcaggcacactttggattgtagatggactgtttttcgaggcagcctcctggtggagagttctgctctcgagcttctgagc

SEQ ID NO: 95216 - DNA, 40196 bp, Homo sapiens
aagggaaagtatcaatggccaagagacgtgggaaaatattttatcagtaatgaaaatgcaattaaaagtatgatgagaagtcaggagaggttttttggcattccgcatgtggtaacagatgcagtcatgagatgggtcacatcattcacagtgaggagtgtcttgaataggtaaaatcatattgtcaaccgaaattctaggaatctaacctaaagagatacaacagacacttgatacttaggaagggtatatcttccagactctaggattttccaaatctgtgttttcacactgtgttccaaggagccctggggttctgcagaggcatcccaaagtcggcttcaaagataggaagaaggtttccccaatgctgcctcaaccagagcaatttgacatttatctaatttgtatgttagattacatgtaagaactttttcttaaagattccactgaaaacatcaaaatgtggacaccactgtactgtatatataatttcttcaataaaatgcaatggagcattacttctcaaaaactaccggagaagtggagaatagtcagagtgttatattcccaaacactagcctcacagcataaacttaaatccctgtttcaggaaatgtgtaaatcactctataattaccttgcaaatagttcaaagctcggatataaaatctgcaaatatccaggccctgttgcagtaaggataaaagatttgtgttctatgatgatcaactgtttcctttagtatatttagtctgtcataacaggaatcaatttccactcagatgtttcagctgaagagactttattgcgggaactatttatagaagttagggttagggttggatgaaaggaaacaagaaacatggaggtacctaggagttagcacagctaggcctgaagaaataaggggagggaatcacgttagtagagcccagtgaaggctggcacagtggagcagggctgccttgcaggaggagccttcaagggacaaagccaccatcagaacccagccagaagcaggaaaagaggtggtgaaacatatcctaaccttttttccttttccatcctccaatctactgatggtgttacccattggtcaaaaccaactggcatgagaccccagctggaatagtttatgaaaaattccaccttctgaggcacagagtctagcagagaagagcagaagatggcactaaaacacaacaagtggagaataaccagcatatttataacagagaaatacaagtccccccttacctgtgggggatacgtttcaagacccctcatggatatctgaaactgcagatagtactgaaccctttatatacaatgttttttcctatacatatctatctatgattaagttattaatataaataaggcacaataagagattaacaacaattactgctaataaaatagaatagccaggcacagtggctcatgcctgtaatcccagctctttggaaaaccgaggcgggaggattacttgaggccaggagttcctgggcaacagagtcagactccatctgcacaaaaaattaaaaaattagctgggcgtagtgatgcacacctgcagtcccagctacttgggaggctgaggcaggaagatcacttgagccaaagagtttgaggctgcagtgagctatgattgcacctttgcactccagcctgggtgacagaatgaagccctgtctctaaaaataaaacagaaaagtaaaataagaacagttatacaaatatattttaataaaagttatacactgtggccataacttttgcagtttgaggtacaacagcaaaactaacgtgaatttctttttccttcacaatttcacaggtagaagattcattcttatcatagatcttagcgacctcagcatatggatttttttctttccttactaattcaaaaacttttgggttttcacttaaaagaagcactttatgacttttctttggcatacccaaattgccaacattactactcttgtgtttaggggccattattaagttaaataagtgttacttggacataagtactgcaataccttgacagtaggtctgacaaccaagccaactacaaagtgactaacagacaggggagcatctacagtgtggacacactgaacaagagggatgacccatggcctggacaggatacagcaggatggtgcacaatgtaaaacttatgaattgttttatttctggaatttttcatttaatattttcagatcttggttgatcataactgaaaccttggaagcaaaaccacagataaggggagactagtgtactgggaactcagatgttcgataatagaggaaaccttaactaaataatgatatcaaccattctgctattaaataaaagtgctcagaagagcattatgtaatcagggagtacagaagagagagcaaccaactccttacagagattgtaataaaagattttcccaaattaacaaatgaggtgctttgttgtcccccaagcaaagtttcgtatattttttaattatataaacaatacatttcattatgggaaacatatacataaaacaaaaagcaaatatctacaattccatcccctgccctagaccactataaatatctgtttatatctttccagatttttttctatgcatttatacacacatgattatgttgttttcgggatcacaccatattattttgtaaactgtattttccacttaataaatcataaatactattttatccaatagataccattctgcaacattttaaaattttaacactttttaaaacttgcctccgtgtatctagttgtaactaatttttattctcggacatttagtttggtttctcttttggccattaccaaatgtactgtgatgagactttacattttgggggtgatacagtttggatgtcccattcaaatttcatgttgagatataatctccagtgttggaggtggagcctggtgggaggtgtttggatcataggggcggatccctcatgaatagcttgggccatctccttggtgataagtgtgctctcactctgagctcacagggatctcattgtttatgtggctcctcccccccaactccttcttgctcccgttctcaccatgtgagacatctgctccccatcaccttccagcatgattggaagcttcctgaggcccccccagaagcagatggcattatgcttcctgtacagcctgcagaaccatgagccagttaaacctcttttcatataaattaaccagcctcaggtatttctttatagtaatgcaagaatggcctaacaagggtggggggagggggggcagttttttttttttttaaacacacacacaaaagaaaagccacagagacatatgtggccttcaaagcccaaagtatttgccatctgaccttttatagaaaatgtttgtattataaatttccaggaatgtaatttttaagtcaaagtgtgtgaacatttttgacgctttcactacattctgtcaaattgctctccagaatcgttgagccaatttacacccttctcagtaatgtatgagtttctttagttgctatacatcctactccaagggtcactggcccaaattactagctctgagtattattttattctcaatttgatggtgcattatcgttttaagtttttacttctcttaaaaatgtttggccatttacatttttctctcatgatgacgaatttgcattttgctcatttttagtaggctattttttctttctaagttctctttaatgttatgtttatctgtcatgtatattgcaaattttttgtaatttttacttgtttttaaattttattctatggggtttttttttggataaaagaagttaaaagttcaacagtcagatctgtcacttttcctttgtaatttcagccgttgtttcatgcttagtttgagattaaaagcaattcacttgtattttctccttgcccttttaagacttaaaaacatttaaatcttttaatcctgttcaaatttagtgtctgggaaacattttagaaggatgaataggtaatattatgttagtcctggagtcagattgctgggttcaaatttagcctcaccaaatactacatatttctgcaaatcacttaaactctttaagtcttagttttcttgtttataaaatggagataacagtaacatttaccatagggttgatgtaagaattaacagttataaatcacagaaagtacttagcacagtgtcattagctattattatagcagcaagagaatactctcccaggcaaaagcaataacatgtataaaggtgcaaatgtatgaaatctgtttgcatattcagggaactagatgtggtgtagtaaaatgaggtgtaatattcaaggggcagagttgacagatgcgaggggtgatgggtcttgaatgagttgctcaggaacttgctcttgatattatcagagattgggagccaatgaaagcttttaagcaagcaagaaaccctgcagatgtgtggtagcaaagtggaaaatggactagattccgccaggtgcagtggctcacgcctggaatcctagcactttgggaggctgagctgggcggatcccctgaggtcaggagttcgagaccagcctggccaacatggtgaaacctcgtctctactaaaaatacaaaattagctgggcatagtggcagtcacttgtaatcccagttactagggaggctgaggtgggagaatcgcttgaacgaaggaggcagaggttgcagtgagccaagatcatgccactgcactccagcctgggcgacagagtgagactctatcttaaaaataaaaaaaaaagaaaagaaaagaaaagaaaaatggactagatttatatcccttgctccaccctgtcttccccaaatttaaattcctgcttcctagaggcaaattctttcaccttctatgtctctggtatttatctccttacttttaagaatcatgtttaaattgtttcttgattttgccatcatagatatgattatgaggctaattaaacagtaatcctaaccgctctgagaatggacctaagaaatgaatgtgagaaagaaagtagaagcagcccacttgctagtgagtgaaagccagggaagggtggggggatgcggggagaaattgtctcaagttggagaacccaggtgcaggctgggagcagtaccatgaattccattcaagaagccaaacgttttaagcaccatttcctggagtttgccaagttgagtattgacccagcctcctgtcttgttggttcctcactgctgaagaagaccaagtgttgacaactcagtgaggcagtctcagctggagtggaaaaatgtagctaagaaaacgtgccagacaaagctttaagcagagcttcccaactggatgccgtgaaacgaatgacagggatgcagatacagcatgggtcttcccagccctccaagtgcaagggcttctgcaggaagccttctgcaggagcagcctcttctgtttacccccattttgacccttgtaatatcatcctttcctacctgtgccaagaagtgaaaaggtgtgtgaagcgccgctttagaaggcccagtacattcacaaacatcagcttctgggcgaggctgcttggcctcttctattcaaaactttgtgttgcccttttaaggtttctattccccccacccccaccccgcccaccaacacccattcctacctaggttcaacccaaaccatccttaaggtacactgagtatcacagcaccaaaggctggagagagataagttccccacccttgatgcgcttcctgtccaggtggcccgaggcccactccttaagaggcaaggcccagagacactgctgtgtcttgaggaacatccagtacacctgacatttccattagaacagtgggacccggataccactggcaggaagtccatcttcacagctgccaacccatctgtcaaacccgcagtcccctatgagagtacagatgaatggaggaggaagatttaaaagtgaattcgtgggcggcgacaaggaaacagcagccgtggccaagctgaccccagagcccttcccttcctggccctccctctgaatcatcgcgctccacttgtgacgtcgcggacgcccggctygggcargcgtggggggcccgcgcgtcccgggagccccgaggcggcagcgcgcgtttccacgccgcggtcccgcgggaaagccgggggcggcggcctggctgaggccaagctcggatccggtgccgagccaagcggggccgtgcgtcgccggggcttcgccttcgctcgcgtgacctccgccgtcctccccaaccctcgtcctctggccgcgcctgcggccgcacgcccarcgcccctcgcctaacctcgcgcccgggccgcgcctcckcctcctcctgctccccgccgcttccgtttctcgagggaaaggctgctgcctcctgctctgtcctcatccccggcttaggtaacacgttttcctccttacgacacccaccacagggtccccgcgccgctgcccctcctccttggatctggggcccgggctggtgagcggcgcgcgccgtcgcctctycgcgggtaggtgagtcgatggcgccgggagggttcctcgcctctgcgcgccggcctgcgaggtccctgccccggcagcgaggccgcccccggccgggccyggccaggcatgcccggcatcgccgctgcagccagcgcggaggggagctcgtgagtcccgcggcgcccttggccctgcccgagcggcccgatggggttggggggcgggaagaaagggtggcaaacaacgatttwaaaaatccagtcattagtatttgtaggacgaagaagctgatctgacagttgtccagagcagtggcccagctgcaacaggtagatggcgcagctgtcagtgaccccttggtctcagccttggctttgagagatgcatctgagtgtccctagctgccagctacctccagtgacctacttgatgagtgtgaaataaatatgatgggactatatttagaaaaatctttacttccttgctgttaattctctctgcattttgaaaggtggttttgtgaggtgtgcataattagttggtgtgtccagagtggtagctggaaaaaaatatttaacctgggtttggccctatcatgtagacggttaggcgcaaagagtgtgaaaggaaacgcttactttagtacatctgtgaaaaacacttataagaaaccacggcttgttttttggagatttctcattttaaaggtatttttaaagtgttgaataagcagaagtttgcccactgtatgatggtgttcacttcaaaagaacagtgggttaaaagtatggacagaccacttaagtggatcccatctgttgagtaaaagattttttagcccttttacactgattcctagctttgaagccagaaaagttgataaggatcagccctgctcaacttgataatagtataaggatgaaagtaatccactgaactaytcttgattggtgaattagctaagtgatctcattcttaccttttaaaatagagaacataagggaaaaaataaaggcaatggaagaattcattttttcaatacagatatttgtttccattcttatgtagagcctactttatttttaagtttttatggatttttatactacttttgaagtcagcttagtcatgaagagaattatgtcaaatacatagagttacactgtactttttgtgtagaataagctaccacttttcaagcttttggactaaaccaccgcttgcttggaaattgcagctttgactaatgccctttaaaatgatataccttattatagatttaaattatagctttccttgttatagtcctgaaaaaaatgaaaagataatttcttgtttgacatagaaggcctgtgagacaaaagttataaaggttattatatatttattttgctttttaattctgtctctaataacagttagaaaatgtctcattctatttcatgttatacagaaattgcttaaaagataattatgttatataaagtgatcaatgaaaacaaacgtcatcttcattttttaaaggtgaggatggtgtatataagcactttttcccgatgtgagtccttatgaatgttcttgttaaaatactttgaatcttgtaatgaagttaataaaactatgttaatgtgtttggctgagagcttagaaataaaggctctggctggcgtggtggctcacgcctgttatccctgcactttgggaggccaaggcaggtggatcacttgaggttaggagttcgagaccagcctggccaacatggtgaaaccccgtctctagtaaaaatacaaaaattagccaggcgtggtagcaagcacctgtagtcccagctattcaggaggctgaggctggaggatccctggaacctaggaatcagaggttgcagtgagcccagatcgcgccactgcactccagcctgggcgacaaagcaagacttcatctcaaaaaataaaaattaagttaaaattaaaaaaataaaagttctgcttcccgtctcctgtgattgatgttgggtactgtttctcaaacttgtctgattgtaaaattcctcagggtagtaggcaagtcggggagtgggtagagtataatagtggtttaaaagattcccagattgcaacttgagacttcctggatcagaatttctaagagaaaggagatatttcaaatagacaaaaatgataaaattttaaaatagtcaacaacaacaaaaaaggtgagtttgggaaatgcaggtgggaaatgactattgttggaatgaatagttgataaaacttattaggactcctgtacataaaatgttcatatatggaaactgattttattaatatgatgaggccactcatttaggaaatctgaaacttttatatttttttctggtcaagcttctgctgatcaaatttagcaaacatatttttgcatgtttagtcttttttatgtggtatgtaatgttaattcaatttcttgaatgtgataagagcattttattaatggatgactaatgcagattactgtaactagtaatccacagcaaaatattgtacctaataatttctctttcttttttttctttttttcttgagaaaaggtcacactctgtcatccaggctggagtacagtggtgtgatcatggcttatgcagtctccacctctcaggctcaaggaatcctcccaccccagcctcccgagtgtctgggactacaggcacgtgccaccatcccagctaatttttaaaattgtagagatggggtcccactatgttgcccaggttggtctcaaactcctgggctcatgacatcctcctgcctcagcctcccaaaatgctgggactacaggtgtragctgctgcacccagcctaatttctttcatattatagatttatttgttacctcttccatgtgcctgattaaataattataggcaagacaggcatgcaaatttgaataccttattagtagcttttttttttttttttttttttgagacagagcctcactctgttgcccaggctagagtgcagtggtgtgatctcggctcacagcaacctctgcctcccaggttcaagcgattctcctgcctcagcctcccgagtagctgggattacaggtgcccgctaccacaccaggctaattttttgtatttttagtagagatggggtttcacagtgttagccaggatggtctcgatctcctgacctcgtgatccacccgccttggcctcccaaagtgctgggattacaggcgtgagccaccacacctggctccttatttgtagctttttaaaaaatgactctcaaccccattcaaaaaagaaaaaaaaatttatttggccctaaaacttggtcagttatatataaaaaaattaaagaaatagaatattaaatacctataaaataatttgacaagatgagttaccataatggaaaatgtcagaatttattttccttttccttcttcctctttacattgcttttctttctccttttttggggggggatggagagtgtgtgttatttgctcatttgtttttatttttaaccaactaaatatttaaaatatagtaaattatccatgtttaaattaatttaaatatttgccaactttaccaatagatatttaaacttgcccttttcctctaaagtgacagtggtaggctttgctcaatgcaaatgagagtaataattcatatcaaaggagttaaattcaagtgaccaaagaaaattgttcttttaacattgcttaaggaaagcataacttaaattgatgccataatttttcattatcagcaactcttaaaatgaggatggaggctgggcatggtggctcacgcctgtaatcccagcactttgggaggccaaggcgggtggattacctgaggtcaggagttcgagaccagcctggccaacatggcgaaacctggtctctactaaaaatacaaaaattagctaggtgtggtagcgcgtgcctgtaatcccagctactaggggggctaaggcaggagaatcgcttgaacctgggaggcggaggttgcagtgagtcaagatcgtgccactgcactgcagcctgggcaacagagcgagactctgtctcaaaaacaaaacaaaacaaaacaaaacaaaacaccggtgtggttgctgtatgaaatcaacttaaatagcctagtgcccttctttaaacctaattttcctatcgctacccccacttgttttttaaaawtataagtcaacaaatatttattatgcccttattatgtagatgataaacatcaaaagcttttgaaatgtgcatttctttgaacctgtaattttttgtttttttttaactttaaaaaaattgtggtaaaagatatctaatatcaaatttaccattttaaccgttttcaaattacagctcagtggcattaagtacattcactttgttatgcaaccatcagcactgttcatgtccagaaytttttcatcatcccacacaaaaactatacccattaaacaatgactctaccctctcttcccagccctagtaaccaccatcctactttctgtctccacgaatttgacattctgagtacctcatacaagtggaatcatagagtatttgtctttttcagtctggcttattcatgtgccataatgtcttcaagtttcatccatgttgtagcatgtgtcagaatttcctttctttttaaggctgaataatatttcccaatctcatttatatgagaagtagatataaaaaacagagaagttttgaactggaacagatcatagaaatcatccaatccaacctctctgcccctgcttttcttttccttttttatgtttacaaaatggggaaaacaagtccttcagagcttacatcatgtggccgagtttatatacctgattggcaaarcagagcctaagaaccagctctcctgtatcccaagcaaggctctttctaccgcacaccctgcaggcccatccaggcccatccagacaataaacagtaagtgttaaaggagttggtgtctccaattagtatggcatgagttctaaaggaaagataaattgactttggaatcttccttaattaatgaaaaatgttacattcaaaatagattgaagattaaggctaggtgtggtggctcacgcctgtaatcccagcactttgggaggccgaggtgggcagatcacctgagatcaggagtttgagaccagccttgycaacatggtgaaacccatctctactaaaaatacaaaaattagccaggtgtggtggcatgcacctgtagtcccagccacttgggaggttgaagcaggagaatcactagagcctgggaggcggaggttgcagtgagctgatactgtaccattgcactctagcctgggtgatggaagcgaaaccctgtctgaaaaataaaaataaattagtaagattctagattctgattagcagtgatcaaaattataaataatattctattggaaaatattcttgcttcaaaccatacatctgacccttttttctgccttgaattttgcatcaaatttgtatttttaaaaaatttattctttctgatagttaagatagttacattgcatctgcttctatttgtatactatctgatttcaggtttcatttgtggcaacagggttctaaaaacatctcttagcatacaaaaacttaagcatatactgtagttggaacacagcagataaaaaaaatatctaaatgaacaaagtttctctttagtgaaaatatttccaactatggaaaagggagtttaaaaaataaggtcactatcaaactttaaagtttttgtcggtttgtttgtttttgagacagagttcaccgtgtcacctaggctggagtgcagtggtgtgatcttggttcactgcaacctctgcctcccaggctcaagtgattctcctgcctcagcctcctgagtagttgggattacaggcatgcgccaccacgcctggctaatttttgtatttttagtagaaacgggattttgccatgttggccaggctggccttgaactcctgacctcaggtgatccacccacctcagcctcccaaagtcctgggattataggcatgagccaccatgcccagacaaattttaaggtatttctaaatggaatactttttcacaattttcagatgagttctgagaagtatccgaaattcatcctttataaaattgttacgttactacagaatacttactatgtagatcaactatttttttccgagcatttaatttactttacaaaaaggcratataagttgactcttagtggaacaaggctccctgttctgttcttaagcaaccagtgagtgtagagctgactgttgcacctgttgtttccttaaattgttggataaaaatcagctgacattcccctttctaaaagtctctatttttaatgtgtcttacttcttgatcttagctgatttggaaaacacagctttagcacaggcttccatatacaagctatcagaacagcatttgagaacaagggacatctttgtagcctattgctttgagcagcttcagtgagcaaaaatgtaggctaatgtggtccattggtacacttgctcacaatagagcaagtgtagactgaccagcttagagtaatgtgtatgtcatcatcatttgagatggaattgaagtttgaaggttagggaggaaagagagagaaatgttagggttaaataaaagattcacatataccatrtttaatatcttttctcacaaaaccaaattaaactcactattttgagtgatttaattaaattaatcttgtcacagataggtcacctctagatgwaaggggataattttagattctgatttggtgctccaaaaatgtggttcagttgctagttattcagatacagccttggtttgttcttgtaaatgaatacagaatatatgtagacttttatacaaatatgggcctgtatgtctaatgctgataaaatccaagtacaataaacagtgtgacaaggatgaattctgtattcacaaagctaagggaaaattcatcagccaacatttattgaacacctctgagttatgcagtacgagtcctaagacagcaaatgcatttaaatctcttgttagagcataaacaagtaaaccaatgcatagagtgttggaaagctgggatagagatttggcccatctccattcccccatggcccaggtgcctaagatggaggaggagtcagaaatgtctcctgaaggagccaacagttgaaatgattctccttttgcacatacatttttaaaaaacaaacctttttagtgaattagaaatatacacataaacattaggaatctcagcagwtagctaataaattgatacaaagtcaacccactcgtgtaaccatcactcatatccagaacattaccagagctgccatcagtaaccccaccttcttctccaaggacaccaccattgtgacttccaacgttgctataggttggttttgcctgtttttgaactttaaattgattaaatggcacagcatatatcttttgtgcctgacctctttcacttgacagcatgtttttgtgagatgcatccatgttgttgcctattgtcgcaattcattcattttctctgctgtatagcatttcattacatgaatatgctgcagtttattccattttactattgatgcttgtttgggttattaccaatgttagattattacaaataatgctgctcacaagtacgtgtcttttaatccatacctgcatgagttttgttgggtaaatatctacaagggaaattaaattgctggatcatagattatacttatagtcaacaaattacaaatagttttccaaaatgattataccaatttcattcatgcccgcagttcataagagtttctgttgctccatacccttagcaaaacttgaaattttcagtcttttttatttyagctattccattggatacatagtggcaccctgttgagattttaagttgcatcttcctgatgactaatatggtagactgtgtttctgtatgtttattggccatttggatatcctcctgtatgaagtgcctattcaagcttcttgcccttgaactgattctgagaaggtgagtgagcattaggtcgagaaagcaggaagaagggcgtgtcaaccagagggagcagcatgtgcaaatttacaatcttcccagagcaggagagcaaatggatagtgcaaaatcagctactaaaaggctaaacttaatcagagcccatgaggtaatgacagcaacatcacccggatcaacatgaaataagacccaggaagtacaggcagtcccaaactgtaatatttattggatcctgagaaatgtttgacagtcaaatatctgaaagttgaacatggcttatacactgggaaaacaatttagttttcaatgagctaaaaggcagtattgcaaatctctagtaaggcttgtagtacagtttccctctggcctcacaggartctcaggggaggctaccattagcaagtgacacaacacagcgagccccccctccatatttagtgtgggcccacttccattcccctgtcccttctgcacaaacaacctccaatctttaaaactactccccaaggcagcccttgagtatggagcaaaggagaggtgggacgaagtctatgtttcccctacaacagcaatgtgatctgaatagaaccttggccactgccatcatgtggccacctacacagactcctggacagctgtacccccttggaaaaggtcatgagaaacaccttcttgtaaaacacccagatatttcacggaagcttggccttttccactagcagcaatagctgtcaggcaggcccaccacgcaatagcttcaaattgccattcctcagaagatgagagccagaattcaggatgtgaaccgtgggggtggggtggagtcaatgcgcaatgggcaaaaatgtgtactctgtaaagtgttgaattatctgccggaagagggaaatgtcaacagaagtgctttgacccgcttgcctattgattagagagcagttctgttttgtggcaggcccttatctatgtcatcacccttctgtcactgtggacaacaaaagggcacagccagcttctgctacaaccaggctcttcacatgagaaggagcactctgggccctagaatcctcacaaaatatctcccttgacagaaaaatggctctcccaagccagtcatagactgtctaccatgaagccagagtagtctcagcctctaggagccagggtttccacccagatgcccagaaactgaagcaatcagatctggccgacaaaaaggaactttatttgggttactcagagaattgcaagtagttcccaggctttggatttaatggagtagtaagttttaagaaaaggtttcagtgacccatataaacttgccaacctcttactttctcaagttaagacatgtgactgtggtttctgtgaggttgtatttcagagtcatagctatcatttattatctgccatgtgtaaagctctgtgctctgtgatatttttccagaaatatctcatttgatcttcacaacatcactgcaaggtaactattartctttatattaaaggtaaagagagagtctcagagagggtaagaaaatacctgatgccacacagctagttagtagcagagttatgttttgaacccaggcctttctgattcaaaagcctgtgtattttccactatatagtttatcccatctgaaatatgtctaaattattcagataggatttttaaacctctgatgttctgataatggctggaaatttgagatttatctttgtggagaggtttgggtttccaagaaaagtcttaagaaccttttttccttctgacatacttcaattcctttagtagctctccaactggactagacaatcctacaaaagcaaaagagaccctaattctatctgacattgtgacacaattttatgttaaacatatagatacgtacatttggtttgagatggaaggaatgaaacttctttaagcccattttgctgaaatgtgacttgaaatagattgttacaaaacaaggcttatgagaggttcagtgctcactgcaatattaattacttggctgttaaagcgaatagctyttagtgggaacgactgcctcacagatgtttcttattgacgacataaatggggaggaaaacactatcccattttcacttttggccagaaaacaaaagacaaaggaatagattgtgtcagctaatagattgggtcgctaaggtaaccamggcctgtctttcaggagaggttttaggggctaaattatgttacttcaaaattcacatgttgaagccccaacccccagtacctcagaatgggactgtacttgcagataggacctttaaagtttatgtgaggtcatacaggcggatccttatccagtctgactggcgtccttgtaagaaaagggagacatgccagagattaacgcccacgrtggaaaggccaggtgaggccacaatgagaggggccgtctgtgagccaaggagcaaagcctcaggagaaaccagtcctgctgacaccttgctcttggacttccagtccccagaactgtgagaaagtgcgattttattgttaagctacccagtcttaacaaactaacaccagaagaattaggtattgggcatgccccctgccatcaatgccatgacagttaagggagacatcagtggaacttaatagatgagcttttactacccagaagggtccttaacagaggctgaagatcagctggagaaaaggtttttctgagagtaaaagggaagtcaaatagtgacgtataatgatcaaacctagtgacagatatcaactaggggtgtgtgtgtgtgtgtgtgtgcattttttttttttttgctatataatgtaccttataatactaatgtacttatgattattatccaacaattactgattttcccttattttaatagttaacaattgatgaaaagatttcactggctagagtactggtcaacagtgggggcttctgccagcttgcctaggtttgaatcttgtcccacaacttcctagctctgtgattttcagtaaacaatctccttgtgcctcaggttcttcatctgtaaaatggagataatagtacctacttcctaaggttatataagaattaaatgagttaatacatgtaaggtgcctagaaggatgcctggcatatagtaagcacctagtaaatgttagctgtttcaattttaacctatctctgcacaagaataacagatagcaaaaccattgtacctacattgtttcaccaagatacctgccagcaggtgccagctgccactaaaattgccagcatagaggtaaagaaaaataagcaacctggagaactggagctattaaatctgtgtttagagttatacaggttgctgacaaaaatacagattcctagggcttgtctccagagattctgattcactaagctggggtagagtccagcaatctgtttttttagaaggccatcttgggtaattctgatacaggtaactctcagaacatccattgagaaatactaatcaaaaggaatttcttctatagtcaaggctattaaattatggtaaatgccataacttactaatcataagtctataataatttttatttaaagtacagtgttgaaataaagtggtcttaggtgaatgatgagtatgtaaacttactttttaaaaaatcatctacttcatcacgcagttatcaagcctagtacccattagtgatgaaagaatctgtacaacaaaccccatgacatgggtttagctatataacaaacctgcacatgtaaccctgaacttagaataaaagttgaaaaaataaataaattaattaaaaaatcatctgaaagataatttccatgagttttaataaatgtattgataaaatggaagaataaattctgcattagatgtagccttcagtttctccatagacaaattatttcaagttgagccattcaaggttaggatgaattgtgcaatgcttccttcaggtttgtggcctgcctgtgtgaactgagttgaggatacatggagagccagggccttggagaaagggaagtagctgaacaaatgctgggctcattagcatggctggtgaaagtggtttcaatctgaaactgggcagttcaacctggaacttgacaaaatatgacagtgttgcctagggccaaaacgaagagtgaactctgggataaccttggaactgaaaaacctgattattgtgttatgagaaattcctaaaatcggtagacctgttcattacagggctgcagtgaatagccagtacttctttcccattggtcaagttgctgtgctcgctaagcagcaactgctcaggtcaggtgagagtggtcattattgaggaaataaaggttgggcccaaagaggacaaattccagattactgcagcatttgtgctgaaactcaccagggttaaattgatgagctttctgcgtgaaagaagggagtggtggtgatttccggagcttgtarccagggtgattagctcgcctgagtgttmttagggtgttataaggagtgtttcttggttattcaacagtgtarttagtatcgtttcttttaagaaaaaaaattgattttaacacttgaataaaagaaacactgctgatattgtttatcttgaaagctttcaaatcggactccttgagatcttcacgctactgttaaggtaaagaggtattttgatactgttgattcattgattcttctgccttataaccacagaacatttactaagaaataaaaattaaggttactgaatgtatacttttgtggccatgtattatactgagatatgtatgcatatctgtgattgtatattatacttaagttataatttgtggtatatatatgtcatatatgccatcaattatttctaaggcaacgtgccgcagctttattaacgcagctgtttttcctaatgtttagattcaagtcaactaaagtaaatcttcctacatagcattcattcctgaaataaaaggcatttaagtaggcaggtgcttttgtttgagttttcactagatcttttctatcacctgaaagctttttgcattattacygcagtctcattttatttagacatttgcctcgaggggctgagacattcttataccttcatacttaattccccaagacatttaaaaatgtaatttattattataaaagcactgtatatttcctgtagagtatttgaaaattatagaaaagcataataaaaaatcatccataattccattactcagtyataactaccattaaaacatcacctactaatcttcctttcaagctctttctctctgtgtatgtgtataaacacaaatggataacatactctcaaattatatatggtcataggtagtttttccacttaacattagtgcattgacatatttccatattattaaatattcttcaaaaacatgattttaccaactgtatagtattttgttttaccaatatttmagattattttcaacttgttgtaatattaatcctccttgtgcagaaatattttaactcaactctgattgccttaacacagattgagggaaaactggagttactgactaaaggcagtgacatctgcagggatcttgacacatttttgtcaaattgccctctggaaacctaacttgtttgcrtgcccattagcagagcatctgtttcaccacatctccaagagggaatgtaaactttaaaacatatacaatagtcaaagaggatgtctcgttgcttgtatgcccttttcttttattactactgagactagacatattttctcatagtggttgacctataatcttaaggagagaacatattttttagcaaaattgtttaagatcaactattacaaattacatcttactcccattgcatcyatgtcttcagagttgtactaattctcagcctcccagagtccattaagggaatttttttttttttttttttttttttgagacagagtcttgctctgtcacccaggctggagtgcagtggcgtaatctcggctcactgcaacctccgcctcccaggttcaagtgattctgttcctcagtctcccgagtagctgagactacaggcgtggagcaccacgtctggctaatttttgtatttttttttagtagagattcaccatgttggccaggctggttttgaactcctgacctcaggtgatccatgcgccttggcctcccaaagtgctgggattacaggcatgagccactgcgcccagtcccggctaatttttatatttttagtagagatggggtttcaccatgttagccaggctggtcctgaactcctgacctcaagtgatccgcctgcctcggccttccaaaatgctgggattacaggcgtgagccaccatacctggcctattaagggaatttcttttaatgaaggaaactgtattatgataataaatagcctgggcttgtgtgcaggagcaatgccaagccttgcagtttagccttctgtaaccctgaagaagttacttaaccttgctatacttcagcttaactataaaacagggttgataatacaataattctcatgagataggaatttttcaagcttttccagtaagaggtagctattattaaaaatgagaactgtttctctcctaattgcaggaaagccccaacagatataatcaaggtatgatagcataacactcttagaagccagaacttttcaagtctcaacaagttgcatgtttcacctcattattcaaccgtttactgggtaaaggagcagcatagatagtgggacttttttttaacggggtgtgaggaagttggcaatgagatggcttgtgctactagcctaagaatgacctcagggccttgcaggacacacagtgcttgctggtctgaggctgggcgcagtggctcacacctgtagtcccagcactttgggaggccgaggtaggaggatcacttgagcgcaagagtttgagattagcctggtcaacatggtaaaactccatctccacaaaaaatacaaaaattagcctggcgtggtggcatgcatctgtagtcccagctactcaggaggctgaggtgggaaaatgacttgagcccaggaggtcaaggctgcaatgagctgtgttcacaccactgcactccagcctgggtgacagagtgagaccctgtctcaaaaacaaaaacagcaaaaaaggtsctagctggtctggtacttagtactttagaaaagttgccctggataacacggtgaaaccctgtctctactaaaaatacaaaaaattagccaggcatggtggtgggcgcctgtagtcccacctactcgggaggctgaggcaggaggatggcgtgaacccgggaggtggagcttgcagtgagcggagatcgcacagctgcactctagcctgggtgacacagtgagactccgtctcaaaaaaaaaaaaaaaagaaagaaaaaagaaagttgccctggaactgacagcataagtcctcatccatttcttctcccttcttcccacagggtgaaagaaagcactacttcaataytgctgctaagcmtrtgatcattctaaggtcattacaagaatttgacttgcctttagcattgtgcttgtgtgtccatctgcctgtctctctagggatttagattttcattcaaagatttttctgtcactgagaatttaattcttggtatatttttgagagtgtaaattttttttyaagatttaaaacaataagcttcaaatgttagattgtatctagagtcttccacactgaggatgtgaatatgatatagactagctgttcaccaggctgaccaggttgactgccaaatgggttgttagtagtgccagaggcaccctgacatcactctctgaactgctttctctttcacattctkgtatttttccagctgacggcccagasggtgggtgccaattccaccagcagctgcaactgaaaagcaaggttcagaaatgtcagatatcctccgggagctgctctgtgtctctgagaaggctgctaacattgcccgggcgtgcagacagcaggaagccctcttccagctgctgatygaagaaaagaaagagggagaaaagaacaagaagtttgcagttgacttcaagackctggctgatgtactggtacaggaagttataaaacagaatatggagaacaaggtaagaaaggtcatagccaaggtaactgcaaaatagttgcatctgtggctttctccatcatagaatagcatgccttttgctcctcacccctatcagtatactagcaccttgatttcaagtaaacatcttggattttcttcctccttgtcatgattacagtattgrtaaaatgttcattgcaggaaatctttaaaatacagaaaatsaaataagaaaataaaaatcactcacaattctaatacctrgaaataaacacttcagtatagaaccttcyacttactaatgaatttcttcttaataaataatacatgttttctggaaaataagcaaaaataagaaccctcttagtcccaccactggagaaaaccasagctatgctttgataaatattataacattttccttctatgtgtatgtgtgtacatgacacatacaatgtattgcaacagaaataagagcacactgctttgtaacctgttttttttttaacttgatatgttaagtcctaccttgtggatctcatcatttatctagtggtttcttcagttatgagattgtagctggagacttaaagtctcctttattctagtagaaaaatactgttctttgttataaacacacaaagatgtttatatgttaatataacaatgattaygactctttctggagctgactagagaaaccgtattaataagtagaaataataatactagcagcacttataaatgctatgtgccagccactattctraagtcgtcgttaaatatattaacttatttagctcttataacaatttgatgaagaactactattacaatgcaatgggtgaaaaaagggaggcacagagaggttaagtaacttgcctaaggttgcacatcaagtaaatggtagggccagtttttgaacayaggcagactggctccagagtctgtgttctttgcaatattatattgccttttatatgataatctaaccattacatttgggagaatagaactttatggcagaaagcattataaaatattgaaataatttctatgaaattttcaaaatattgagaatcatttagaatcgtttcagtgaaatcttgaccacaggcgaagagatgaaatgccatcatgaaatctctacaaactatactttttcatgtcatataaaatcttgctccgataaactaaatgaagcaaatttatttttcttttttacttatcaatatagttgggtgcaagggatggttgagcaactggattaaaaatgtatcaacattaatttttatgggctaatatttgcctcaaagcattataaaaatttcaggcagttgtttattcatgagctaaaataaatgatattccattttagctgtataaaatatctttatttcatgaggcttttgtcttgtaatctcagaactggtctttaagcaggcttgggagactgagtttcagcccttgatgaatgggctggttgccagcccttgttgatttgtactgtcccacaaaataatatgaataataagtgttgtgggcattattaaagctattggtcatctgcaaatgaccgagttcaaatatttgaagcaygtccttgcttttgttccctgagaatatgtgtatcaaaatttaggacatattttgagaaaaattatctttattacagagaggatcagaagcaaaatgcatcagaaagcttcgtgatcatacagagatgacrgaagattcttacttgactccatttattcactctatatattgatacttaaattattggccaataaaatctttctcttttttcatatccccttcctagcctgaatgatgatacatctgagagtggggaaacaaacgcctgaaaatraaaacaaaatcgaatgttatctatcctctaattccttctatccagyctcaagtcgtgcttttagatacttgatcaacgaaattgccttgtataagctactgggatgttgtttaagagcaatagttaaaacatgtcctttgcaaatattcgaattctatggcccttaagtagaaggatgaagtttctrgaagtacttttgcaaactaaacaggacataagggaaccaggcatctaccatgattttgactttctagaggggcaaaagaacagaaaaatattagaaaattaagcactgagccaagttgacttcrtttttttatacttggattggtttctagaattggaaatkttggaatttcagttctgattgtgctatttaatttgaaatataaaattgaaatctgttcagaattgagcatatgtgtgggtttttgttttgtttttcgtcatactctgaatcattcagtttccaggcttggaaaaaaatatttttggagaagaatccaatgagtttactaatgactggggtaagtataagaatcttaatgtgtctttgtaatttaattatcatatggtattctagtctctagtttataccatgaactraatgtttggaagccacttactgtaaacaacataatatatttgaatgttaaggrtcattcaatttctacctcagaatatcatgccrtttaacttaagtagagagatgtggtatcttagaataatttagcaagtccatgtatcattttagatataaatctgtggcatttaagtaacttataactcaagctttgggaaaattgcatggccctttgggaatctaatgtaagttattaatgccrcaragatgcccatctacaaaartrtgcagacaatttcagatcctaggtttaaacccatctgtgcgctcttgggggaagtccatggaccttggctaaaagtacagaggtggccatggttctgaaatactgtgtgatcttgagcayathamctcatcatttctctaagtctcagaacctctgtgaagtacttggattaactaaaagattccttttagtactaagttttttggtttgtttgtttgtttttgagacagagttgctctgttgcccaggctggagtgcagtggcacaatctcggttcactgcaacctccacctcctggattcaagccattctcctgcctcrtcctcctgagtggctgggattacaagcatgtgccaccacacctggctaatttttgtatttttagttagagatgggatttcaccatgttggccaggctggtctcaaactcctgacctcaggtaatctgatttctttcagagaaacaatttttttttttagtttgtttggatttaatagtagaagaataaaatagtgaacattaaatactgatcatgtgacaaatacttatatatctagaaacacaattacaaagaaaaartgartttctagattaactctgaaaattttttagtctccttcatgcaccacatattaagaygcagttagttctatgttagtamtamgggkaakaaatcttttaaacctctgaaggttaaaaataacacttatgcctgacttataagcaatcttacatttaaaaatctacgcttgactacttcacaaacygytattttaatacatcatttgtctagaattatagaggcaaaaggcatagccacatccattttcctgtttgttaaaagggcagagaaatgtggagagaggaagaggagagatggtgatgatgatattgcaggcaagaccagatcataggaagggatttagatttccctctcagtgggatgggaggtctctggcaaatttcaagcaaaggagtgatataatttcttcctttgaatgatcccataagttttactgagcccagagtaggtgtgcagtaagtagccattattagctttattattccccaactttaacagtctaatttactttgaattaagttaatttaactaaatttgactgtttcttgctgattcagtcatcactgtaatagatgtatattgtgcttcccacactttactggtcatgtaatcgcctcaggatcttggttaaaattcagtaggtcggccgggcgcggtggctcacgcctgtaatcccagcactttgggaggccagggcgggtggatcacaaggtcaggaaattgagtccatcctggctaacacggtgaaaccccgtctctacttaaaaaatacaaaaaaattagccgggcgtggtggcgggcgcctgtagtcccagatactcaggaggctgaggcaggagaatggcgtgaacccgggaggcggagcttgcagtgagcggagatcgcaccactgcactccagcttgggtgacagagcaagactccgtctcaaaaaaaaaaaaatttcagtaggtctggggtggcatctgaggttctgatttttttttttkttttgttagatggagtctccctctgttgcccaggctggagtgcagtggcacaatcttggctcactgcagcctccgcctcccaaattcaagcgattctcctgcctcagcctcccaagtagctgggattacagacatgctaagctacctgccaccacgcctagctaatttttttatacttttattagagacaggggtttcactatgktgaccagggtggtcttgaattcctgacctcaagtgatctgcttacctcagcctcctaaagtactgggattacaggcatgagccaccacgctcagcctaaggttctgactttctaataagctcccagctgatatagacactgctggtccttggaataagaagggtagaagtagctacctagatagctactagatagctaggagtatctaaaacgttccaaagtgccatgttttcttagtttttaagattttttttcctccactgctgtcacttcttgttgctattaacttgcctattttttaccagcctcttccctcacttctgtcaagggctgaaaccagattaatcaagggtctaagaagcatgtttaaagcgatggtaaagcacctggcctcggtaacttatcgtttcatttgaagaagcagctttgcttatgttctggttctcaatgggctccacagaggagagctatttatatgtataccatttagaggcataaagttttactacatttaaagattggtatataccattttatgttacttagcataaacaattttaagttaaaagcaatatcatataaggaggtagaagcacttcggtgtgttgaaaaacctccattcttttcaataacatattcagacayggacagggtgacttaagtatataaaaagtcaaaagacaaattttaaaaagattaatgatcaggaattcaggaattgttaactggcctatgtatcccttaactgggatacaaaattgtgcccacatgggcatttttctagggaggtcttttgattcctgaaaccyatcycttactattcaggttaagtgcctgggtagccactgagcatctgacttgatgaagccccaccaggtgattctggcagtcagccaggcataggaactgctgggatggatatattgccctcaatctaagtgcacagcttttgattcactctctcactggctcactctctctctgtctctcttgcttgctctctcgctctctctgtctcaatctttgtctcattctctcgctgtctctctcgctctctgtctctcttgctctgtctctctctgtgtctcttgctctgtctcgctctcttgctctgtctcactgtctctcgctcactgtctgtctcactcttttgctctctctcgctctctcgctctgtctcgctctctctcgctctctcgctctgtctcgctctctctcgctcgctctctgtctcactcttttgctctctctgtctctctgtctctttcactctgtctctctcagtctctccctgaatctctcgctctctgtctcgctctgtctctcttgctctctctcgctctttcgctgtctctctcgctctttgtctcttgctctctgtctcttgctctgtctcgctctctcgctctgtctctctcttgcttgctctctgtctcactctttccctctgtctctttcactcttcctgtctctctctygctctctgtctctctcgctctgtctcactctctctgtctcactctctcgctctgtctctctcttgcttgctctgtctcactcttttgctctgtctctttcactctccctgtctgtctctcttgctctcactctgtctcactctgtctcactctgtctcactctctctgtcttgctctctctgtctctcgctcyttygctgtgtctctcgctctctctgtgtgtctctctctcactctcttgctctgtctctctcgctcmttmgctctgtctcgctctctgtgtctctcgctctctctctgtctctctctctcgctctctctgtctctctcactctttagctctctctctctgttctttctccactgaaactcttgaaatgtaatggcttatcgtgtggctttaccctaggggaaaagattaccttgaggttgtgttcaacagagrargaaacagcagagcttcttagcaaagtcctcaatggtaacaagrtrgcatctgaagcattagccagggttgttcatcaggatgttgcctttactgacccaactctggattccacagagatcaatgttccacaggacattttgggaatttgggtggaccccataggtaagtataggaaagtatgtttgttcttatttgcaatcttttttttggtggtggggttggggatgggtgttggaaaaataaaaattattgagtgtagtttaactctgctagaagtttttaaaattttaaagttttaaaacaatgagagttgaggtgtatgtgtcatgtgttctgtatatatacatatatattatagccgtgtgtatatatatacatatctataacaggtgtgygtatatacacacacatacatacaggcacacatgcaaagatgaattmacttmtcttcaaaagacttcagggaccagactggtaagtaaatgagagaatgaagtgagagcagttatgaccaattgagcacarataccatttaaagagcacttagctttagcagattgttaccatatgggagtacaggccagctcttcagatttttaaagagaaaccaaaatccaaggttttcagcgatatatcccaatttctaaccgttagctactaattcagttsaagaaggaaacaatcaaaaaaacacagtacaggtcaagcaaaaagctgaatgtyacgcatgagcagtttgtgagccctgcatgagctctacattttttttggtcatgattgtgatagaaccataatgtataatccattgttttgaaaatgtaacccttttttttgagacagagtctcgtgttgcacacaggctggagtgcagtggcacagtcagaactcactcactgcagccttgtcctcctgagctcargcratcctcctatctcagcttcccaagtagctgggacccaagtaggtggcagagttgcatgccacctcactaggctaattttttatattgtttttagagaaggggtttttaccatgtttcccaggctggtctcgaactcctgggttcaagcgatctgcctgccttggcctcctaaagtgctaggatgattacaggcatgacctaccatgcccagccagcctttatcttcaatgatgctattaatacaagttctaggtaataattttaataagctcccccttccttttttttcttccccacccaacacaatgggaccattcaaggaccaggcaaactcctctctgggcccttcccatcctacaagtgcattcacaggatgatactgaaatgggtttaatcttcagataattatatcacattcagccagtggatgatatatggaaactaaaaacctttccccaaatctttgatcatttaagggtaaattggcatcagttatagtttctgagggacagagatctcctgtttcttggttccaccctgaattgattctgtttttgagctctttgagtcttttgccaggcacatccttagccgtgtgttgactccctagacgtcagcagtcagctgctggcmtgtmcatctcttaaggggaaacctagtttctctgcctctgtttcataggagctccgttaatttctttttttggtgccaccatcattgtctctttcttccttctaacttgagggaccaaataataatagtaaaagataatattacctgtgacctattacrgraggggggcttttctttttttcttttcctttttaaaatgtttgtgggtacataataggtgtatatatttatggggtssatgagatgttttgacacaggcacacaatgtgagataagcacatcatagagaatggggtatccatccctttgagcatttatcctttgagtaataaacaatctagttacactctttattttaayaygtacagttaagttcttattgattatagttaccctattgtgctatcaaatagtaggtctttttttttcacccattggaaggaggcttttccatctcacattgtactagtcctctgattagtagtatttctaaaataatcccaccaattattctggttattactttttcaatgcttttgataagtaacaaatatttgaatgcctgttatatacaaattgctatgccacaggaactatagacacatcctctcccttcaagagttctcacagtcaggaaaatgaaacacaagcaatttaaaagtaaagtacaagaggccaaataacaattcaatacagtgacatccaaaggtaaaaaattattggttaccaaatcagtagaagagagaagtcatatggaacagagtcttctaaatgatctttacctgaatccaaacacatttgtttcctttttcagattcaacttatcagtatataaaaggttctgctgacattaaatccaaccagggaatcttcccctgtggacttcagtgtgtcaccattttaattggtgtctatgacatacagacaggggttcccctgatgggagtcatcaatcaaccttttgtgtcacgagatccaaacaccctcaggtaaaaggcaaatatttttggtatattatggttgttagaacttacgacctcagctttgcttgttgttaggattatcactatatgacattcccatgacttaacacatgggagtgttgccattgaaagtctgcgtatttgaattaaagttctattttcaatcttggatttgcgtaattttatttcaggmcaagtgcatgctggtagaaattttaaaattaatactatcctgtagaaatcatagttttacatttggaatatagtaatcctgttccctgtttctagaatccactcaaaaccagataagtagagtggtggtaacactgccttccaatacattgggaataagacagctgccatcgctgtatagccagttgaactttggtataattttagaagttcaaaacaaaatgtgaaaattatccaatgaaaagattggtaggcatggccaggatcagaacctaactcacactccctttctgcctcctcccttccactcttccatgcactcttaaacagagcgtagaaagtggccaggactcagctgcctctgatccatggcctgtgctttggggttgactccagggcatggcaaagtccaggtggaacaagcagttcagctttttattgaaataggtcatattttttcacttatataggattacatatttttattgaacctgagctgcttcaagtaacaatcatttgctctttaatagtcataagtttatacctcttaarttttaatattttccccctacccccaccatcttccaaactaaaaataggtttctgctatctttaaaaggttaataagaaattaaaaagaattggaacaatatgcagacataatcatggcctagaaatggaggtggtcaacaaaatagtttatggcacagattcagagtgagactttgtgggtttgaatgcagattctaccactttctagctgagtgggcctcagcaagctacttactttctctaagcctgtttcyttatctgtaaatatgtaacaacatagacagtaagttaagcattgataaagggaaggtgctataattattgtggttgccaaaactaataacattgagtccatctttctttgtgttggaagccaacgtgaaactagtgaataagagaatgaaaaggagttaccaaataaagaaaaacttgttatagggattgtagaatatttgcagatcaaaaagagatatcacttttctattcctttttccctactaaactttaaatactaaaagttgtaatgaaattttgcaatggttctggaagctggaaaccccataaatgttttagtgttgtcctagattgatgtgataatgccataaaattgaaagcatttctaattgcaacaactcaggcagctgcatgcatataagtaactttctgaaataaactagctacctgatatctattcctagacttaaaggtgttaagattcaccatgttatgatgaattgtgtatttcttcgtatcattaagtttgaaagtgacatgagtaatgaaaaacaaatgtgataatcatcaccaattgaaatttttcttctacaggtggaaaggacagtgctattggggcctttcttacatrgggrccaacatgcattcactacagctcaccatctctagaagaaacggcagtgaaacacacactggaaacaccggctctgaggcagcattctcccccagtttttcagccgtaattagtacaagtgaaaaggagactatcaaagctgcattgtcacgtgtgtgtggagatcgcatatttggggcagctggggctggttataagagcctatgtgttgtccaaggcctcgttgacatttacatcttttcagaagataccacattcaaatgggactcttgtgctgctcatgccatamtgmgggccatgggtgggggaatagtagacttgaaagaatgcttagaaagaaatccagaaacagggcttgatttgccacagttggtgtaccacrtggaaaatgagggtgctgctggggtggatcggtgggccaacaagggaggactcattgcatacagatccaggaagcggctggagacattcctgagcctcctggtccaaaacctggcacctgcagagacgcatacctagaggaactctaaccccggtgtacctgtataaactgaactgtgaaactgtttcggttatctctgtcttttgaggatggctttgtcctgttgctggttaacattcaccttcctcttttgaggagtatttttccattatgtattcataataatgttaatttcaataaatgacattcatgcagcaattatattggtgtatgaaattcttacagtgaatattgtgctgttagtgctgcttgaaacatttcartaaartattgaccaggagcagtggctcatgcctgtaatcccgggacttggggaggccaagacgggcggatcacgaggtcaagaaatcaagaccatcctggccaacatggtgaaaccccatctctactaaaaatataaaaattagctgggcttggtggtgtgtgcctgtagtcccagctactcaggaggctgaggcaggagaatcgcttgaacccgggaggcataggttgcagtgagccgagattgtgccactgcactccagcctggtgacaaagcgagactgtctcaaaaaaaaaaaaaaattgatgaacgaggaaaaaatcctgttaaattagtaaaactatgctaaacatctaagcgatagaaatttctctgaaatataagggagaatacaggaggggtttgcttgagttttgtttcctctcgaagggaaaaatctgcaattttagcctgttggcagaacatttagaacttaatctgcgtaagttagccaagtttatgtacttttaacagtattcttgtatttcttataggaagtaaagcctggaacactgtgggctccccctttgcagagacagggagagacagggatacacacacacacacacacacacacacacacacacacacacatacacagtgaaagacacagacaaacagaaagacacatatacacacacagaagcaaaagagtacaacgagtagaggtttctgcaatttttgcatatttactacactttaccaaaaaccagaggtggactttagatatatacaacccttgtgtaccagcatcccacagtgaatgttctctgaagtggacataaagtactttttctgtattctctgtggcaggcctggtaaccagagagtgccaactgcagggatcaaatcctcggctctgacttcattctgccctacgccccctgggggccaaaggatgtttctacagatcctctatttacaaatgcatgaaaataacaatcttattttctaatgtccttacacttaaaaatttttgacaaattatgtttatgtcatatgatatgatgctttgacatatgtatatattgcagaagggctaaatcaaactaacattaccttacatttttttgtgtgtgtgtagtgagaacacttaaaatctgttagcaattttcaggtaaacaatacgttgttattaactatagtcaccacgtcataggatcttttgaacttattcttcctgttaactaggattttctatcctttgaccaacatctcccaaacactccagcccctgataaccaccattctactctctgcttctgtgagtttgactttttcagtttccatgtgtaagtgaggccgtgtggtatttgtctttctgtgcctggcttattttacttaacaatgtccttcagggtcatccaaatgacaagatttctttttttatggcagaatagtatccattgtgtatacatattaataccacattttctttacccattcattcatatcttggttgatttcatatcttggctattgtcaataatatcaaaatgagcatgggagtggaggtatctctttaacatactgatttcttttcgtttttttttttgtttttttttgttttttttttttttgagatagggtctcactctgtcaccaggctggagtgcagtggaatgatcatggctcactgcagccccaacctcctgggctcaagcgatcctcccacctcagcctcctaagtagctgggactataggtgcatgccaccatgcctgactaatttttgtgttttagtagagatggggttttgccatgcttcccaggctggtctcgaactcctagggctcaaatttctcaattggaggggtcaaaagctggatggaagagggaatcattatattctgtgaacatctataatgtatattattcaccatcaatctttgcagaaaagccaaagccctttctttaagcatgtgcctctgatgggtctgcattgtttttcttgcagaagccacaaccaggtgactatgatttctagttttattttctgtagaggaagaacttaaaaatattccatttttacagtggtgtttgtttttgagacagagtcttgctctgtcacccaggcttgagtgcaatggcacgatcttggctcactgcaacctctgcctcccaggttcaagtgattctcctgcctcagtagctgagcataaatctcagctactctcctgagtagctgagattacaggcacttaccatcatgcccggctaatttttgtatttttagtagagacagcgtttcgccatgttggccaggctggtctcgaactcctgacctcaggtgatccatccaccttggcctcccaaagtgctgggattacaggcatgagccactgcgcctggccacagttttcttaccaactaattttttggttcacctttacccacacttactaaagcctccaattctttgttttcaaacccacactccattactttacgttatattaatttaattattagaaataaaattggaatatagagttgtggaaagaagtaaacaatttttttttttttttgagatggagtctcactctgtcacctgggctggagtgcagtggtgtgattttggctcactgcaacctgcacctcccgggttcaagcaattctcctgcctcagcctccctagtaactgggattacagatgcctgccactatgcccagctaattttttgtatttttagtagagacagggattcaccacgttggccaggctggtctccaactcctgacctcgtgattcacccgccttggcctcccaaagtgctgccactgcacccggtcaacaattcttggtatgcaggcaatttatctgatgggaacaggagttggaggtagtgatggaggggtgttctacagaggagcctcttggccatgaaagtcaagtgtcttttgcatcagtctgtgttttacaggaggatggatagagagattagtctgccaggtcacttagacacagagtagtacaaagagagcctcaactgcacatcaagaagagcagtctttgggaatccaagtcaacatcccttcctttcttgctctcacaacctatatgcaatcactcaggaaactctctggtctccactttcaaaaatatatccagaattcagctattccacatcactgtcctataccccaccctgctccatgcctttttatgcatcacctggattattgcaataaacttctaacttgcctccatactgttcattctcaagacagaagccagagtgatctttttcaaacacagatcagatcatgtccctcttctgttcaaaattctccaaagcacaataaaataccatcttacaccagtcagaatggccattattaaaaagtaaaaaaaacaaaaactgatgttggcaaggatgtggagaaaaagagatgcctatacactgatgatgggaatattaattagtacaacctccatggaaaagagtatggagatttctcaaaaaactaaaagtagaactaccattcgatccagcaatcccactattgggctacccaaaggaaaaacaaaataatcacctcaaaaagacatttgcactcatgtttatcacagcattcttcacaatatcaaggttaaggactcaacataagtgtccaccgtcggaggaatagattttttaaaaatgcggtatatacatatagaatactactcagccataaaaaaaaatcatgtttcttacagcaacacggatagacctggaggccattatcctaaatgaaatgacttagaaacaggaagtcaaaactgcaggttctcacataaaggtgggagctaaataatgggtacacatggacacacagtggaataatcaacattggagacttaaaaaggtgggagtgtgaaaggaggtaagggatgagatgctacctatggagtacaatgtgcactgtttgggtaatgggtacattaaaagcccagacttcattgcacaatgtatttaaataacacaactgcacttacgcccctaaacctataaaaagaaataaatttaaaaaggaaaggcaaaaaatgcttccaaatgtttcctcggctctcttagggaaaaagccaaagtcctcatatagcctataaggcccacattccacccttccttctcatcttctcttactctctgctatggtctaaatatctgtatccctcccctaccaaattcatatgttgaaatcctaacccccagggtgatggtattaggagacagggcctttgggaggtgatccagtcatgaaggtggaacccttatgactgggattagtgcccttataaaaggggcctgggagagagcccttgaccctttcaccacatcagggccagcaagaggtgcagtctgtaatccagaaagcaggcccttaccagacactgaatctgcttagatctgggacttcccacccttcagaactgtgagaaataaatttctgttgttcaaaagccactcagttcatgacattttgttatagcagcccaataggctaagattgttcacattgttacagccacactgcctttcttgctgtgccctgaacttgccaagcatgcttcctctgcctcaggacctttgcacttgctgttctaactggaaacctttctccagatatcagcacatttccctccctcatctccatcaaaactttgctcaaatgtcactgtatcagtatgatcttcacttattgccacccacctttccccaccccatcctgcacatcccatctccttccctgttttgccctccatagtacccatggcctcctyatagaagttaaatttgtcttgttagtctctccctctagaatgttggcttcaaaaaggcagggattttcatatattatgtatctccattgcctaggcacattgtcagtgttaaataagtggggacagaaggaattaggctcagaagctgaacaagaagtaatatgcagtatcaactacatctttacttctacccattatttccaaaacacttcagaaacctttgctataatgctgagaattagtcctacagttggtcagttaaattctcaatgtcaaacaaccactttaatgttgaaagtaagccatggacttttgtgacagaacaagcattggcatattaccaaagctaatattcaagtcctggctatcagccctataaagaggtaagaggggaaagtaatggttaagtcacttttcttccactctcatggaacagagaaagaatgagagcttacaataactagaatacaaggaaactggctatttctccctatagcaaaagctcagtccttccagctggatttgagaatgggttgcctgagacgcaatgtttaaattcacccacgttgggtcaagtatttctaaaagcaggaagctctatgtcaagatggcttatcaccctcaatctttcaaacaagctcaaactatgaccatagtaaattagtaggacaggtgttgggacaaactcatcatgtggttaaataaccgtatcaaggtaggcaaaataatgaaaagacagagttcatacattatttcccttaggatataggcaggagtgtcattaaactcggaaatttgtagctgtttctttttccaccaagacagatttttaaaaatcaatttatcacactaatataccatgaggtaggccatgcatgtggcagtttagtgctatggttctttaaattctaatgattatgatctgattatgcagattatcctgagaatcattatctaatctacaggtaatctagatttacactgcccaaatggtagccactagcctcaggtggctattgtgcacttgaaatgtggctagtctgaattgagatgtgctgtgaacatgcacattggattttattttaaaataatgtttaaattttatttaaaaataagaacatcataattctttatattggttctaatgtgaaatggtattttgggtatgtagggttaaatcaaatatattgccacaattagttctacttgtt

SEQ ID NO: 95217 - DNA, 166467 bp, Homo sapiens
  misc_feature (1)...(166467): n = A,T,C or G
aacgtaacaattttataaaggatgaatttcggatacttctcagaactcatctgaaaattgtgaaaaagtattccatttagaaataccttaaaatttgtctgggcatggtggctcatgcctataatcccaggactttgggaggctgaggtgggtggatcacctgaggtcaggagttcaaggccagcctggccaacatggcaaaatcccgtttctactaaaaatacaaaaattagccaggcgtggtggcgcatgcctgtaatcccaactactcaggaggctgaggcaggagaatcacttgagcctgggaggcagaggttgcagtgaaccaagatcacaccactgcactccagcctaggtgacacggtgaactctgtctcaaaaacaaacaaaccgacaaaaactttaaagtttgatagtgaccttattttttaaactcccttttccatagttggaaatattttcactaaagagaaactttgttcatttagatattttttttatctgctgtgttccaactacagtatatgcttaagtttttgtatgctaagagatgtttttagaaccctgttgccacaaatgaaacctgaaatcagatagtatacaaatagaagcagatgcaatgtaactatcttaactatcagaaagaataaattttttaaaaatacaaatttgatgcaaaattcaaggcagaaaaaagggtcagatgtatggtttgaagcaagaatattttccaatagaatattatttataattttgatcactgctaatcagaatctagaatcttactaatttatttttatttttcagacagggtttcgcttccatcacccaggctagagtgcaatggtacagtatcagctcactgcaacctccgcctcccaggctctagtgattctcctgcttcaacctcccaagtggctgggactacaggtgcatgccaccacacctggctaatttttgtatttttagtagagatgggtttcaccatgttggcaaggctggtctcaaactcctgatctcaggtgatctgcccacctcggcctcccaaagtgctgggattacaggcgtgagccaccacacctagccttaatcttcaatctattttgaatgtaacatttttcattaattaaggaagattccaaagtcaatttatctttcctttagaactcatgccatactaattggagacaccaactcctttaacacttactgtttattgtctggatgggcctggatgggcctgcagggtgtgcggtagaaagagccttgcttgggatacaggagagctggttcttaggctctgytttgccaatcaggtatataaactcggccacatgatgtaagctctgaaggacttgttttccccattttgtaaacataaaaaaggaaaagaaaagcaggggcagagaggttggattggatgatttctatgatctgttccagttcaaaacttctctgttttttatatctacttctcatataaatgagattgggaaatattattcagccttaaaaagaaaggaaattctgacacatgctacaacatggatgaaacttgaagacattatggcacatgaataagccagactgaaaaagacaaatactctatgattccacttgtatgaggtactcagaatgtcaaattcgtggagacagaaagtaggatggtggttactagggctgggaagagagggtagagtcattgtttaatgggtatagtttttgtgtgggatgatgaaaaagttctggacatgaacagtgctgatggttgcataacaaagtgaatgtacttaatgccactgagctgtaatttgaaaacggttaaaatggtaaatttgatattagatatcttttaccacaatttttttaaagttaaaaaaaaacaaaaaattacaggttcaaagaaatgcacatttcaaaagcttttgatgtttatcatctacataataagggcataataaatatttgttgacttataattttaaaaaacaagtgggggtagcgataggaaaattaggtttaaagaagggcactaggctatttaagttgatttcatacagcaaccacaccggtgttttgttttgttttgttttgttttgtttttgagacagagtctcgctctgttgcccaggctgcagtgcagtggcacgatcttgactcactgcaacctccgcctcccaggttcaagcgattctcctgccttagcccccctagtagctgggattacaggcacgcgctaccacacctagctaatttttgtatttttagtagagaccaggtttcgccatgttggccaggctggtctcgaactcctgacctcaggtaatccacccgccttggcctcccaaagtgctgggattacaggcgtgagccaccatgcccagcctccatcctcattttaagagttgctgataatgaaaaattatggcatcaatttaagttatgctttccttaagcaatgttaaaagaacaattttctttggtcacttgaatttaactcctttgatatgaattattactctcatttgcattgagcaaagcctaccactgtcactttagaggaaaagggcaagtttaaatatctattggtaaagttggcaaatatttaaattaatttaaacatggataatttactatattttaaatatttagttggttaaaaataaaaacaaatgagcaaataacacacactctccatccccccccaaaaaaggagaaagaaaagcaatgtaaagaggaagaaggaaaaggaaaataaattctgacattttccattatggtaactcatcttgtcaaattattttataggtatttaatattctatttctttaatttttttatatataactgaccaagttttagggccaaataaatttttttttcttttttgaatggggttgagagtcattttttaaaaagctacaaataaggagccaggtgtggtggctcacgcctgtaatcccagcactttgggaggccaaggcgggtggatcacgaggtcaggagatcgagaccatcctggctaacactgtgaaaccccatctctactaaaaatacaaaaaattagcctggtgtggtagcgggcacctgtaatcccagctactcgggaggctgaggcaggagaatcgcttgaacctgggaggcagaggttgctgtgagccgagatcacaccactgcactctagcctgggcaacagagtgaggctctgtctcaaaaaaaaaaaaaaaaaaaaaagctactaataaggtattcaaatttgcatgcctgtcttgcctataattatttaatcaggcacatggaagaggtaacaaataaatctataatatgaaagaaattaggctgggtgcagcagcttacacctgtagtcccagcattttgggaggctgaggcaggaggatgtcatgagcccaggagtttgagaccaacctgggcaacatagtgggaccccatctctacaattttaaaaattagctgggatggtggcacgtgcctgtagtcccagacactcgggaggctggggtgggaggattccttgagcctgagaggtggagactgcataagccatgatcacaccactgtactccagcctggatgacagagtgtgaccttttctcaagaaaaaaagaaaaaaaagaaagagaaattattaggtacaatattttgctgtggattactagttacagtaatctgcattagtcatccattaataaaatgctcttatcacattcaagaaattgaattaacattacataccacataaaaaagactaaacatgcaaaaatatgtttgctaaatttgatcagcagaagcttgaccagaaaaaaatataaaagtttcagatttcctaaatgagtggcctcatcatattaataaaatcagtttccatatatgaacattttatgtacaggagtcctaataagttttatcaactattcattccaacaatagtcatttcccacctgcatttcccaaactcaccttttttgttgttgttgactattttaaaattttatcatttttgtctatttgaaatatctcctttctcttagaaattctgatccaggaagtctcaagttgcaatctgggaatcttttaaaccactattatactctacccactccccgacttgcctactaccctgaggaattttacaatcagacaagtttgagaaacagtacccaacatcaatcacaggagacgggaagcagaacttttatttttttaattttaacttaatttttattttttgagatgaagtcttgctttgtcgcccaggctggagtgcagtggcgcgatctgggctcactgcaacctctgattcctaggttccagggatcctccagcctcagcctcctgaatagctgggactacaggtgcttgctaccacgcctggctaatttttgtatttttactagagacggggtttcaccatgttggccaggctggtctcgaactcctaacctcaagtgatccacctgccttggcctcccaaagtgcagggataacaggcgtgagccaccacgccagccagagcctttatttctaagctctcagccaaacacattaacatagttttattaacttcattacaagattcaaagtattttaacaagaacattcataaggactcacatcgggaaaaagtgcttatatacaccatcctcacctttaaaaaatgaagatgacgtttgttttcattgatcactttatataacataattatcttttaagcaatttctgtataacatgaaatagaatgagacattttctaactgttattagagacagaattaaaaagcaaaataaatatataataacctttataacttttgtctcacaggccttctatgtcaaacaagaaattatcttttcatttttttcaggactataacaaggaaagctataatttaaatctataataaggtatatcattttaaagggcattagtcaaagctgcaatttccaagcaagcggtggtttagtccaaaagcttgaaaagtggtagcttattctacacaaaaagtacagtgtaactctatgtatttgacataattctcttcatgactaagctgacttcaaaagtagtataaaaatccataaaaacttaaaaataaagtaggctctacataagaatggaaacaaatatctgtattgaaaaaatgaattcttccattgcctttattttttcccttatgttctctattttaaaaggtaagaatgagatcacttagctaattcaccaatcaagagtagttcagtggattactttcatccttatactattatcaagttgagcagggctgatccttatcaacttttctggcttcaaagctaggaatcagtgtaaaagggctaaaaaatcttttactcaacagatgggatccacttaagtggtctgtccatacttttaacccactgttcttttgaagtgaacaccatcatacagtgggcaaacttctgcttattcaacactttaaaaatacctttaaaatgagaaatctccaaaaaacaagccgtggtttcttataagtgtttttcacagatgtactaaagtaagcgtttcctttcacactctttgcgcctaaccgtctacatgatagggccaaacccaggttaaatatttttttccagctaccactctggacacaccaactaattatgcacacctcacaaaaccacctttcaaaatgcagagagaattaacagcaaggaagtaaagatttttctaaatatagtcccatcatatttatttcacactcatcaagtaggtcactggaggtagctggcagctagggacactcagatgcatctctcaaagccaaggctgagaccaaggggtcactgacagctgcgccatctacctgttgcagctgggccactgctctggacaactgtcagatcagcttcttcgtcctacaaatactaatgactggatttttaaaatcgttgtttgccaccctttcttcccgccccccaaccccatcgggccgctcgggcagggccaagggcgccgcgggactcacgagctcccctccgcgctggctgcagcggcgatgccgggcatgcctggccrggcccggccgggggcggcctcgctgccggggcagggacctcgcaggccggcgcgcagaggcgaggaaccctcccggcgccatcgactcacctacccgcgragaggcgacggcgcgcgccgctcaccagcccgggccccagatccaaggaggaggggcagcggcgcggggaccctgtggtgggtgtcgtaaggaggaaaacgtgttacctaagccggggatgaggacagagcaggaggcagcagcctttccctcgagaaacggaagcggcggggagcaggaggaggmggaggcgcggcccgggcgcgaggttaggcgaggggcgytgggcgtgcggccgcaggcgcggccagaggacgagggttggggaggacggcggaggtcacgcgagcgaaggcgaagccccggcgacgcacggccccgcttggctcggcaccggatccgagcttggcctcagccaggccgccgcccccggctttcccgcgggaccgcggcgtggaaacgcgcgctgccgcctcggggctcccgggacgcgcgggccccccacgcytgcccragccgggcgtccgcgacgtcacaagtggagcgcgatgattcagagggagggccaggaagggaagggctctggggtcagcttggccacggctgctgtttccttgtcgccgcccacgaattcacttttaaatcttcctcctccattcatctgtactctcayaggggactgcgggtttgacagatgggttggcagctgtgaagatggacttcctgccagtggtatccgggtcccactgttctaatggaaatgtcaggtgtactggatgttcctcaagacacagcagtgtctctgggccttgcctcttaaggagtgggcctcgggccacctggacaggaagcgcatcaagggtggggaacttatctctctscagcctttggtgctgtgatactcagtgtaccttaaggatggtttgggttgaacctaggtaggaatgggtgttggtgggcggggtgggggtggggggaatagaaaccttaaaagggcaacacaaagttttgaatagaagaggccaagcagcctcgcccagaagctgatgtttgtgaatgtactgggccttctaaagcggcgcttcacacaccttttcacttcttggcacaggtaggaaaggatgatattacaagggtcaaaatgggggtaaacagaagaggctgctcctgcagaaggcttcctgcagaagcccttgcacttggagggctgggaagacccatgctgtatctgcatccctgtcattcgtttcacggcatccagttgggaagctctgcttaaagctttgtctggcacgttttcttagctacatttttccactccagctgagactgcctcactgagttgtcaacacttggtcttcttcagcagtgaggaaccaacaagacaggaggctgggtcaatactcarcttggcaaactccaggaaatggtgcttaaaacgtttggcttcttgaatggaattcatggtactgctcccagcctgcacctgggttctccaacttgagacaatttctccccgcatccccccacccttccctggctttcactcactagcaagtgggctgcttctactttctttctcacattcatttcttaggtccattctcagagcggttaggattactgtttaattagcctcataatcatatctatgatggcaaaatcaagaaacaatttaaacatgattcttaaaagtaaggagataaataccagagacatagaaggtgaaagaatttgcctctaggaagcaggaatttaaatttggggaagacagggtggagcaagggatataaatctagtccatttttcttttcttttcttttcttttttttttatttttaagatagagtctcactctgtcgcccaggctggagtgcagtggcatgatcttggctcactgcaacctctgcctccttcgttcaagcgattctcccacctcagcctccctagtaactgggattacaagtgactgccactatgcccagctaattttgtatttttagtagagacgaggtttcaccatgttggccaggctggtctcgaactcctgacctcaggggatccgcccagctcagcctcccaaagtgctaggattccaggcgtgagccactgcacctggcggaatctagtccattttccactttgctaccacacatctgcagggtttcttgcttgcttaaaagctttcattggctcccaatctctgataatatcaagagcaagttcctgarcaactcattcaagacccatcacccctcgcatctgtcaactctgccccttgaatattacacctcattttactacaccacatctagttccctgaatatgcaaacagatttcatacatttgcacctttatacatgttattgcttttgcctgggagagtattctcttgctgctataataatagctaatgacactgtgctaagtactttctgtgatttataactgttaattcttacatcaaccctatggtaaatgttactgttatctccattttataaacaagaaaactaagacttaaagagtttaagtgatttgcagaaatatgtagtatttggtgaggctaaatttgaacccagcaatctgactccaggactaacataatattacctattcatccttctaaaatgtttcccagacactaaatttgaacaggattaaaagatttaaatgtttttaagtcttaaaagggcaaggagaaaatacaagtgaattgcttttaatctcaaactaagcatgaaacaacggctgaaattacaaaggaaaagtgacagatctgactgttgaacttttaacttcttttatccaaaaaaaaaccccatagaataaaatttaaaaacaagtaaaaattacaaaaaatttgcaatatacatgacagataaacataacattaaagagaacttagaaagaaaaaatagcctactaaaaatgagcaaaatgcaaattcgtcatcatgagagaaaaatgtaaatggccaaacatttttaagagaagtaaaaacttaaaacgataatgcaccatcaaattgagaataaaataatactcagagctagtaatttgggccagtgacccttggagtaggatgtatagcaactaaagaaactcatacattactgagaagggtgtaaattggctcaacgattctggagagcaatttgacagaatgtagtgaaagcgtcaaaaatgttcacacactttgacttaaaaattacattcctggaaatttataatacaaacattttctataaaaggtcagatggcaaatactttgggctttgaaggccacatatgtctctgtggcttttcttttgtgtgtgtgtttaaaaaaaaaaaaaactgccccccctccccccacccttgttaggccattcttgcattactataaagaaatacctgaggctggttaatttatatgaaaagaggtttaactggctcatggttctgcaggctgtacaggaagcataatgccatctgcttctgggggggcctcaggaagcttccaatcatgctggaaggtgatggggagcagatgtctcacatggtgagaacgggagcaagaaggagttgggggggaggagccacataaacaatgagatccctgtgagctcagagtgagagcacacttatcaccaaggagatggcccaagctattcatgagggatccgcccctatgatccaaacacctcccaccaggctccacctccaacactggagattatatctcaacatgaaatttgaatgggacatccaaactgtatcacccccaaaatgtaaagtctcatcacagtacatttggtaatggccaaaagagaaaccaaactaaatgtccgagaataaaaattagttacaactagatacacggaggcaagttttaaaaagtgttaaaattttaaaatgttgcagaatggtatctattggataaaatagtatttatgatttattaagtggaaaatacagtttacaaaataatatggtgtgatcccgaaaacaacataatcatgtgtgtataaatgcatagaaaaaaatctggaaagatataaacagatatttatagtggtctagggcaggggatggaattgtagatatttgctttttgttttatgtatatgtttcccataatgaaatgtattgtttatataattaaaaaatatacgaaactttgcttgggggacaacaaagcacctcatttgttaatttgggaaaatcttttattacaatctctgtaaggagttggttgctctctcttctgtactccctgattacataatgctcttctgagcacttttatttaatagcagaatggttgatatcattatttagttaaggtttcctctattatcgaacatctgagttcccagtacwctagtctccccttatctgtggttttgcttccaaggtttcagttatgatcaaccaagatctgaaaatattaaatgaaaaattccagaaataaaacaattcataagttttacattgtgcaccatcctgctgtatcctgtccaggccatgggtcatccctcttgttcagtgtgtccacactgtagatgctcccctgtctgttagtcactttgtagttggcttggttgtcagacctactgtcaaggtattgcagtacttatgtccaagtaacacttatttaacttaataatggcccctaaacacaagagtagtaatgttggcaatttgggtatgccaaagaaaagtcataaagtgcttcttttaagtgaaaacccaaaagtttttgaattagtaaggaaagaaaaaaatccatatgctgaggtcgctaagatctatgataagaatgaatcttctacctgtgaaattgtgaaggaaaaagaaattcacgttagttttgctgttgtacctcaaactgcaaaagttatggccacagtgtataacttttattaaaatatatttgtataactgttcttattttacttttctgttttatttttagagacagggcttcattctgtcacccaggctggagtgcaaaggtgcaatcatagctcactgcagcctcaaactctttggctcaagtgatcttcctgcctcagcctcccaagtagctgggactgcaggtgtgcatcactacgcccagctaattttttaattttttgtgcagatggagtctgactctgttgcccaggaactcctggcctcaagtaatcctcccgcctcggttttccaaagagctgggattacaggcatgagccactgtgcctggctattctattttattagcagtaattgttgttaatctcttattgtgccttatttatattaataacttaatcatagatagatatgtataggaaaaaacattgtatataaagggttcagtactatctgcagtttcagatatccatgaggggtcttgaaacgtatcccccacaggtaaggggggacttgtatttctctgttataaatatgctggttattctccacttgttgtgttttagtgccatcttctgctcttctctgctagactctgtgcctcagaaggtggaatttttcataaactattccagctggggtctcatgccagttggttttgaccaatgggtaacaccatcagtagattggaggatggaaaaggaaaaaaggttaggatatgtttcaccacctcttttcctgcttctggctgggttctgatggtggctttgtcccttgaaggctcctcctgcaaggcagccctgctccactgtgccagccttcactgggctctactaacgtgattccctccccttatttcttcaggcctagctgtgctaactcctaggtacctccatgtttcttgtttcctttcatccaaccctaaccctaacttctataaatagttcccgcaataaagtctcttcagctgaaacatctgagtggaaattgattcctgttatgacagactaaatatactaaaggaaacagttgatcatcatagaacacaaatcttttatccttactgcaacagggcctggatatttgcagattttatatccgagctttgaactatttgcaaggtaattatagagtgatttacacatttcctgaaacagggatttaagtttatgctgtgaggctagtgtttgggaatataacactctgactattctccacttctccggtagtttttgagaagtaatgctccattgcattttattgaagaaattatatatacagtacagtggtgtccacattttgatgttttcagtggaayctttaagaaaaagttcttacatgtaatctaacatacaaattagataaatgtcaaattgctctggttgaggcagcattggggaaaccttcttcctatctttgaagccgactttgggatgcctctgcagaaccccagggctccttggaacacagtgtgaaaacacagatttggaaaatcctagagtctggaagatatacccttcctaagtatcaagtgtctgttgtatctctttaggttagattcctagaatttcggttgacaatatgattttacctattcaagacactcctcactgtgaatgatgtgacccatctcatgactgcatctgttaccacatgcggaatgccaaaaaacctctcctgacttctcatcatacttttaattgcattttcattactgataaaatattttcccacgtctcttggccattgatactttcccttctcctccaacaccttctacatttttttagtcatactttcatgtttgaccatttctcaattcatcaatacataagaattccttgtatgatgttctgatcattatgctaatggtttaatgaacaacacattatgtctgtgctttcatgatgtccacagagtagcaatattgtagtcttattatttatcttgtttaatccaattaacaattgaattaatcatttgtcacaaccttttatcacatttgtggcaaatactttttcttagtttgcctcctagttttacgtgtttttattatttacaaaatttaaaaagtttttatttagtcaaatctctggatttttttcttgtttatatgcctaagatccttttaaatcaaagatcagatcaatattcatttatatttcctcaaatttttttttactatttactatttaagttttattgagcaaacattttttcccacaattctgtgatgattgatgtatcataaattaacttcttttatgcactaggccgtatttctggatcctctatttagtttcattcatccttctttggattactgtgtcaatggcatagcattttaataacaatagggtaatttcctgctcaaattcactttttcgaaatatttttaatatttatacctcgagatgaaatttatttactcttttcaagtgacttgtttgtgtttataaaagtaatgcattgcactattcacaatagcaaagacatggaaccaacccaagttttcatcaatgatagactggatacagaaaatgtagtacatatgcaccatggaatactatgcagccataaaaaagaatgagatcatgaagctggaagccatcatcctcagaaaactaacacaggaaaccaaacaccttatgttctcactcataagtgggagttgaacaatgagaacacatggacacagagaggggaacaacatacaccaggacctgtgggagaggggttgagaggagggagagcatcagaacaaacagttaatgcatgtggggcttaaaacccagatgacgggttgataggtgcagcaaaccactatggcacacatatacctatttagcaaacctgcgcattctgcacatgtatcccggaacttaaagtaaaaataaataaataaataaaagagtaacacattatgaagaaaaatttgtggaaactgaaaaatgtgaaaaagtataaagaaggaaataaaacctactctatgtactacagttgtaacatttcagggtataactttccagtcatctctctgtgtgtacgtatgtattgtttttgcaaatattactaaacatattgttttgtaagctgttgtctaatcaccacatatgagcacttcattgtcatgaagtattcctttgaaatacgttttttaatgacacattagccaagacctctagaataaggaaggtgaatggtagcaatgtcagtaggcaactctcaacccttctggactcagtcatatcctttcctcagtcatgtcaatcacatcaaactagaattgaagttaccaattgtcacacggatcagcactgtggggcttgccattgctccacctcataacttgaaatcagctactggaaacttgaaattggtgttgactgtagttcactggactataataagttttgcaggccgggtgtggtggctcacacctgtaatcccaacgctttgggaggccaaggcaggtggatcccttgaggttaggagttcgagaccaaccagcctggccaacatggtgaaacccaatttctacaaaaaatacaaaaattagccaggtgtggtgttrtgtgcctgtagtcccagctacttgggaggctgaggtgggagaatctcttgaactcaggaggcagaggttgcagtgagccgaaattgtgccactgcactccagcctgggcaacagagtgaagtcctgtctcaaaaaaaaaaaaaatagttttacagcacttgtcacctatatctcttttgttaggcatatgtaaaaatgacttgaccataggctattaggtagtttaaaaatgtggttgactcacaacaaggaccagacttgaactgataaagttgtaagagattcctaactccatgttgcacaatcttatttttgtgttccttttaaatcattaactaatataaatcattaatacctgccttagaaaagattgtataatgaaagcaaagcacatttatgattcagggaaggaatccttaacatttgtgatagaacatttaaaactctgagtgtttttaaggtacggtgcaaggttactaacctatgtaaactagtgggagtagaatgtggtcctgagtgatacaagtagataagatatgaaaagcaaaggataaatttctagtgtatgtcatagcggatatatttacagtcatgaaggcatgggaatataggcatctctctaaaagctttcattgggccttgagtttttaatctttattttaccacactctatccacacacacatatgcatacacacacaaactgcatatacgttaaacttcataaaatggaaattatcttttttttcccttacctttccacagaagtgttgtttactaaattcgcagatgttaaatatagtaaatgccaaagccttggagtttacgaatccttaggatttgaattccccyatctcaagggaattaaagcctgacatcgaagagtaaaaaattcagggaaggatcattggactgcctttcctgtgctccctctggacgttccttcataaactgccaaggccaacctctgctgattagatgtcagttctctgccgtttggtacaaaggttatcctctggagcaagcatgttatcaatgactcatttcctcccattcttaaacttccctagatattttcttgtttattttagttttccacagaccactctaaaatcaacttattcttggatcctccctgatacattttagtttgtaaaatgattttattgcatactttgctatgttgaatatttacatcctgattgcttaccccattttgtgtattttgctttcgaacaagtttgcctacctttatttttggaatattttggcagtctatcttttgatattttgtggcaagtatgagtatgtatttaatttcatagggaatagtgcatttaaaagtcatttaatttcttaagcattaaaaattgagccttaagagccttctttaaaatgtccaatacacagaatcaaattattttcctaaaccgcacccattctatctcttccacacctgatattaccaaatcattctggtaaaaacttaagccaacaagagactggaaaggcaagaggagacaagaagaggtagatttctcatatgctgattatactgtcttatgaatttgttaagtaatttccttctgtgatataaggtgtgtcatttagttaacactgtagagacattttaaatatatttgggaaaatgggaktgtactgttactcctaacacctcacaacttaaaaacaattttaactttcaaatcccttcatacgtattgagtatttgatcctaaatgcttttcacaagtcttgtaatagaatgtgccaacagtgaaatgtttgcttattgtgattaatctagagtttccacaaatgaactgttataaatggaaagaaaacactggaaaatcagaaagaacacacacggttatttttgaacttagttcacatagtttctttcttcctaacattccccctacccccctactccctcatacacattttttccttcttttactctttccacaaggttatgaagaaaggttaaatatagtcgtcccttgatatccacgggatgcttggttccgggatctccaacactcctcccactgtggataccaaaatccgagcatcctaaagcccagcagctgactcagcagaacccgtgtgtacaaaaattcagccctctttataggcgggtttcacatccctcaaatattgtatttttgatctgtgtttggttgcaaaaactccacttgtaagtggacccacgcagttcaaatccatgttgttcaagggtcaaccatatattacttgacatatgcggttaaattttatcttggaaatagcaacaaatgcagttattagttacttctgtgaggatcaaggagttaaatgaaagttggagacccactgcttgataccaagatgaggaaaaggaagctaattccctgttaccacttacttcactgcatctctggtctcccgttctcttygtttagacagtcttatctacggatgagtacagaggttttgactccagagtctaggagacagtgtacagcagcagctgtctaatttgttttcaaaactgggggaaaaaagctttgatattaccatttatcataaatctttcatcagctgaaaattatttcctacctcattgactttgaattttttttttgagacagagtcttgctgtgttgcccaggctggagtgcagtggtgcaatctcagctcactgcagcctctgcctcctaggttcaagcgattctcctgcctcagcctcctgagtagctgggactacaggcacctgccaccaggcccggctaattttttttgcatttttagtagagatggggcttcaccatgttagccagaatggtctcgatcttctgacctcataatctgcctgccttggcctcccaaagtgctgggattacaggcatgagccactgtgcccggcaactttgaatcttagtaacacatatcaaacattgctgtcttgccttccactgtctttgtgctctgagtttttgctcctaaatgtaggcagaaattatacaaatttaaattaattttaccactagtattgtgggatgggtcatttttcctttttaatttaggagtttgaggcaagagtttcaaaggagggtttctgaacctcgtaggtgaatatcagaaaacagaatatcaatttttactattttmtttttccttacctccttctttatctgccataggaaaagagaatatagtatttagaatagtagaaagcctcagccacttaaataccaggacaatataaatgagactgtaaaggactcaacgttttcccatataagtggaaaaacataccatttcaacactcatttgcttttatttccccttcctgaaagaaatatcaaatattgaggaatctagggtccatcagagggaagtatatatatatatatactgtaacataccataaaaaattatatactacttacatattattattgctatgtatacatacatgcaagcaattatagggaaacccagtggagcttaatggccataatttttacagaagatcttcttgattatacttccctgggacttgctaatatcagagaattgggttgttttttctcttttaaaaagtttatttacttattttagattcaggggtacatgtgcagatttgttacatggatatattacaaaacagtaaggtttgggcttctagcatacccattacccaaatagtgaacattgtaccttataggtaaattttttttaacctttacccccatctcaacctccccctttttggagtccccagtgtctattattttcatctttatgtgcatgtgtacccttggtgtagttcccatcggtaagtgagaacacacagtatttgattttctgtttctgaattatttcacttagaataatggcctccagctccatccatgttgctgcaaaggacatgatttcattcttttttatgactgcatagtattccatggtatatatataccacattaaaaaaaaatccattcatccattgatgaacacttaggttgattccatgactttgcaattgtgaatgtgccatcataaacatacaagggcaggtggctttttggtataatgatttctttccttttgggtagatgcctaatagtgggatggctgggttgaatggtaggttgagaaatctctatactattttctatagacgttgtgctcatttacactcccactaatggtgtataagggctgccttttctccacatccatgctaccatctgttgttttataattttttaataatagctattcttactggcatttttcatgtgtttgttgccttcttgtttgtctttttttgagaaatgtctgttcatgtcctttaccaactttttttttttttttttttttttttgttggcaagagatcgccctgctatgtcgcccagtgtagagtgcagagtgcagtggtacaatcatagctcactgtagcctcaaattcctgaagtgcccacttttttatgggatttttttgttttcttcttgttgatttgtttgagttccttgtagattctggatattagtactttgtcagaggcataatttgcaaatagtttctacaagagactgaaagggcaagaggagataagaaatagatctctcatgtggtgattatactgtcttttaatttgttaaataatgtccttctgtaatataaggtacctcattacttaggtaatactgtaggttgtcagtttattctgctgattatttcttttgctgtgcagaagctttttagtttaattcccatttgtctatttttgttttcattgcatttccttttggggtcttagtcataaattctttgcctaacccaatgtccaaaagaatatttcttaggttttcttctaggacttttatagtttcaggtcttacatttaggtctttaatcgagcttgagttaatttttgtctatggtgagagataagggtccagtttcattcttctgcatatgactagataattttcctagcaccatttaatgaatagggtgccctttccccgtggtttatttttgtcgactttgtcaaagatcagctggttgtaggtatatggctttattttggggttctctattctgttccattaatctatgtgtgtctttttgtaccagtactaagctgttttagttactatagccttatagtataatttgaagtaatgtaaggccatttggctttgtttttgttgcttagggttgttttggttatttgggctcttttttggttccatgtcaactttaggatagttttttttctaattctgtgaagaatgacattggtaatttgataggtattgtgttgaatctgcagattgctttgggtaggttattttaaggacattgattctttcaatccatgagcatgggatttttttcttctgtttgtgttatgtataatttctttcatcagtgttttgtagttttccttgtagagatctttcacctgtttagttaaatatattctggtattctattcttttctgtggctattataaataggattgaacttttgctttagttctcagcttgaaaatatttggtgcataaaaatgatactgatttttgcacattgattttgtatcctaaaactttactaaagttgttgatcaagtctatgagtctttttggaggagtctttaggattttctaggtataagattatgtcatcaatgaacaragataatttgttggaatgtccttcatttatttctcttgcctgatagctctagctagtaattccagtactatgttgaatagcagtggtgagagcggacttccctgtcttgttctagctcttagggggaatgctttctacttttcctcattcagtatgagtatcagttggttgtgggtttgtcatatatggcatttattattttgaggtatctagtttgttgagagtttttatcataaagggatgatggtttatatcaaatgctttttctgcatctgttgagatgatcaaatggtttttgtttttaattctgttgatgtggttaatcacatttattgatttgagaatgttgaatcatcctcgcatccctggaataaagtccacttgatcatgatgaattatcttttttatgtgctgttcggttgggtttgctagtatttttgttgaggagtttggcatctatgttcacagcgatattggcctgtagagattaatttttttgtgtgttcttgcctgattttggtatcggggtgatactagtttcatagaacatcatagaatttgtaaaccaacttatcaaacttagcaggacagatcaatttactcatttgggaatgttttaatrctaaatttaaatatttattgctaaagtgaggtcaagactgtatctacataaaatgaatatttttaaataataaagataatttgacattgcatactagaaatatgtaaattatgttaaatctacaaatggacattgtactatttctatgcaccaaggcttgtgttcttggaaaatacagtacaaagtctttataatgtcagtgttatgttgtgaatgtgttacgtatgtatttttatttcaatctttagagacatattttggtatgccatatctcaaagttgaaaaatgtattaagacttttttttctaagaaatttcatttggagggattagcttattgaaaacatggaagcctttcaatcttgtttgatgtggtatattcaccatctagtggcaactcactagaaatcaagtgcatgtagtaaagacaaaacttgtccaaaaggtattttgggaattagccataaggaaaaatgtggcagatatgtgtaatgctccctgatttccttaaaaaccacttttatatttgttacaaaacaactatctagtctcaagtgacacaatagaaaatgtaaataattatagagaagaagcgagtcactcgtattttcaccatcccccaaggataaccactgttaacattttgggtgtgcataaccactgttaacattttgggtgtgcatttctctaaaatgtttctgcacatgtatacacacattttttggtctaacagaactatctttatttaaaatttttccaattttataaatgctcctatgcttatcagctgctatttgaatcaacactctgagcatggatactggttgatgatctgagaaataagccataattgcctgccagacccacataatcttggaactcacgaacattcccagtatgtaaatggatgattaaactccatggcctcttgatccaagttggtccattcacagctcaaaaaagttacactaggctaatcagattgctctgctgagttcagaaaatgagaaacagattaatcaattagcaagtgtgataaaagcaaaatagaaatgtaaaaaataactatttaaaagcaatattatgagatgatgtcatgaagtagagttggaatcagacaagcgaaggcaaataaaaatctcttggaagtcaaattagtatgaaggtacagaaaacatatagggagatcagttttctctggtctgctggccctgcttcaaagtgatactgatagaagtcaaatccgattatgtcatctttctgcttaaatacccttagacaggcttcatagtccctagagacctgacccttccctacctctattgtgccactgtcaaaatgctggagtcacctattatgcttcatctgcgcagagtttctctatctaaaacagttacctttcctgggaagctttctctgattccaacactataacaggtggccctactgtgtgcttccatggctccatgtaaccttcagagcctaacactaacacggcagctggatcataatagcccctccatgattagacaaagcaccaaatagaagcagacattccgcaagtttgcatgaggttccatgcggccaacaagagagggagatagaaaggaaagggccccagatgtggctccccttccaaatactttcagttcccagtttaacctatgtgatcctttcaatatttccaccataatgcatgggtccagtcctgttctttgggttgcacaaaataattagcacaagcatacaaaaaggcaagagtaatattcaaaatactgaagagctatggtacactaaagtgccctgggggtaagtctgtgtgtgccagcctgcagcaggtggtctcagccctggaaggaacagcatgatggacaccatggatcccttctggtatgcaagcactatcacaaggagcgccatctccgaaaggatctgggcccactatgagcacatgggatggagtctagtgtagtcagctatggccagtcacctggcaggtgccaggttggtttcttcatcagtaccctcttgggaatcctttgggcccaaggaaataggttgtctggcagtgagcagtggctatttaccaatcattttggaagtatttcaatgtcttaacaatcacatagccatactgatgcttatctgatgaatactagccttgcaacagggctgatttaacttgctttggataccaagcaaaaaggaagggaaaggatccagaggatttcattacctaactgctggtacctccaaaaccttgggatccataaggatactcattcatgcccatagtgcaaaggaggaaatggtaaatcccttaagtgctattgggttacagctgtcacagtatcctataacaccattttgtgactgataaattgaaatgaacactgctgtttggagtcagggaatcaagttctattttccccagttcttgtctttgtagttgggcaatgccctacttctggcctttagttgtatgacccaggtctctttgtttgggaagacaccagggacttcttgcaggtggtctacattctgtgcatccatgcatcccgcagttggccttggccaaaggagtaactctgagacttccatgcttatgtccttggggkggggaccaatgagctcactgtgggtcagagaaccttgctctggcttggcaaggcacattggcgtcaaacacactcttcactcaaaagaccattttgtaaatttttagaaaaatcacaaatgcaaaggaaggaaaacgagtgggttgcagcacatttccaagaggcgtgaaaggggtagagggctgagtcttgagatttcctactcaccmcatgagtgaggaggcagggtagagttgactaggtaacgcagccagttagagttaggaaaaggcaggatctcagaagttcttccaggagtgggctattgggacaattaaaataagcatcttgcatttcattcctggcattcgcagacatccttgattggtggtagagcttcagggagagggggatgggacagggctgggtgtgctgaggggcctcagtccaacaagaatgactttttggcagtttctccagagccttcattgattgccaatcattgatttccaacaaaggaaagcaggagggagttacttttccatccttcagcccttttgctggctcctggataatctttcacatgttatgggtacttatatcaaagagcacttgcattttgacaaataaattttacaaccttattttttccacattaatgccaggtttatactggttagaagataacaaagttatttgtatacaacatttccttcataattagtatatsaaatttgtaagccctcttaccatgtcccagcattaggtttttgaaagattcagacaaaatataagatacagttcctatcctcaaggaatgtacaatttgagagagaaaattagcattaaattacgacraaaaatcatgtaagaagtaagtcataagccaagtgcagtatgtgtgcctgtagtactggctactgggaagactgaagtggaaggatcacttgagcccaggaatttgagtccagcatgggcaacattgtgagacttcatctcaaaagggtgggggtggggggacgggagagagagagaaagagagagagagagagaagtaatgaactatgaattagaagtgtaattgaaattcaggtaggagagttcagtagaggtcacagtaaaatactactgcagaaagataagtcttgagcctttaggatgaataaattttagaggaagataaaagaagaatggctttcctggtataaggaattgcatgggctgaggagcagtggcagaaaatcaacattatatactcagagacatccaggagagatgcatgkgacaggaataagaacaggtaaatggtaaataaggttggatagctaaggtgaagccttgtttctgttgcctcaaaagtcagtcagtttgaagggaatgttctagaccactgttgtttaatacagatasaatgtgagctgcacatgtaatttaactttttttttgagacgaagttttgctcttgttgcccaggctggagtgcaatggcgcaatctcggccactacaaccaccacctgccctgttcaagagattctcctgcctcagccctgggaggaacagcctgtagctgggattacgggcatgtgccaccacgcctggctaatttttgtatttttagtagagacgtggtttcaccaagttggccacgttggtctcgaactcctgatctcaggtgatccacctacttcagcctcccaaagtgctgggattacaggcgtgagccaccgtccccggctgtaatttaatattttctagtagccccattgaaaaggtaaaaagacacaggtaaagttaatttaaataatatattttttctaacccaatacatccaaaatactgttactttaacatgtaatcaatataaaaattttaacactgctttagtttttaaatgtaaatttttwaaaattcagttcctcagttatactagccacattttaagtgcacagtagtcaactgtgtctagttttggaaaacatagctatagacaattgtgagattatttagcagcttaataatacatcaaaagttgtatcttaggaaaatttcttttcagtgaaatgcagaatgaattgaagggtgtgatggttgagggacaagagagaagttagatctggaatgagttacaggtgggtactagaatggtagcagtggaggtgtcgagaggatagaacaaatctgagagatctttcaaagaaataactagtatggcttcatgactgattggcaatgaggaaagaaaaaaatgaaatcaagtatgatagccagccttcaaacagcctgaaaggatccttgtgtccgagtattcaaactcttgtaaaatcttctatactgtactggggttggtccgcgtgaccaataaaataaacagtagtgacagttataaggtactgtggcttctgtcttggtgcctctttctctgggctctttctctccagaggaagccagctgccacactgtgagcagccccatggagaggcccacgtgaaaggacctgtaacctgccaacaaccacataagtttggaagctgagcattcagatgactgcaatcccagccaacgctttgcagcctcatgagagaccctgagccagaaccacctggctaagtctctccctgattcctgagccttggaatctctgagaaacaataaatgttggttgctttaagctgctaaattttaggggtaatttgtaacagaaatagataattgaacaataattaaaaaaagacaatatcaaacacgaataaaaagataacccaatttggccaggtgcggtgactcacgcctataatcccagcactttgggaggccgaggcaggtggatcacctgagattgggaggtcgagaccagcctgaccaacatggagaaaccccatctctactaaaaatacaaaattagccagaagtggaggttgcagtgagcccagattgtgctattacactgcagcctggaaaacaagagcaaaactttgtctaaaaaaaaaamcaaaaaacaaaacaacaacaacaaaaaccccaatttaaaaatgggcaagaaaattaaaagaagataataagcatatgaaaaagtgctcaacatcattagacaccaggaaaatgaaaattaaaaccacaaggagataacaccacacacacaccagcatgactaaaatttaaaagcctgataatacaaaatgtggctgagaatatggagcaaccagaattctttatttaaaaattaagatacaatttacataccacacaattcacccatataaagtatatgattcagccaactgtcagcactatccattttagaatattttcatttcagtgtagtccaaccatcaccactattcaytttagaatattttcattactctaccagaaaaccctgtgcygcttagctgtcactctccaattctcctgcctcctctccaaccttaggcaacctctcgtctactttctatctgtacacatttgcttattctagacactcatgtaaatggcatcatataatatgtggtctattgtgactggcttctttcatctagcacagtgttttccatgtttgctcatgttgtaccatgtatcgatacttcatttctgtttcttgccaaataatacttcattgtacakatatataacttttgtttttacctattcatcagttgatggacatttgagttatttctacttcttggcaattatgctgccataaacattatgtacaagtttttgtgaggactatgttttcatttattttgggtaaatacctaggtatggaattgttgggtcatatggtctctctgtttagccatttgaggaactgccagacatttttccaagatagctgtactgttgtacatcaccagtggtgtctgaggattccaaattctcctcactaacacttgttttttaaaaaattatggtgggtgtgaagtcattgtggttttgatgtgtatttcccgatggctaataatgttgagcatcttttcatatgagtattgatcattcatatatcttttttggagagctgtatagtatattcaaatctgtcatccattttaaaatttggttatttaaattgtgatagttctttacatattctagatagccttttatcaaatatatcatttataaacattattcctcattctgtggattgtatgccaccagaattcttttccaaaatgatacaaactcttgaaaaaagggtctggctgtttcacataaaaccaaacattgatgtaccctataaccaagacattctatttatagatatttacccaagagaataggaaacatatgtctacaatagatttacacaagaatgtttacagcagctttattcataatagccccaactggcaacagcccaggaatctatcaggaggagcacagatcagtaaactatggggtattcatataatgaaatactactcagtaataaaatggaggaaactaccgatacacacgatatggacattttgctaagtgaaaaatgctatacaaaaaaagcgcacacygtatgattccattttatatgaattttcagaagatgcaaaactaattgatggtagagaaaaatcagactgggtgcagtatttaacacctgtaatcctagcactttgggagatcgaggcggggagatcttttgagcccaggagttggaggccagcctgagtaacatggcaagactctatctcgcaaaaaaaaaaaaatacaaaaattagctgggtgtggtggcatgtgcctgtagtcccatctactcaggaggctgaggtgggaggattgcttcagcccagggaggttgaagctgcagtcagctatgactgtggcactgtactctagcctgggtgatagagtgagaccctgtctcaaaacaaacagtggttctcgagacagaacagtggttgcttctggggcgggggttggggtggggaaggcagtggtaggcagagaatgtctgggaaatcgtgagaggaaactttttggggtgatgacaatggtttatatctaaggaattttggttacacaagtgtatacatttgtcaaactcagtgaatgtacacttaagatttgtgcattttgttgtatgtaaattttgtctcaaaagggaaaatatgtaaacaaatatttaactctaggtagtaagacacatgccatattttgggagaagtaaaacgatgcttgtaattaactttgaaatgcatttaaaaataaggtatttgggataaggaataaagcaagataaaatgtaaatctaggtagaatctatgtggtgagcacataggcgtttgctttaaatttttataattttgctatatgtttgaaaatcttcaaaatagaatgttaagataattttctttaaaggactgaggtttctagagcgggaagccagaagacgatagcatcattagaagaaatagagaatttaggaataggaaggacagcttggtggaaggtgtggcataactgacaggtcttgatacctacgaagtcctaagtaatttatgcacatatttctatatttcaatggatcttcacaaacacctctaatcatcagcacatccattttcagatgagaaaatggaggttctgaaaagctatataatttgttcaaggtcattaaactattagtgtgctaggggtaggactgattacataatttgcaggcctagtgtaaaatgaaaatttgtgtttccttgttcaaaaattattaatagcacagcattaaaacaagcacagggmccttctaacgatgaggccttgtgagactcaggtttcacacacatgaagctagggcggcaaggaagatttgaatctcagtctgactaacaggaaagcccatgctttttccagtaaaccatgctaggtcagatgaatggttcatttctgtgcgcagtgaatgaggcatgatggtgatgtcagatggtgatgtcctgtagccagttaaaaaccaaattgcaggtaaggagttccttctgtgatgtctgttgtctgtcctcttctcagtgggcatttggttattacatttgacctaggttagcaacgtaatttttgatcaaagtctcaacagtgtatctctttaaatatcaaggtactaagaataactcctttcatgtgtcctctctgaaatttgtcaccggatttcttctttctgataaatgtgtcaatacttaatagtggcgatgaaatgtcttctgctacacatctgggtggatctggaagcggaggaacgttttcctcaatttaacagtggatcctagtagttgagttaaatgttggtttcatttaagagtaagctactttctgaatgtaattatgcttccactgataacagcaacttttactttagttgggaagacatatctattatgtcttaatcagacaactcttgtgtgtctttgaggaagagtgggagatctgtaacttttcccaagaaaaatgaaaatgtctcaatcctaatattaaaggaattcggctgtattgggttaggaatgaataaactacatcgatgtcctttatcaactgtaattcctctacttgagtctcaaagaatactaagtttacgttttaataaaaaattactaaaattccagaaaagtctttcacatcagtccctgctggtcaaattggcaggccaagcctagacaacaggttgcgctttgggctaagacagcctctagagggcaatctcctttcctgcgaatccgccctagtccgttctatcctccctcttcccgctccgcctcagctcgctctccgccttctccctggcycggtccccgatcccttcctctccctcaactatttcctccaggcgtcgttcttgccccgcccttccccgtcgcgtagcggaaacggtcgctctggcttcctggaggacttgtcatctgtgcccggcggcgcaggacggcggtgggyggggctcacgcgaggcgctggaacrgtccgggagattctcgctctgctgctttagcttcggagtgtttggcgayggggcagcgcgagatgtggaggctcatgtcgaggtgagtgagagagcgaggggccaagggcaggctcttcagcggcactcgccacagtgggaaaagggccgggggtggagactgctggcctcgaagtttcgagtcgcgctcagaggcgccgctgtgagaccccaaccttggccctccccaagccccagcccccgtccctgtctttcctttctccctctagcatcttctttgcagcagcactctggttttctgccactctggctcttaattcaggcttgtccccacacgactttaattcttttggcctcagtttctttcctttcttaaaagttgggtgcagtctggggacacggacagatttagcttagcggaactgtgcsgcatgttttgtgcagccagcacacacaggtgctttgccagttgctgcacctctctctgcccgtggtgtgattttattcagctttcttgcatggctgcagcgtcagtataggcatttggaactttcaggctagtgttgagggacatttaacgtggcatgggggagcatgtttgcaaacattgtttaactttttgaaagtacccctcactgcgctttgagctcagcctaggaaatctggtagccatcatctttaggctgcatgcgccttaaacagcccactgcctggccctgtactgtcataccaggtagcagctgcgcccacttgaagggagaaccgtccttatttctttaaaataaggacgacttaaattactggattctttaagccttagagtttgccttctgggtttcctgaaaagggatggaggtgtttccttgacttaagaagaatagtttcaggggaaagtgtctagatgtctaacactgtatccacagacctaattctcagtaaatttttgttatacatttaagagttgcttttctgtttgtttttttaataccttaaaattagttgtccttgcaccagctcatggagagatttagtaaatgctaagaaaatcagtacacgtaatcgttactgccgctttttcagtgttgtcagcaaatagcaaatagagaaacaaactggaaagacatgtttgttaaagttagctgacttaggaaaggatctgtcatttccacaattcagcttggctttcttccaccccacgttccaagatgcagtactctgtaggtgaggccaggaccattttgggggctttgatctgagatgccttttccagactcagccctgaagtgggtattatcctagaaagcagaggccaagatggtccagtccacaataccctaacccacaactgtataagggaatagggtgccacggaaagtgtttctgagaggaaaaaaggccttgggccatggttgacagtgttgggcagccccacttgaactctggcctcccttggcttcttcggtactggcctacttttctaatgccactctccaccgcctctccttaccccagtgccagtttagctcttggacttttttttttttttggttcccaaatcatctstcttagggtaactcaaatttttgtctaacctgacttgccctgagctctaatgctggtcacaaccctctgaatgcctcagttgcacctcatatataaatttgcacttaagggctaggcgcgggggctcacacctgtaatcccagcactttgggaggccgaggcgggcatatcatctgaggtcaggagttcaagaccaggctggccaacatagtgaaaccccgtctctactaaaaatacaaaaaaattagctsggtgtggtggcagggccctgtaatcccagctgcttgggaggctgaggcaggataattgctggaacctgggagggggaggttgcagtgagccgagatcryrccactgcactmcagcctgggcgacagggtgagactctgtctcaaaaaaaaaaaaaggaaaaaaggaaaagaaaaataaatttgcacgtaagtataacccttactctttgtctctcttggcactatcattcttctagattctcaaacttacctaagttctcccacactcccaaaccttaacctcttcctgtggattcaggtttcaacagtagtctcaaagttaatcactttttcctcttcccagtgtgaattgtttctgtacaagattgccaggttaatctckctaaggttttacttcagtgcctgccattcttctcagaakctcacagaggtgcccttctgcttatgcaattaaatacagttttaccagtctggatttcacagatttggccccagtatattcatggatgaacaattacctactgttctgttctacttgctgggaagcacagttctaggcatttctattatcctgtagccactctggactacttggttttcctactgttccttatgtagggcccttggartctgaaaggagagcagataggaaacacataattagacaaaagtaatttttgattaccaattctggtaagtgtcttaagggacaagtacagttatgagagccagatttagatagggagagggagtcaggaagcctcatcagagaggttgctcttcgctgggtgtggtggttcatgcctgtaatcctagcactttgagaggccaacatgggagttcaagacaatcctgggcaacatagcaagaccccgtttctacaaaaaataagaaataaaaaaactagctgggtatggtggcatacgcctatccttccagcttgggaggctgaggtgggaggatcacttgagccacagagttcaagtttacagtgaactatgattgtgccactgccctctagcctgggcaacrtggaaaaacctagtctctaaaaatagaaataacmggaagagggtacttttaggttgttaataggcctcattgccttttccatctcctccatcytctgctgaactgtattgttttggttcttgctctttgcctgtcttctcttttacttctrgttagttgtttcttagttgatcaaaggctcaatctttgttgctctkttaggttgttttctgtgttaggaatcatgagcctgaatgcagaggctgagaaggaagcattgaaagatgctggctagatggcagcatgggggactggtgaactggagagagtgctctagagaggaggcagcttctcagccccagccattgttgcccttatagaatatagacccagggtttccattattactgatttttctggaaaacctggaaaaagtgcagttttaggtgaaatgtcttgatttttaaatgttagtagtttttttctgtttttcttctttttaatctctaccattccatccagataatgttagtagttttaaaactgctcggctgggcatggtgactcaagtctgtaatgccagcactttgggyggctgaggytggaggatcacagcccatgaatttgagaccagcctgggcaacatagactgtctctctacaaaaaatttaaaaatcagccaggtgtggtggtgtgcgcctgtagtcttagctgttcaggaggcttgagtccaggagattgaggctgcatttgagcccatgtatcataccactgcactccagcctgggtgacagagtgagaccctgtctctaaaaataaataaataaatagaatacaaaaataaaatgctgctgaccaataccacagttacagttggcatctttctggcaattagttttcaactgcagccttctcatttattccttacagaaagctgagagattccagtgtctcagtgattgtacatgcatgtggcataagatatacctttagttctaacttttctttcaacctctagtctctttcttctgttgactatttctgcttatgtcagtacaaattcaaattcaaaaaattgaatttgtatttcgtcctgcaaaccagctagcttctttccctgtcttttctatattctcctggttgtcctggcttgaaatcttaaagtcatttttgacattcctttccattgagtttttactttataaaaactcttaataatatcactcccttctgtttccacatctgctgttcttcatcaccccatgcctaaattattggcctcctggacttgattttctgctctgttcacaccttgcctacttctgggataataattttcactaagcactactttgtgatgtcttcttcctgcttaagcagtttcatgtagttgtttaatttcgtgaggccatgtttgttttattggataattgcaaaaagttcctgagtgataaagttctcatctaagacagttgtttatttaaacttcacgcatcataaccacctggagggtttgttaaacacagatttctgggccccacagtttcttgttcagtaggtctggggtggggcagagaatttcagtttctagkcagtttccaggggatgttgatggtacttgtccaagaaccatactttgagaataactgttctaaaaagccaagttgacatcagttgaaggaaataagcctgataaagttaattaagaaattagaagtagcaggccgggcacagtggctcatgcctgtaatttcagcactttgggaggctgaggcgggcggatcaagaaagaagtcaggagatcatgaccatgctggctaacatggtgaaaccccgtttctactaaaaatacaaaaaattagccgggcatggtggcaggcacctgtagtcccagctactcaggagactgaggcaggagaatggcgtgaacccggaaggcagagcctgcagtgagccgagattgcaccactgcactccagcctgggcgacagagagagactcaggctcaaaaaaaaaaaggagcggagaggtgcatgccctcttcctctccaccagatggcagttttggaaccaatagaaargaaagatcataaattcagaattacctggggacactgaattctcaattacattttgaggtataaaagctaatatcaaattttaagtgacagctgaatttgaattagaacgaatgggctgggtgcggtggctcacacctgtcatcccagcactttgggaggcccaggtgggcggatcacctgaggttgggagttcaagactagcctggccaacatggagaaacctcgtctctactaaaaatacaaaaataagccgggtgtggtgacgcatgcctgcaatcccagctactcgggaggctgaggcaggagaattgctggaacctgggaggcagaggttgcagtgagctgagatcgtgccactgcgctgcagcctgggtgacacagcaagactctgtctcaaaaccaaccaaccaaccaaatggaagcaatgtgattatatagtatttgacaaggaatttggttgtgtgtgtatatatatatacacatatatacgtatatatatacgtatatatatacacatatatacgtatatatacgtatatatgtatatatatacgtatatatatacacatatatatgtatatatacatatatatatattttttttgtagtaactggtccacagatttttgtgacctataaatattgtgtacagtggctttgtttgataggtttacattaactttctttgagttaaataaaattctgtcttatatataaaactgggacttggagttagtcctgagttctctttgtttacttgttaaaacactgcagttagtacttacactgttacataatagttgcaaatctggcaacaccctcttgaaccttgaacctacatttgggtactggcctcattaaggaatccaaagtcattctggatttttatgcttaaaatctccagaaagataaaattgagtcaagttgaaaacattttagacgtggtgttttagggtagtgtagttcacactttaaaagtaattatgaaaaccttatttagaaagtatccctaaataagatatgatctgtcacttcagtttcataattataaagtgttagtgttgatttttaatgacagcttcgttctttgaaatcatttaggggagcttcaaacaaagtatctgtgcctgtgccccacctccagagtttgatttaattggtcttgggtgtgacctgggctttggaatttttagcagtctccaggtgattyytttttttttttttttttttttgtgagacagagtctcttgtcacccaggctggagtgcagtggcacaatctcrgctcactgcaacctctgtgttagaaataccaaaattgttagataagtggtgttgtgaagaaaagtcagcacggaggcaaaagatttatcagcaaggccatttttactttctgcagaaagggtccccaattgcagatggaacaatggcgagagcacacttgacaaaggaaaagcagacatatttatcccttacgcatttgggttgtccttaatgctgtgtcctgcatccattggctggagtgggacctcacactcttaaactgatacccaatatgctaatagcctaaataggtaagtgtagggaagaacaaagaagttgcttatgaaaggtttaaggaagcaataacatttttaaataaggaaggggaataggctgtgagctcgaacatgcccgtgagcatgtccaatagttacgtaggatagggcttaacaaagagttactagcacaaagcaaggaggcatgaagaaagttagtctttaaaagaaattattatttctaacagttatgatttattctttaacaggaagaaaaactttgaagaggaaactttttactttctacactctgcctcccaggtttaagctattctcctgcctcagcctcctgagtagctgggattacaggcgcccaccaccatgcctggctaatttttgtacttttagtggaaacggggtttcgccttgttggccaggctggtctgaaactcctgacctcaggtgatccgcctgccttggcctcccaaagtgctgggattacaggcatgagtcaccatgcccagccgagtctccaggtgattctaatgtacagaccagtcttggaattactgggctacattttacttgtgagacaaattcaraaaatgctagttcaggaatgtgaattataactgacttaaacaaataggttgtttctctcttttgtatagtattattcaatttgaatgtaatataaaaaagtcatataaattctgaaaggcaagttggattacaaatatttttataaattcagtcatccaagttgttacaagtggtaactggtgatattgccttttgtgaaacctcaggctgttggtcttcatataatctcagagtattcttgaaaaattarcagattgtcagtttatcagttccattagttggtatatgtatctgcacatgtgcacagcccttatcaggctgctgcagctactgattctagctttgacctctttccatagatcttaaatttagcttcttaaacaaaaagcatgcatcttagtatattctaactatagtgtttttatttgcacatctgtcattacgttgtgggtttctcgagkgcaagagctatgtcttttaggamattttttaaaaagcccaaagcataatgatacaacttgatgaattttcacaaatgaaacatacctaaatcaccagcacctggatcgagaaacaagcattccagaggccctcctcatgcctctctcaatcactgccgttcccggtgttgtcttttactttcttattataatttacataaggcacttgagtacaccgttctgaagtttatagcttagtgaacttatacctgcagtcctgtaatcagcattgggatagagacaatttccaacattccgtgtttgttcatgccccttcccaggtgcccccaccctcaccattctcatgtccattattagtggtcactttggtcaagctgtgtctcaggctttgtattcctagcccaacaagcacttttaagacagcaaaaaatagaagtgtgttgtgtttattgttttgtagcctgctctccttttgtgatttgtcactacttttccatgttagtatttttagtggttgtgtaatggytgtattaatagacacagtctttaaaataatgctctactcttagacatttactttgttttcagtttttccatcctgtaaataatgtgaacatatttatcaatcagactttggtcatatttctgagatttccctagtgcaaatgcttgcggaattagtggattgaagggtgtgatcattttaaaggctgtggatttgtatttccagactgtttaccggaaaggcagtaccaatttatacctctctctagtgtctgagratgctgtttgtattgcatctttaacaaaccttttttcttaagattaatgactttattttttagagtagttataagttgatggaaaaaatgacctgcaaatttgagcagaaaagtttgacaaataataaggacatgtatcaaccattacagtatcatacagattagtttcactgccctaaacatctcctgtgtttcaactgttcatccctccttccgtcccccaaacccctggcaaccattgatctttctactgatttcataattttgcccttttcagaatatcatacagttgaaatgagagtatgtagccttttcagactggcttcttttgcttagtagtatgtatgcatttaagtttcgtccaattttttttgtggcataatagctcttttctttttttcatggctgaataatattttatatggttgtattgaaattggtttgtcttccaaccattgaagaacatcttggttacgtccacattttggcagttatgaataaagttaccataaaattcatgtgcaaagtggctgtaccatttaatgttcctaccagcagtgaatgagagctaaaccttttaaaactttttgttctggtaataccttttagaagaggctgaaacaaaaggtgatatactatttgtcaactgagacatgactacccacattactgttctcattgttttccacatttgtttcaggtttaatgcattcaaaaggactaataccatactgcaccatttggtaagttattgtgtttgttttgctggcattatttgtatgtgtaacttaaaatgtcattgttagagaagtagagaaatactggtatggcagatttccttgaccttaggtacatcatggttctcaactgagtgtcaagacatggcacacgcaccttgtaggaggtggcataagattatggttaaaaccatggttcttacaagtcagaatgcctgagtttaaataatgggttcactacttaatcttgggtggattacttggtctcttacagcttcccttttgatatgtataaagtgagaataataataatatctaccttagagtgcttataaatgataaataagataattgtattaatcagtgttctctagaaggacagaacttataggacatatgtatatatgaaagggagtttattaaggagaattgactcacatgatcacaagataaagtcccatgataggccgtccgcaaattgaggagcaaggaagccagtgatggatcagtctgagtcccaaaacctcacaagttaggaagctgacagtgcagcctccagtctgtggccaaaggcccaagagcctctggcaaaccactggtataagtccaagagtycaaaagctgaagaacttggaagctgatgtttgaaggcaggaagcatccagtgccggagaaagatgaaggctggaagactcagcaagtcaagtccttccaacttctgcctgcttttattctagccactctggaagctgattagatggtgcccactcagactgagggtgggtctgcctctcccagtccaccgacttgaatgttaatctcctttggcaatacctgcacagacatacccaggaaaaatacttttcatccttcaatccaatcacgttgacagtcaatattaaccatcacaataatgcattaaaaaatctagcatagtctttgggaggccgaggtgggtggatcatgaggtcaggagatcgagaccatcctggctaagactgtgaaaccccatctctgctaaaaaaaaaatacaaaaattagccggacatggtggcgggcacctgcagtcccagctactcaggaggctgaggcaggagaatggcgtgaacccgggaggcagagcttgcagtgagccaagatgcgccactgcactccagcctgggcgacagagcgagactctgtcttaaaaaaaaaaaaaaaatctagcatagtgcatggcatatgacagtcattttatacatgttagctattactgtaatggtaccttgcaaagttaaatatccaaagtttatcagattataaggaagaaataaattttattcacttttatatctcttatagaggctgacaagtaaattgcacataaaaataacaagtcatctgatatcactgtattctaggtggtattgtaagtacttgtcatgggttagctcagttaattttcatgatagtcctctggggtacatactacagatctcttatttgcaattctaaaacctcaaaaccaaaagttttttgttagtttgtggtaaatacattggcaaaatctgacctggatgtacttgaagctcttttagtttttatcctaactagtgtaaacacttatggtttggtgcataaatataaaaaccctttattactatgtaatcaagtattacaaggacctagacttctcttggggtgttttatgaagtatttagtatgtactattttccaaaatctagaaaattttaggaattaagggattgtagccttatctctatataacagggcagaaattgagggacagggaggctaagtaacatgcccaaatgtcacacagctagtaattatgaggtgtgatttgaatcctggctatctgttttcatagatttactttgtacgcyctatagcctctgacagagtgggcactacgtaactattgcaactgtgcctctgttaagcctaagtggagatggggatacgaagcctggcatatcccttcctaactgtgttagtccattttctgttgcttataacagaatacctaaaactgaggaatttgtaaagaaaaggaatttatttcttatcgttacggaggttgagaagtccaaggtcaaggtgttgcatctggtgtgggccattttgcaggtgggacctctgtagagtcctaaggcggtataggacatcatgtggcaagggggctaagtgtgctagctcaggtctgcctcttcctcttataaacctacagtcttactcccataataacccattggttcattaactcattaatccattaatttatgaatgggttaatccgttcatgtgagcagaactgtcatgcccaatcacctcttaaagcactcacctcttagtattgccacagtgtggattaaatttcaacaggagtttgggagggggcaaatactcgaaccatagcactacccttacttattttattcagctgttatacatggaggttgaggagtttcctagaaaaaaaactaggagcagtgtcagtgactcagacataagtacaaaggtggaatgggaagacatgacagaatccagatcatatgaggactatggtgacatggggcagaagacacctggaaggaagataaagactctcagggcctgggggttgaataattctgaatctcagtgtttgcttttatgagtgcctcaggggtagagaagatgtatcccaagcaattcttctgtggcctttctgagacagagagagagaaagagaaagagagggagagatcctttttatttcatggtggagtgatggaagtatgccattgatggcagtattgcaggcagagttatgagaagtggacaggattattttgtgtttatagtgtgacattcacggtgacccttccaagatagaaggtagggaatagaacccagaagggaggacagaattctgcatttctgcatataaggtttgtcaagctaatgaaagccagtggaacctgtcagtgaggcctcatttctatctgtagactaatttggacatattcttactatgaaaatattcagggaaatattttttttcttctttctccataatctattttaaactctttttttgtttgttattgtttgagacaaggtcttgctgtgttgcccaggctggagtgtagtgacattagcttactgtagcctcgaactcctaggctcaggtgatcctcctgccttagcctcccgagtagctaggactgcaggtatgraccccaaccccagctaatttttaaattttttgtagagatgaggtttctgtgttgcccagactggcctcgaacctctgggcacaaatgatcttcctgccttggcccctcaatgtgctagaatgataggtgtgagccaccatgctggtctattttaaattcttaaacagcattttaatttaatatgcaaaagctcatttaattttgacctggatatggagaaaacttctattttcattttctttttgtccttttagaaagtagtattcagtattgagggtatagtgtttggagtgcatgaaatgatactgtgtatatcattttcatgacagtacacatgttcttattatgatgtccagatggtgtcctagaattattaatagtccttttaatcctatatctgaatctcttttcctccacatctagattcctagttcccaagaatatagtagatgatagtgttttagtccatttgagctgctgtaacaaaaccgtaaactgggtagcttataaaaaacaaaatttatttctcatggttctggaggctggggagttcaagatcaaggggccagcggatttggtgtctggtgatggccagcttcctggttmatagacagccttgttggccatcttatctctctgtcctcttgtggtagaaggggtgaagaagctctccagggtttcttttataagggcgttaatctcattcatgagggctgacatgacctaattacctctcaaaggtcccactcttatgccatcaccttggaggttaggatttcaacatacaaattttggaaggatgcaagcattcagtctgtagtactatayaagctaatagttagcttcttaatatttcatgggtgctagcagaagacgtgacactcttggattagaaaaaatagaattttttatgagtggcacagcgagcaacactgagcaaggtttctcttgcttaagcctcaggggagtgatacagaggacctatatgagtgcctgcatatgcagtatattgcatgacagtacaactgtcatgcaatttgggaaacctgctggttttagtaagctgtaaataagtctgctgtctgtcccagaggaagacattaccttcttcttcatggtggctcacagcaaaaaccttcttcttcgtggagtctacagcaraagacctttttcttcatggtggctaccttgaaaatgacccaggcaaggagtggtcaggcccttgggttcatggcatacctattcatagsacacccagcagtaaggtacagagaaatttccagcgmttatgccagattgcatccctcagcggctaaattccatttcttgacctaggtagtggttacaagagttttgcattatagtaattgactaagttctatattatactttcggtggttgtctgtgtgtgtgttttgttttaccatagaaacatagaaaaaaaataagacagctttatctgtagtagtgacatgggaagatgaccatggcaagttgctgaattaacagtgggaggtgcagaataaggtatggcattccatttttgctaatagtttatggaaaagtgcctgagaaagatagacactaaatcagtagtgttgcaaaccagggcaactttggttttcaccattttacctgtggttgcccccttaattaaaaacaaaaaatcttactgagattatgggttcagctggatgtgggaaatctctttattctgcttattaagaaaatgttatattttattacctgactttatagaaataagtttttaagataattttttattattttacagttttagatctattgaaaagttaaaaagatagtacagagttcttacgtacctctcacccagtttccgtttcccctaatgtgatcctacattgctattatggattgaattgtgtcccccaaaattcatatgttggagtcctagtccccagtacctcagaatgtgaccttatctggaaacagggttgttgtatatgtaattaaggtcataattgagtagggtgggcctcaatccaatatgactggtatgcttataaaagggaaatttgcagatagtcatgtacacaggataatgtcacgtgaagattggagttatgctgccacaagccagagaactatccgaagccagaaaagaagcctaggatagttccttccctagcaccttcagcaggagcattgccctgctgaccccttgattttagacttgcagccttcagaactgtgagacaataagtttgtgttgttcagactcaaagtcatctcggactcatcttgctcattctcatttccagtgaacttccaagytctgtcaaacgtttccttaaaaggattcccccctccttttctttctattcctactgttaatcctctgtacctaatcactctttaatctcttaactggttcctctacaacctcaaccaccgcattttgcctcacatactaatgctagcatattattttttaaatatattacaaaattacattgaaaaagttktagagactttgttttgccaatggaataaagattacacaagaccacacagagagacttaaggctagaacccaggattttttgtgcttcaattctaacactttttttactaaagcatactgtgtcttataaattccagcacagggatacattattcgtcctattttatctctaaatgctttagttctttatactttgttttaatctataagttgcttcagtttcttttggaggtagaagagatcataaaacttggaaatcaaaacaaatgttggttaaaataaaactgctggttttacaaaaaaaataagtttgtgttgtttaagccatttaatttgtggtactttgttatggcagccctagcaaactgcctactattcttactatggtacacttatcaaaactgagaatattggtttcgtggtttgaatatttgcccgctccaaaactcatttcgaaatttaacccccagtgtggatgtattgaaaggtaaggcctttgggaggtgattgggtcacgaggcctctgtcctcacgaaggattaatccattaattgattaatggggttatgggagtgagactggtggctttataagacaagtaagagagatctgagctagcatgcttagcttccttgacatatgatgccctgtacctccttgggtctctgcagagtccccaccagtaagaaggccctcactagatgtatccttttgactttggacatcagcctccataactaaggaaaagaataaattcctttttttttttttttaacaaattacacagtttcaggtattctggtgtgagcaacagaaacttaactaagrcaatttgtatattactgttaactccagactttatttggatttcaccagttttttttcattaatattctgttccagaaatcaatgacactgcattcacttgtcatgctttttagtttcctctagtctgtgatagtttctcaacttatctttccatatttttcatgcccttgacaattttaaggagtagtggtcaggtagcctgtagaataccatctcatctgggcttgtctgttgtttttttcataattaggctagagttaaggtttttggcaagaatatgacagaggaaaagtgcccttctaatctcatcatatcagggagtatttgtgggttttgacaaatgcatcagggagtacatggtatctacatgacatcattggtaatgctaacttttatccttttgtgtaagtgccatttattgttttccactataaagttgctatttttccctttcatgctctgcttattgaaagcaagtcagtaagtccagcccaaactcaaaaggtgaggggacaaagctctgtctcttggaagggagataactacatatgtcatttagaattctgcgaggaagattatcttttctcctccatttattttttctgtgtggactcatggatatttattctttgggctatcatctaatatcamattattgattgcttcattgttccagttctggccattaggaattccttcattttggcttttgtatttctttcatatgaccccatccttttaatttttttttttttttgaacatttcctttctggtgctagaaggtatgctctggactcatttcgtgttttccctatcttagtgctggaatcagccttttctctaaggagctctggttgcctttattggagaattgcatttggaaatcaagatctagactctgggagtgctctttgctgctgagtgtcatggctttctctcagaggatagagctagggtaatgtatgtatctgtaatagaatgcatatacactatgtacttacccatgtattcatgcatatctctaattgtttctgtactttttctgtatatgtgtattaaactaaacatgagttcatagtgatgtctttgtctttaatccagtaccataggtcagggttcattctgtctttcccttcttgttctatctgtaactctactcctgacagtgagagccaggctccattacttactaatttaaacctagtatatatgcaaagcagttgcagaattgttacctgctcctygctaccatgaaaagccatgttgatagagtacactgtygatgtacagttcctttatcatccatacagttttcagtcatttcactgatttccaaagttagttagcttccttatcaccacagtcacttcactgaggttatgtcataatgtgtaattcagttaggttctgagaaggaaaaaatcctgttccccccaatgactagactcccctctcagccaaggggaccccagagaaagcttaaaaatgagttcctggccaagatggartgagagcttggacacaccttgtaatacctcctcccttattagccaccattagtctttcttccctaagagttaaacagaaaccagcygaaattttcccctgctgatttcaagcaactacctgactgttgttccttctttttgcagttttgacacagcaactgaccagcattccttcctaataaaagaccactgatgatggagtggttctggccagtctatgtagggaggctgcacacagtgggcctccatttcctctgcttcatcttttgatgtatagggcctaattgtgatactacttgttaagtctccaccccagagttaacatggcatgcatgtgcatacatgttagcttactatacatgcatgtgcctcctgttcgtgaatattcatagcccctcctgtaagctgttgaatatgtttatgtagccagccagttcagcataaattcctgtttccctcactagaagtgcttgctcttggcttctgccagaggctgtgtttcccagcctgtgggatggtcagcctgcaggctgcagccctttaggagaagtaaagctctcttttccaaatttatgaatcttctgattcttcagttgacagttcatttgtcatagtctgcattccatattggaattccctgatatcctaggtaatttttttgctttttaaaagatagctcatgctatggtttgaatgtatgtgtccctccaaaatttgtatgttggagcctaataccaaatgtgatggtattaagaggtggggctttttgggaagtggtaagtcgtgagcaccccactgtcacrggattagtactcttataaaagaggttgaagggagtcaactaggcgtctttgcccttttccttccttgtgccatgtgtggacacacagaactcatgcaaaatggggtctcaccaggcactgaatctcgaacttgaacttgccttgatcttgatcttgaacttcctagcctctataactgttagaaataaatttctgttctttataaattacccagtttaaggcattttgctgtagcagcaggaatggactaagacagttgtgtttgtgatgtacatttctgtgagttttgacaaatttataaagcatgtacccaccaccccaatacatgcagaggagttccattcccctaaaattttccatgcttcccctttgtagtcaggcactactccttcccccaaytccctctccctcctctggggattgagattgactgcctttttaaattttccttytcttttgtccccacttccttttcttcagctgttgttgacaaacactaaggtccttaggctatggtcttgaagtgcttctcttttgagatgaagacttttatttagtaggcctctatttccttcccccactagaatgagactttatcatagacctagggctacaagcttgagggttttccttcccctccctgcagataaagccttttgttctgtatgggagataaagggaaaggatttagcagtgacctctgtttccctcctgagccagcacctctggctccagtcatcctagcctggttgggttccaggaggaaagttcagcaagagagtgggaaatgttaactaagattaacattttaagttaatctttcttatggcttatgcccctggtaagcaggggtggctgcttcacttccatttccaacattcgtgtagatttctcttttgactaacttacagccattcagacagacatgtgtctgatctttgacrarcctgactaatggagcaatgacagaaggattccttattcaataaatggtgctgggataactggctagccagatgcagagaatggaaaccggaccccttgcttacactatatacaaaaattatctcaagatgaattaaagatttaaatgtaaaacccaaagctgtaaaaaccctggaagacaacctaggcagtatcattcttgacataagaacgggcaaagatttcatgacgaagacgccaaaaacaattgcaacaaaaccaaaaattgrcaaatgagatctaattaaagtaaagagcttctggacagcaaaagaaactatcaacaaacatacaacctacagaatgggagaacatgcaaactatgcatctgacaaaggtccaatatccagcatctataagaaacttaaatttataagaaaaaaacaaccccrttaaaaaatgggcaaagtacatgaaaaaacactttttagaagaagatagacatgcagccaaccacatattaaaaaaaaaaaagctcagtatcactgatcattagagaaatgcaaaacaaaaccatgatgagataccatctcacaccagtcagaatggctattgttaaaaagtcaaaaaataacagatgctggtgaggatgtgcagaaaagggaacgtgtatacactgttgatgagcgtttaaattagttccaccattgtggaaagcggtgtcgcgatttaaagagctaaraacagaactgtcattcgacccagcagttccattactgggtgtatacctaagggaatataaattgtactaccataaagacacatgcacacgtatgttcactgcaggatcttcacaatagcaaagacatggaatcaacctaaatgcccatcagtagcagattggataaagaaaacgtgatacatatacaccatagaatactatacagccataaaaaagaagaagactatgtcctttgcaggaacatggagggacctggaggccatcatccttagcaaactaatgcaggaacagaaaaccagataccgcacgttctcacttataagtgggagctaaatgatgtgaacacatggacacaaagaggaaaacaacagacactggggcttacttgagagtcgaggataggaggagggagaggagcagaaaaaaataactgttgggttctaggtttatgtgacagtctgtacaacaaacccccacgacatgaatttaactatataacaaacctgcgcatgtaccctgaacctaaaataaaagttaaaaaaacaaaaacaaaaccttaacactgtttcctagcatttagaaaaataaaagccatgtgtatctatctgtgaaaaaaaagtgtcagactgtttcaggttctgtaagtttatccttccccagtatgtttgtttacttatactcaagaatatatcagatatgtgtgtgtgtgtgtgtrtatcagactttgatcattgtcaatgtgattacaaaatatatcttactgttgctaaagtttttatttgaatttytcgttagagaaactgagaaattcaaatgaaattgaaaagacacaactttttctgttgtttaagaattgttcctgtaactttaagtgaatataaattatttctatttttatctgataattttaacaaaaattaactccaatattaaatatgcaacttgatttcataaaggagaacttaaacgttatataaacgtgttgcttaatgcagtcaaaatatgtacttctaggttctattagatttttgctaataagtgtgctgtttagttttaattggcattctccagttaaaattttccaatttcaattttcaattttacattgcacacttttcccatgygaggttttaagtgttgcctttacataaaggaatgtgttragaatggtggtgccatcttcaacaaacctgacaaaaacaagcaatggggaaagcatttcctatttaataaatggtgccgggaaaactggctagccatatgcagaaaactgaaactggaccccttccttacatcttatacaaaaattaactcaagatgaattaaagacttaaatgtaaaacccaaaacagtaaaaaccctagaagaaaacttaggcagtaccattcaggatataggcgtgggcaaagacttcataactaaaacaccaaaagcaattgcaacaaaagccaaaattgacaaatgggatctaatcaaactaaagagctkctgcaccacaaaagaaactatcatcagagtgaacatgaacaggcagtctacagaatgggagaaaaattttgcaatctacccatctgacaaaggtctaatatctagaatctccaaggaacttaaatttacaagaaaaaaaaaacccatcaaaaagtgggagaaggatatgaacagacttmtcaaaagacgacatgtatacggccaactaacatgaaaaaaagctcattattactggtcattagagaaatgcaaatcaaaacctcaatgagataccatctcacgcagtcagcatggcgattattaaaaagtcaggcaacaacagatgctggtgaggctgcggagaaataagaacgcttttacgctgttggtgggagtgtaaattcaaccattgtggaagacactgtggcgattcctcaaggatctagaaccagaaatactgtttgaccccacaatcccatttctgggtatatacccaaaggattrtaagtcattctactagaaaggcacatgtacacatatgtttattgcagcactatttacaatagcaaagacttggagccaaaccaggtgcccatcaataatagactggataaagaaaatgtggcacatatacaccatggaatactatgcagccatgaaaaagaatgagctcatgtccttcgcagggacatggataaagctgtaaactatcattctcagcaaactaacacagggacagaaaaccaaacaccatatgttctcactgataagtgggagttgaacaatgagaacacacagacacggggaaaggaacatcacacactggggcctgttggggggtggggggcaaggggagggagaactttagaacaaatacctaatgcacgcagggtttaaaacctagatgacaggttgatgggtgcagcaaactgccatggcacatgtatacctatgtaacaaacctgcacattcagcacatgtatcccagaacttagaatagtgatgccatgagtcctgatggttgggtatagcagagtcctgggaaatcacagtatagttaaaactgtgttccttacaggtgttttattagttaatactgcaaaatacataagcagtgagacctggtgattaagttatattgtgcaaggctttaagtcagtatacaggaaacttcttcacaattattaagtmtgtcatattataatctggctgcaaactacttattctgcctaccctctcaccactcgtttcctcagccagcctttgttccactaatgttttaacatcttaacatttccaaatagtcattgcttatggcttagcatgtgctgtttcctttgcctggaattctcacctcccctttttcttgggatacatcaagccccaactcaagtatcrtctttgttttcaagttgaccatagctacaatagtcagaattatttgccctctcttattcatctttgctttctcagtatgtaacatagaacttgatatacagtagtaaattaaaatatttaagggtatttcaaagtccaagaaattctagactgggctctatataataagtcagcttattcarttagctcagaaataaaaatttaggaggtgtgtatgatttgctttggaattgttcrtctacataatctaaataacttcagaaacttataaggtgtacctagttattctttcctttagttaccattaatatgcaagatttgcatttgatatgtatgttttgatgttggcttgtgataaaaacttaaraaattttgtcataaagttattctttgtttatacagagaatgtccaagcacacagatgcagcagaagaggtgctattggaaaaaaaaggttgcrcgggagtcataacactaaacagaccaaagttcctcaatgcactgactcttaatatgattcggcagatttatccacagctaaaggtttgtaattttcttattgcaattatayggattcttttcaaagtatatcataataggacatttctggtattttctcccatagaatcacataattctctgggatatgcatctaagtaagccccatcaattcttgaggtttcagtgcttcccctgtgcagttattcttgagcatccctggtgatagggagcttactgcctcctgagacagactctgacttttatatagcactgatttgtttgcaagtttctttttgtgttctgtcactctgtatttctctgacctttaaaccaatgatactggttctgcctctgagaggatgagtgtacaaatcgaatctgcttccacctgacggccttttcatttgaagacagctgctttttttttttttttgagacggaggagtctcactctgtcgcccaggctggagtgcagtggcaccatctcggctcactgcaagctccacctcccgggttcaygccattctcctgcttcagcctcctgagtagctgggactacaggtgcccgccaccacacccggctaattttttgtatttttagtagagacggggtttcaccgtgttagccaggatggtcttgatctcctgactttgtgatctatctgcctcggcctcccaaagtgctgggattacaggcgtgagccaccgcacccggccagacagctgcttttaaactgcctgctttttctcagagaaggccgtaaactttcctaagtgagcagcatggaatagtagaaaaacaggacttaaagtcagactgtctggtttgaaacgtggatttctatttattaacagtgtaggctgggaaagttaatctctccatacctcaaatctcctcagttctgaaatggggatgatgatatgtaaagattaagtgaatagtatatataagtacctaatacagtctgccatgtagatgtttaacaaatactagttttcccctggctaccaattccttaattcttcttttgatgagtctgtcttccattcttatgtttctgtttgagataccattataatatgtcccaaaatgtgatacatagaaataagccaaatgttgcaaatcaragttggaccagagtggaagaaattagaaatgttcatgttagaataacatctctattaatgtaattaatgtagtccggtattgcatgaaccttttggacaatcacgtctktccagctacatcttccttgtgcgttacatatttattctctagtacaggttgaacatccttaattcaaaatgctataaaattcaaaaactctttaagcatcaacatgatgccacaagtggaaaattccacacctggcctcatgattgctygcagtcaaaatrcaagtgcacaacacactgtttattcagggtccctatgggaaaaattaattactttcaggctatgtgtataaggtggatatgaaacataaaggaattcccaatccccaggatatctcatattgtatatgcaaatattctaaaatctaaaaaagtctgaaacacttttggtcccaagcatttcagataagggatactcaacctgtatagattgatagaacccctgttaagttttctgtctgtgggtaactaatttttcatttcgtccattgttctggactttcacattttcatcrgctcttgattctttcatcctacttatttattagctgtctttaccaatcccaaaggacttggattttttatattataagtggtttcactatgttacttacgtattaagagtaagagagccctgtatcagcacagtagaaaggttattgctatatttatcagcagtctttgggttgatttgttctccaaatttatacgtttatgtaacatattattattatgcccttatttgttcatcttggtatcaaagttatggcaaagatttcaggtgccatcttgaaatttggatcacacagtgtactcatctagcaacatttttgaaatagcctctactttatctgggaaaagcatatgaagttcatttgataaggaatgggatgagattcgttcttctggatatcccttacagaagaatatgtactgtcacaaacacatatgtatatgaatatatgattgaatatatgtgcatatgcatataactttaatgagtttgtgtttatartatgcttataccatcttctgttacatttgaatagaagtgggaacaagatcctgaaactttcstgatcattataaagggagcaggaggaaaggctttctgtgccgggggtgatatcagaggtaaagacttttccctttcacctgagtgctctttcccccyactagaactgatcaagtattgtcaaatttttgtaataatttataatttgctttactttttagaactttttattataaagttaatacattcttaggaaaaagaaaaatttaaagacttactttctgcagttagtattagcaaatgagaatagcagatttttttttctcactacacaaatacccatttgaaatttaaatatgttgtctctctccctgaatcatcacaaacaaaatgtccagttagggtatatgggtccactttatattttagaagagctgatattaagcagttctgttggtcttataacctgactatctggccatgttgacttgccattcttcaaatatgacatgctctcacatatttccataacttktcctatgcttcccactattcaagatcccaaagcaaccatcttctatgtacttatttatagcatttatcctgttgctatatatatatatatatatatatayacacaaaatatatattacaaaatatatattgtaagtatattttacgtgtttaaacatgctgagataaaaagagaaactctctttatttttcataattgttcaggtcagtctgtctatacacatttaaatgttaaagacaaaagagaagaaatgtctgttctcagcatcagtgtcatgtatttattataatcactataattgtccatattatatgtacagtatattgaaaactttttacattttgtatcttgtttcttgtggatttggtagggttcagggatggtttttttctttgtgttttaattttatatgtttgtttgtttgttgtattaagacaacagtctttgggcttgttcaccaaacttacgtaaaccattaccttaggaacaggaaaaaagctggattcaggacataatttcaaatacttattaatgaattttaaaattgcagtttaatgaaaactttgattacttaaactgatctgttaactgaattgtttttgaatctgttgttttgcctacaacatgcgtttttttattattttatttatttatttatttttttgagacggagtttcgctcttgttgcgcaggctggagtgcagtcacgtgatctctgctcgctgcaacctccacctcccaggttcaaacaattctcctgcctcagcttcccgagtagctgagattacaggtgcctgccaacatgccctgctaatttttgtatttttagtagagacagggtttcaccatgttggccaggctggtcttgaactcctgacctcaggcgatccgcctgcctcggcctcccaacaacatgcatatttttaaaatactgtttttcagccttgaattagcctttcgtctggcctgtgatcgtcagtttacaggtgggcagagctttatgtattgagtttattagctttttctgactgagctatttctgcatataggcctaattttatattgatgtttggaaataacagctacaagttgtagaattattgtagtttacacatataaagcagtggattcaagtccaggaaatgtaatttcttgaaagattatagtccaagacaataagtggacactcagaaaattttcaaaaaatgattgtgaaggacatttaattttaatttagatggaactaattgattagaataaaaattagatcagaaaaagatttgaaggaaatttgagaaggtttttgaggtaaaagagcttcattccaaaggcgataaaacttacattcctttccttttagaattggtaagcagtgataagagctgaataaaagatgataaacaaagatagtcattttttgtttgtttgtttgtttgtttaggtataagtgaaacctcagaatgataaaagtaggtgtcagatctttcttttaaaaaccagtaaaaggactgggtgcagaggctaacgcctgtaatctcagcactttgggaggccgaggtgggaggattgcctgagctcaagagttcgagaccagcctgggcaatgtggtgaaaccccgtctctactaaaatacaaaaaagaaaaattagctgggcatggcggcatgcgcctatagtcccagctacttgggaggctgaggcaggagaattgcttgaacctgggaggtggaggttgcagtgagctgagatcatgccaccgcactccagcctggtgacaaggcaagactccgtttcaaaaacaaacaccccaaaaaaccaggaaaagaagtcgacatatggaacattttgaaggaagagatatcagaattctagagttaggaggcccgagccggcagatcacctgaggttgggagttcgagaccggcctggccaatatagtgamacccctctctactaaaaatacaaaaattagccaggcatggtggcacatgcctgtaatcccaactacttgggaggctgaggcaggagaatcacttcaacctgggaggtggaggttgcagtgagccaagattgtgccactgtactccagcctgggcaacaaagcgagattctgtctcaaaacaaacaaaaaacaaacaagagaattctagagttagtgtaagaattggtagacaacattttgtatgtaatactttcccataaaagaggaaacatatctatgaaatgtttagtttgtgttttaatagataaayctcataggacttaaagacaagaaaggcatatgagttgcagtatatagaagaggaaactttgatagcagtcttgagattgactggaggaggaatatggtaggagatgtgaactctgggtaatagaagattgcaacagaagtgaaaccatttgatagtgttcactattcrgtagatatttactgagcatttgttttttaagccaggcagtggtatgctgtagcaatgtctttgagaatttacatttctatcgatgttaataaataagaatgtcagtatattatttacctgtctagcctcaccttttccctttgccctttagtcttttaaagctgtttgattcttgattttactcttctttcttgactttgaggctttgtagggtactgcttcccctagtcagaatttttctttctgtcattttctaggaaattcctatttaccttttccaacttggcttagggttacctcttctaggaagccttcttttaattaattacacatctcctgctcccattctgacagcaccccaatccttacaggacaaagaatatgttttagtatcagtctaaactccaggacagccatcttgtgttgctgtctttattatctgcaacacctaaaacattacttggtatgtagtaggtgctcaataaatgttttatgggggaaatgaatgtggcagaaatatttaaggacatgggatacgttgtagcactatacacacacgtataatacattttgtattaagacatattaccaaaggaaatgtatgtctagcaaatgttaatttaagtgctagagaaaataatcaaaagaaaatgtagcttgttgcaatatattattattttttttaaggagacagggtgtcactcttctctccaggctagagtacagtggtgtgatsatggctcactgtagcctcaatatcctgggctcaaatgatcctcccggctcagcctcctgagcagctggaactacaggcatgtggcactgcagccagctaattaaacattttttgttgagacagagtttcaccaggctggtctcaaactcctggcctcaaggaatcctcccacctggtttctcaaagtgctgcgattacaggtttgagccaccatgcccagcctataatttctaatctaacattttgtaagaagcatggaaaacaagaataggaatttttgccttgaagctttgacattggactatggatctgtgactataatataatgtctgtggcaggggcaacttcaaaacttttaacaagtcattttagagtactcccttcccccagtatttaattttcataatacttttgatctagttgacaatgttgactattaaatctttttttttttatttgtaatctttccttcctagtgatctcggaagctgaaaaggcaaaacagaagatagctccagttttcttcagagaagaatatatgctgaataatgctgttggtatgtgtattctgctcagagctttggaaatggaataaagaaatgaggtggacagtatgtactttgttaaaaatgcaatcaataggcatccttacttaaacttttaataccatgtgccaggcataagtaaagttgattaaactattttaagtgcttatttcagaacagttaccctttaatattagtaggctatacttaactgctatttgttataaaatcaatatgaggccaggcatggtggctcacgcctgtaatcccagcaatttgggaggctgaggtgggtggatcacctgagttcaggagtttgagaccagcctggccaacgtgctgaaaccccgtctctactaaaaatacaaaaatcagctgggtgcggtggcaagtgcctgtaatcccagctactcgggaggctgaggcaggagaatcagcttgaacctgggaggtggaggttgcagtgattcgagattgcaccactgcactccagcctgggcaacaaagcgagactccgtctcaaaaataaatcaatatgaaaatatggatttctcatcatgtggtagctttcttgggggaaaaaacttgggttccagttttctctatraaatgaagtatagtatcatttcctaattcttaggaataaaaatttctttatattcaaggttctaggtttcattggaggtgaagcagtacttttatctagcatgcgaagttaagatacaggaaataacataataagtacttgtgtaccctccagcccagaattaacagacgtcaatattttgtttttgcttgatgatttaaaatttctccaaaagaaatataatactgcaagtttggaagttacatttcagcccatttttttgctttcctcagtgccattactttccccagaagcaaccatttatccctcctcaaaaacaaccattgtcattaatttttagtgtattctcctagaccatatttgacatttttactaaatatttatgaactaaaagattttaagttagaatttgattgaatacatgatattaacgtattttgacatatagttggaaaaataaattcagtttttgtcatgtgccttttagacaaataaacatttatatattggcataaaaacatgaattaatatctagtagattaaacacatggggatatatatgtttttctaaaaatatgaattgatgaaaataattactaagtgatgaaaaaagctgtatactcatttaacattaaagtatttaaaatagtaaaacataagtttatttttattttattatttattatttatttatcttttaagagagagtcttgccctgtcacccaggctggagtgcagtggtgcgatcttggctcactgcagcctctgtctcccaggttcaagtgattctcctgcctcagccacctgagtagctgggattacaggcatgcaccaccacaccctgctaatttttgtattttaagtagagacaggtttcaccctgttggccaggctgctctcgaactcctgaccctaggtgatccatctgccccggcctcccaaagtgctgggattacagacatgagccacgcacctggtgyggtgkaagtttaaagacaaaatagaaatgcagagcattgtatcatattttatacagcaaagtagacaaatagaggccgctgctttttaagctttccaattccttttgttttttagcttttattttaagtttgaactaaaagatttttactttgtgtttagcaatttacataaatactatcttactgtgtaaccattccataaattgtttttaacaacatggaatgtaactcttctgtggtatccaatattatgattatatcccacattaattatctgttctacattaatggatattttagcttccagtagttactaacatagatagttgtactctatctagtatgtggtcccttatttcccatgtgcaaaagtttctccagaaataatatgtagaatggatagatcatagtgtttatgcatcattactttgtttccaaattctttaagatgctttttctacatgtcttttttcttggctgctgttggactttggatcttccatatgaattttagaattgttttatctagtttcacaaaagtttctactgagattatgattagacttagaatgaattatgggttaatttggagggaattgacatctttgatattgaatgttcccaaccataatgtgrcatagctcttcctttttttwwwwwwwaaaaaaaaaaagatagggtcttggtctgttgcccaggctggagtgcagtggcatgatcacagctcactgcagcctcaacctcctgtgcttaagtgatcaagtgttcctcccacctcagctttctgagcagctgggagcacaggtgcctgccaccacacctggctatactttttttaagagagggagttttgctgtattgctcaggctggtctcatactgctgacctcaagcaatcctcccaccttggcctcccaaagaggttagattacaggtgtcagccaccacactgggccctggcttttgtttaaaatcgaaggttaagttgttaaatgataatgaatagataggattgtgttggattgacatttaaaaatatgtattttataagccatacatttagtcgtctttggtgtttcttgctaaaatttcctagggaaaatcttgagtatatataatgtgggtttttttttaagaaaaagggaatgtattttaaacactgtaactaaaattacagctctgtttctttcaggttcttgccagaaaccttatgttgcacttattcatggaattacaatgggtggggtaagtagactttttactctgatcattgtatgagtgagttgtattaaaaataagttaataattattaaacagaagtgagctgatgaatgtaatataatagaactcattgaaacataattgtgtggattttggatcctgacagatttgagatataatatttgcttatagcacttttagactatcccagcccaaaagaatattttatgttcttagttatgttatatggccgggcatggtgcctcacgtctgtaatcccagcagtttgggaggccaaggtgggcagatcacttgaggtcaggagtttgagaccagcctggcctacatggcgaaaccctgcctctattaaaaatacaaaaattagctgagcatggtggcacacacctgtgatctcagctactcaggaggttgaggcatgataatcgcttgaacccaggaggtggagcttgtagtgagctgagattgcaccactgcactccagcctgggtgacaaagtgagactgtctcaaaaacaaaaaaatatatgtatatacacacacacacacacacacacacacacacacacacacacacgttatatgctattttaactttttgaattagcaagtttttttaagcaatggaaactgattgtgtttttatcttttaatatatagagccttttttctacttaaaaataaactgattcttttcagaagcttcagaagagaamctagaatgttgagttttttttttttttaaattcagtattagagatttggttgcctaaattgtacctgttactcaaaatttcaccttagtggaagtgtttggattctttttgaagttctctgtaactgcatttctgtcagttgacaaatattctgcctctgtgctattacagagaagtctaaaatgtaactggcattgattaacttgacctggagttagagaaaacatgaaataattacaaaacaattggtaaattgtatggtactgacaaagattagcctttgaagaagtgaggggtcagaattggtcttcatggcaggaaagggctgcatggagaagatggtgaattgaactgagcctagaaaggtagtggaggagagaaaaagtaatgtcttttcctcaccgattgcaggggtcatggccagtatccatataacaaaagacagattgacaatagagaagcataacaaatttgtttaatcaaagttttacatgacatgggagccttcagaaaagaagacccaaagacccacagatccaggaaaaactgtttttgtgtgtaagttcagtgaacaatggacagtcatatagaagtatgattggacaaaaacggtattattcagtagtaataaatgggggaacttaggtaggcttgtttgttgagattcttcttggcctctgtgtgtaacattcctttcctccaggtataggatggggcccttgtcacatgagggtttaatgactttcaagtccgggtgtcrtggctgatgcctgtaatcctagcactttgggaggctgaggtgggtaaatcgcttgaggctaggagttcgagaccagcttgggcaacatggcgaaaccccatctctactaaaactacaaaaatcagttgggtgtgatggtgtgcaccagtaatctcagtgactggggaggctgaggcacgagaattgcttgaacccgggaggttatagtgagctgagatcatgccactgcactccagcctgggtgacagagtgagactctgtctcaaaaaacaaaacaaaacaaaaagacatactttcagaagaggtaggttagagaacttctttacggccagctgtcccacagaaaggcggggggaggtcacagtggcctccaagtggccgtagtttggggtagcatatcctgagccgtgacaataggtaggacataggtaggtagggcccaggtaggtagagcctaggtaggtaggtagtatgaggccaaaaggtggaatttttgaaattccacctgttcartgttttaaggaacttaactatttggaatacaggaagttccccctttgttctagtagaaccaccctaaataaggaccgggaattgcttagatcttgcacatcattttgggaagggattctactagcaagggtgatctgtacctctgcttggcagaaactgagcgtgggttggttgtgctttaacctggggaaaaggaaagctctctgmaaaaagtactgcagagtaagaggaagggaaagaatctgaagcattgaaggaagagctgccctgtgaatgtgaaagaaaccaggaaaaaatgaagacaaaaacaatgggcatacccaacagcatgtaaaaataaatgtgaccccattaaaacaggaaagaaatcccataaggakagagcaaactcagatgaaagggctacaagttgaaaaagggaaacaggaaacagggaggatgactgggaactaatacacagtagcaaagctgacattttattttaatggcagtagattagaaagagatgaatttaatattacagatagtgaagtatctgtggagaacaaacttgagaaactctcacaaagcattcaaaaaaatatataagtgatgaaaatgaatgttttgaggtaatgactatgaaagaaagttactgggaacccaacaaaggagtgataagtactccactgaaagtaaatcagatacttggaacagaaatgatgatcagatataatgaaataagactttaagtaaaaacaaatactcccaaactcagatatgtataattaaaggaaacacgaaatttcagataagtgaaaagagacccatacctagataaaagctcaggtaaattttttaaaattataagccttaagaaaaaaaagctaactgtgagtagtcaggccaaggaatcaaggtaaatggggtgattagtgatatacgttatatacagatttcttcagatttctctgttacacaatgtgacagaagtcaatgggttgagaagttgtgaagtagttaggatccaagagttttctcyccaactaagtcgttatttagtataaatataaaataaaaatattatcagaaatggtaaatatattgctgacatattactgagaatatttcagtaactatttggtctagttgaccaagagatcacttaaagttataactcaagactccttctgatatgaaaggattggtaagctgccctttggtgctataagtgggcagaacttccattttttttttacagamgcctgagaattatattgctctagcacatcatktctgaakgcactggccatgttcttcagttctggggcttgtataggttggtataatgtttgtatatattcctcatatgtaacaaccaagaatatttatttcaaaagaaaagactgcagtgaaacagatcaagataatgttgtcttgaataaatgaagtaaagatgctgctgattcttcatactggtctctgttttcagtatttaaagaacataaataactttcaaataaagatatactttatatcagcctttcttaaccagaactccaccagaggattaagtcttagtgccctaaaatgttcttgggtttgcctagagaatcagtctcgaggctggggcctagcagtctgtttgaacaagccaagctctccaagtaattctgagtcatgttaatttgagaactagggctctaagccatcccttgaatgtaataaattagctcctatttctgtcctgtgcttctcgaatggtactagttatgtaccatccttgggagaattgagaatataatyacatcatttgcagtgatctgtggttcagatgaggaacccctgagaaagtttgttttatactatattttatcagctcccttaaaaatattgtgtcttttcttccatcaggtatgcccaaccacatgcatccttaaagactgaagttcttccctcttttttaatagccataaatattatggattgagcatctcttgtctgaaatgcttaggaygaggagtgttttggattttggaatatttacaatatgttataaataaagtttcagtgccgcaaaagaaatagcactcgaatgtaacattttgtttttaattctcagcaaggaaatgtactactatagaagggtgtgcccttacagatggagcaatggtgagcatacacctggacaagggaggcaaaggagttcttattcctgatgcacatggcccgtgctgctgtgtcattcccctattggctagggttagaccgcacaggctaaactaattctgattggctactttaaagagagtgatggggtgagtggtttggcagaaaaaatggttatggcagagcagtaaattggaatgagtcagggtggagcaggtaatcgaaaaaggttgctttatgaggaagttaagtttaaaagtagaaggcaaagaattgaacatactgacattgactctttgaagagaaatttagaactcatrtctaacaaatcttaaatctaaaaatctgaaatcggaaatgttccaaaatctgaaatatttggagcaccaacatgatactcaaaggaaatgctcattggagcatttcagatttcagagttttggattcaggatgctcaacttacactacaattagatgtgatttcttctttcattgagtcagtgctttcagtctgtactctaaatttgrtgtttgtactttattgttactttatatctcatcttyccaactgtattagatggtctggaaagggcaaggattatcctacctttttttttttttggccttctcgtaacaactaggaatatacagttatagagaaatttttaaacaattataccctaaataataaacatcttgtatagcckttgaaagagtaaacaacaggctggaagtgaacagtctcttttttttyagtagtggggttttgtatttatcttggtttggaaggccacacttttcatgtctgatttacaaacttctgtgatttgagtatgggttgtccccaccaaaacccatgttgaggtttgtttcccagtgtggtggtgttgggaggtggtgcctttaagaggtgattatgttgttaagatggattagtatctttcttgcaagactgggttagttcttatgggaatggttagtttctgcgagagcaggttgttgtaaagtgaggttgcttcctatgttttgggctttttacatgtgcctggtacctcttctatttctctgccatgttttcatgtaacataaggccctcactagaagctgccagatgcagcctctcaatcttgaactttctggcttgtagaaccatcacctaaataaacccrtttttaaattttgttttataagttacctagtctgtgtatcctgttacagtagcacaaaatggactgagacagaaaattgatactgagaagtgttgctaataacaaatacctgaaattgtggaagtggctttggaattgggtaatggatagacacttgaaagaatttggaggagcaggatagaaaaaaacctgtattgctgtgaacggagcattaagggtgattctggtgagggctcagaagaagacaaggctggggaaaatgtggaacttcttagagattatttaagtggtcatgggcagaatgctaatagaaatatggacagtaatggccattttgatgaggacccggatgaaaatgaggaacaagatattggagtaaagagcatccttgtaataaagtgacaaagaacctggctggatgtgtccatgtctgagggctttatggaattcaggaatttagagccrtgaattagaatgcctggaagaagatctatctaatccgcaaagcattcaggctgctgcatggctacttttaatagcttacataaagctgtgagagggaaaaaaatgactgaagatgaaatttataatcaaaagggaaagaaagcagaaagatttggaaaactctcagcctggccatgtaaagagtgaaaaaactttttgggagaggaaaccaaggtgtggcgcagcaatttttgctaaagagagtaatacttaatggaagggaatatcaagacaatgggagaaagaccctcaaggcatttccgagacctttgagcctccctttctcatcacaggcccagagctctggcacaaatggttttgggtgatggacttgkgcctccccctataagcttaccgcccggggctgcttgggcctctgctcccagaattccagcacagtgctcctcagttgtccccgctatggctcaagtgccccaggtacagcttgacctgcagctccagaagatataagccataagccttggtggcatccatgtggtgctaattctgcaggctgtcagaaagcagagctaggaaggcatgtgagcctctccctagatttcaaaggatatattagacagtctggtgtcaggcagagctttgttgcaggggtggagccaccacagagagtccattctggagaatgccaagtggaattgtgaggtcagagctagagctgcccttgagattctagaactgttgacccactggcagcatggcaccagtttgcaacttcaactgtagagagctgaagtgtgggcttgttagtggtggatccgtacaggtctgaagcaacttgattcttgcctccttgaaggaaagaatttgtctaaggggcataaggcagagtgagagaccaaggcaagtttttgagcaggagtgacagtttattaaaaagttttagaacaggaacaataggatgtaaagtattcttggaagagggccaagcaagcaacttgagagattcaagtgttctgtttggcccttgacttggggttttatacactggcgtggttccggggtttgagtttcttctcccttgatttttccttggggtgggctgtccacatgtgcagtggcctgccagcactcgaggggccatatgctcagtgtgtttactcaagttgtgcgcatgctatttgaggcatttcccccttgctaagttgaacatttttagaggaaggttatataccagttaaactctgcaattttgcatctaaatgcacatgcttgggcccactygcccagctcctgagatcttaatgggaagyggctgatcacgagcttcaggtgttttctgtctactgggagactgcctttccctgctgccagctgcgaccagttattttagggagatagtttaacaaccacctgaccatcacttgatggtcacctgacattctgggtgtgggggagctctctgccctgctcatgtctgcctagctacctactcttaactggttgagcccagaaagctctaggagtagggttgataccttgagggcccacctctccaaccccatcccagtgtgcacaggattcagacatggaatggagattactctctagctttaagagttaatgtcttctttctcagggttttaaagacttaattgaggcctgwtactcctttcttttggcctatttctgccttttagaatgggaatgttagaaatccttgttcccaggtgccgcaaagaaatagcacttgaacataaatttaattttctcagccaggccatttttactttctgcagaaagagtacacttgccggcagttttgctacaagagtacagcgaacaaaggggacagggtaatttataacctgacgcgttcaccctactgctgtgtccggtttccattggctggaacgggacctcacattctgtatttgtcccaattggatagcaacttagaactttctaaaagaggcaaaggcagaggagaacaaaggaaggaggaagtaacttgtggaatgctgagaaaggtaaaaacacctccaaataaggaagaggaacaggctatgacctaatgcttgcttggaccagtataagcatgccagggcaaatatttaggctaaatgtgggagctaagaacacgaagtacattgatttctttattaaggctagcagatatctaagaatgttagcacaggtctttgaataaattttgcttctaagagaatttactatttattcctaattagacagggaggaaagtctctttgaagaggatcctctactttactttttacaggaatgtataccctatacctgtcctaccactgtatcttggaagtagataacttgttttgattacacaggcttcacagatgggactctggacttcggaattttgagttggtgctgaaacaatactttgaggatatggagctggagtgaatgtatttgtatgtgagaaggatatgagtttgggaggtcagggatggaatgctacggtttgaatatttgtccccaccgaaactcatgttgaaacttaatcctgratgtaacagtattaagaagtgaggccttcaagaggtgatggggtcatgagggtagagtagtttgatccattcatggattaataggttatcacaggaagaatggtttaattaccatgggaatgggtctgttttaaaagccagtttggcatgctcttgccccttcaccagatcagggctctgcagagagtccccaccagcaagaaggccctcracagatatggcccttcaaccttggctttcccaatctccagaagagctgtaagacatagattccttttctttataaattgcccagtctcagatactcagttacagcaacagaaaacttaagacaccagcatttcttaatataagatgttttatgaactctagcttctgaaaatgtaatcctctagatcattggcgctcaaccttgttkgcactttagaattatttgggagtctttttaaaattccagtgcctaggcttaccttatctcccataatcattaaattggatagtggacagtggagtgagacctaggcttttttttttttttttttttgagatggagtctcactcttttgcccaggctggagtgcagtggtgctatgagacctaggcatttttaaagctccctggtgttaccaatgtgaaggtaaagttaaaaactgctgctctacaggttcttgtgtgtggttgtgtctcctgtgacttttttctaaatctcccaaagactgttcttcacattttagtttgtatcagagtaacctggagggcttgttaaaaagcagattctaggctgggcacggcggctcacgcctgtaatcctagtactttgggaggcctaggctggcggatcacttaaggccaggagttcaagaccagcctggccaacgtggcgaaatcccctctctactaaaaatacaaaattagctggatgtggtggcgggggcctgtaatcccagctactccagaggctgaggcaggaaaattgcttgaacccgggaggtggaggttgcagtgagccaagattgtaccattgcacttcagcctgggcgacagagcgagactccatcttaaaaaaaaaaagcagattctttccctgccccatctctagtttagtctggaattyggcccaagaatttgcatttctaacaagttctcaggtaatgatgattctagggggaggggagttcactttaggaacaatttttgtaaggtgttcagactacagtttgttattcagaaagcctttattttcagaatttttagtagaattttagtattacacataattgcttagtgtaggcttagtatatatacatttttaatctgttaaaagaaaatcttcatacaaatttaacactttatctgagcaaagaacaattcatgaatctggcagcatgcagaaccagaagaggttgagagagctccaccttgcagcatgagcagtgagcttccataggttgaatgtggaagcaaattagagaaattacctgattggctaccgcaaggcatttgccttatttgggcatggtgtgatgagatatttactctctgtgggtgtggtctgatcagttggctgcctatgattggctgaaacatggctgtttgttacaaaactatactcttaaattaggtttcagtttattttcttactaaggttgcaatttattatgaaggaactcaaagtgcagagagacagtctcagttcaatggcttctgcttatttaacataccctagtacagaagtgtgagaataacgtggagctaacagggcttaaaaggcataggaatagtacttgcttgattctggtcaataaattttttcttacaataatgtaaaagaattttgttaagaatttgtacagtccaaaagatggcgccacagagcttggttcccacggctttccttttgtttttgttatagaaggttttattttttccagtatagaaaatgacagttttattttctcttgttacccaccatgaagagtagcacagtatctttaatattttagaaattcaaacatttactcagtattttgaaatacagtaaaataaaaatgaatgttactgagtggttctccacatggtagatcagaattatgtaaaattattccagtgtttctgaaagagaaacaatttttttatgaatagatatttaaatgactaaatttattctgtttctggggaagacaaatttttttatctcttttgccatttatataaaacatctggggttgcattttcttaagttaatatgaggggacgtcaaaaagtttgtggaaaaatggaattaattaagatagaaataaaaataactttttttctcaacataagctccgtcaaatttaaggtacttcttttgtcagcagtgataccagtcatttagtccatccctaaataattgagggtcctgggaatttaactrtgcaaatgcagtgttttttatattggtaactgaagaaaaatgggtgccatctacagatttttaaagactggtgtgttagtctgtttgggttcctatagaagaatacctgaggctgggtawtttatttggctcacagttctgcagggtgtgcaagaaccatggcactagcatctgcttctggtgagggcttcaggtaacttccaattatagcagaaggggaaggagagctggcatatcacatagcgagagagggagtgagaaagagagaaggtgctacattcttttaaacagccagcttttgtatgaactratagagcgagaacttattcgttactgtggggatgtaccaagccattcatgagggatctgcccccatgaccacaccttccatttggccccaactctaatgttggagaataaatttcaacatgagatttggaggggacagatatccaatctatatcaattaggaaacataaaggagtaagaaggagccaaatcaggtctataaggtggatgcctaataatttcccattgaaactctcaaaattgcccttgtttgatgagcggagtaagtaggggcatttacatagtgtatgaggagtctctgatgaaactttgggcctttttccgctaaagctttggctaacttttcatgatagttctttggtgttccagaaagtcaaccagcaacctgccttgagcgtcccaaaraattgttgccaacctttgctcttgaccagtctgcttgtgctttgactggaccacttctctctcttggtagccattgtggttgtgctttatcttcaggatcatactggtaaagccatgtttcatctcctgttacagttcttcaaagaaatgcttcaggatcttgatctcacttacttaaaatttccattgaaagctctgttcttgtctgcagcagatctggatgcaatggttttggcactcatcggatggaaagtttgctcagctttaatttttcagtcagaattgtgtaaactgaaccaattataaaasaattgtggcattggctattgttcatgccattaactctcaatcatcttcaattagggcatgaacaagataaattttttcctcacaaattgatgtggatggtctgccactgtgggcatcttgaacattgtctcatgccttctttaaaagagttatctatttgtaaactgttgatatctttgaggcattttcctcacaaacttttcacaactcaccagtgattttacttttcttctacacaagctttaccataaatttgatatttgttcttgcttcaattttagcrtaattcatattgctctgataggggccctttcagactgctgtcctatccctcttaggacctcaagctagatcctgttctggtatgttatgacaaattagtaagagttgattttcatacaaaaaaatttgaagttcttgcatagttttttcataataatgcatattccgtgaactttttgaagattccttgaatataacaattacagatttgtttaaatataaaattaagtagatatagaacagaggacaatccttaaatttttgtttcatacatgtagtaccactcctgtttccctccccaactgaattggatttaaagaacattttaggttcttctctcctcctctctctccctcctagtcttcctttttttccaccacctcttgcattttcgaatagaaatgaagttggttccccaacctaactcaaaatatggcacagtaaggtattgtttttgtgtttctcaaaatgctcttaagatgctactagtgagagggttttttgattataggagaccacaatatgccaccctaaatatgccactttggcataatgattattttgagcagrttattttgagaaccagcagatacaggatcatctctgaaaacagcacaagttacctttttgtaagagaaatgtgtacctagaaaggaaatctctatttgtaagagtgtctccctttctggggaagagaaggatgaccaaattgcaagagactcctatcaacagagataacaacataaatctgcaaaacaatcgtttctcttatttaccatgctttttgtggtaaccttccttcacatcctttcgagttgaagttgctatgtaagctggagttttaggctccctcttggagagtttttatttctccctggataatcttctgtgtatacatgaggtatacatgttaataaactgtttttctcttgttggtctgtcttgttrgagcagtcccagctaagaactcagaaaggtaaagggaaaattcccccaccacacacaatgaataatagaaaattaagttttaaagtgtattttagaaagagcatgttgtcatgactagagaagtgggaattggaatggaataaaaataatgagcgtatacattacccaaatgactttattgcagtacaaactacccacatgaaagttgactagtgctctgttaaatgggaactactgaatcagattatgtttatccactgattaatgtcattgaagacatgttcttattttcataaaaagaatgaacagtgctcaaagattgaattatgttagtatattgcaaagacttgttagacataatgggtaccttttttcagttttaaaaggtgttctgtttcttgctattagtgacagttgaatagaagacattttaagaaaccattttttaattaaataataaagtgccgggtttttcataacaacatttattttacttagtatggaacctgagaggccgggcgcagtggcacatgcctgtaatcccagcgctttgggaggccagcgtgggagagtcacttgagaccagaagttcaagtccagcctaggcaatatagcgagactctgtgtctccaaaaaattaaccaggcatggtggtgcatgcctgtagtcccagctacttgggaggttgaggcgggaggattgtttgagtctaggaattcaaggctgcagtgagccatgattgtctcactgcatctgagaccctgccgcaggaaaaaaaagagaacctgagagtttatgaaagaagagatgaaataattttattaagatttttggagaaacttctgagttcagcttcgtttggtatacttcttcccacccacctatgtaatttaaatctctttttttwwaaaaaaactggaagatatgaaaggagctttctttaagaatgaaatatcagtaacacagcaggagctgagagaggaaaaatagagggaaatttcccttggatttctaagtgtatagggtgtatgtttatatacattcgtttttatctatattgattattcaactttctccaagtgtggatggatatcttgttttgatagagagcggtagatctcctctcatccccagatgagattcttttagatttccttctgtcttattaggggagagttaggattgcttttatttatttgtttttatttttatttatttttgagatggagtctcgctctgtcacccaggctggagtgcagtggtgtgatcttggctcactgcaacctccacctcctgggttcaagcagttctcctgcctcascctcccgagtagctaggattacaggcgcgtgccaccacacctggctaatttttgtatttttaatagagttgaggtttcaccatgttggtcaggctggtctcgaactcctgacctcaagtgatccacctgcctcagcctcccaaagtgctgggattactggcatgagccactgcgcctggccgtaggattgctttgagttgcgtagtttcttatagtaaaatttcagggtcatttagtttcttaatgagctttttttttctttttaacaggtaagcattgggttatattgatttttcaagatgtaatggattatcatctaagtgatgttcctttgctgcttggcaatataccacagatggtctgtttaattgtattttactacttgtctgtcttattagatagagcccttgttttttttagcttcctataccccatttccatctaccctttagcccagggatatctaagttggagagtactttcattttcttaccaagaacttgacctcactaccttcsgtctccctgcccccccattaaggtattgcattctgggaaatttttgacttgcaggagtatagatattcttggcaactttgacaaacttacagattctgagatctacagggagtttttttttttcccttggccatttcctttggccatattggtcaggttttgggttcctttcatttgtaatatgaaaccaccctaggttcaaggtcaagtagcaggcaccttttgccctgtgcatttctcatctggccttctgccctgaccatgttggtttggatgatttttggtctagaggtttctgtttcttattgaggcgtgaaagtatttcagagaagaaaagcrgaggagagctctttgcccataaaacgagctcattcccctaaggatatatggatatgtgagcttcgaaactaactagaggctcattatgactttagccatcatttgagattgttctcaactattttacccaagcagcaaaacttattggatgtctagatgtgccagatactggttgggctctggtgataaaacagtgaacaaaacagacatgttttcctttctcctagagcttactgtccaaacaggcaaatatggggtagtctggaaatacattaaacaataccagccttaactgtgtgtatgtgcgaatagtgtagtgatgggggtagtgtagggaaagccttttggaggaagttatatttaagckgaggcttaaggaaggaggaattaaccagagaagaaaagctgagagtagtaaaagaatgcgatrtggttggtgcaattgtgtaagggttcgatgcagtgttgaacgacagtgtgtgggtgagaagataatagcatatgtgaaaatgagataagagagaattcatatttgagcaaagttcagtgtgcctacattttatactgtgaaggagataggggttaaattctgaggccatagaggtaagcaagaagccagatcagctctcttataggacatgttaagtagttgatcttcagatcaatatggagagctaattaagtgctttttagcaggggcaatgactagaacagatttgcattttagaaagaactctggtgggaagaattgactttaggagggtgggattggaagtawagtgattatttaggaagctattgcagggaatcgggtgagagatcatggtgattaaatataaggtagaggccagacacagtggctcacacctgtaatcccagcactttgggaggyggaggcagtggatcacctcaggttgggagtctcagaccagcctggccaacatggcgaaaccccgtctctactgaaaataacaaaaattagctgggcccagtggtgcgcacctgtaatcccagctacctgggaggctgatgcaggagaatcgcttgaaacccgggaggtagaggttgcagtgagctgagatcacgccmctgcactgtagcctggatgacagagcaagactccctctcaaaaaaaaaaaaaaaaaaaaaaaagtagkgtagagataatgggtagatagatttaagagggagatagggagattttggagaagacttgatgggttttgatgatggattgtatgtgatggataaagtggagcaagaatgactttcaggtgtctaggctgggccatggaataaatggtggcactatttactaagatttgagaagagtagctatggggtgggctggggagagtgaagggagatgaatttaattttgagctggacctcctagaatggtaaataattaataataatatgtaaataagttaaatattttctctcaattatttgttgttgaatatcatttttgtctaaaaataacatgaattatacatacccaatagcagggtaaaaaaaatctgtttggtgctaatctctatgtgttagtccattaaaatacattattatataatcaatatacatattaagatgcaatatgagcccgttaatatgagaaacatagtaaaaatctttgtttttactttgcagcctgctgttctgttaatctaatgtatgtggtcccagagatacattaagaaacttatttaatagtcataatagtaacttttatgccatagtgaaagcatgtgcgatgacaaatctacttgaatttctaacaaaagaaattgaaatggtgctatttcaaagcatcatttatcctgagtgatagcgataggctatcacatactctctaatactgtgatgcagtgtttattctgggcaggagcttactcattctccctggttagatttaaatccatgactttttctgtaaacatcagtcacatcaccccattgtgtatctttctgagttttttgtcttctttactgtggttatcaactgtttactttggaatatttactttttgagcaccaagttgaattgtttacatgtgtctgtgtttatgcgttgagggattaatcttgccattagtataaatcatgggtggttaactatgccttaaaataaccttaaatatctttttttttaaaaaaaaaaaaaaggtgtaataactaaatttatttttactagtacatttttttaaattttattttactttaaactctgggatacatgtgcagaacgtgcaggtatacatgtgccatggtgatatgctgcacctgtcaacccgtcatctaggttttaagccctgcatgtattaggtatttgtcctaatgctctgcctccccttgctcctcacctcccgacaggccccggtgtgtgatgttcccctccctgtgtccatgtgttctcattgttcagctcccacttatgagaacatacatttggttttcggtacctgtgttagtttgctgagaatgatggcttccagcttcatccatgtccctgcaaaggacatgaactcattgttttttttatggctgcatagtattccatggtgtgtatgtgccacattttctttatttagtctgtcattgatgtgcatctgggttggttccaactctttgctattgtgaacagtgctgcagtaaacatatgtgtgcatgtgtctttatagtagaatgatttataatcctttgggtatatacccagtaatgggattgctgggtcaaatggggtttctggttctagatccttgagaaatcaccaaactgtcttccacaatggttgaactaatttacactcccaccagcagtgtaaagtgttcccatttttccactgccttgccagcagctgttgtttcctgacttcttaataatcaccattctaactggtgtgagatggtatctcattgtggttttgatttgtatttctctaatgaccagttatgatgagctttttttcatatgtttgttgactgcataaatgtcttcttttgagaagagtctgttcatatccttcacccactttttgatttttttttcttgtaaatttgtttcagttccttgtagattctggatattagacctttgtcagatggatagcttgcaaaarttttctctcattccataggttgcctgttcacgttgatgacagtttcttttgctgtgcagaagctctttagtttgattagatcccatttgtcaattttggcttttgttggcattgcttttgctgttttagtcatgaagtctttgccaatgcctatgtcctgaatggtattgcctagattttcttctagggtttttatggttttaggtcttacgtttaagtctttaatccatcttaagttaatttttgtataaggtgtaaggagagcggtccagtttctgttttctgcacatggctaaccagttttcccagcaccatttattaaatagggaatcctttccccattgcttgtttttgtcaggtttctcaaaaattagatggttttagatatgtggtgttatttctgagggctctgtcctgttccattggtctatatacctcttttggtaccagtaccatgctgttttggttactttaaatatctttataattatcagtctttgaaaattaatattgggctactctgggcaygctgcctatgggttagccctgctccacaaggagcagttaaaaaaaattgctttttgtctagaatagtaatatctggaaatatgggagcaagtgctgattcctagttgcagattaacgtatttatatgtttgaatggatttaattgtccttttaaagtaattataatgagatgttcttttaaagccaaaaacagagctgtgtcagctttcttctcctattggaacagtctgaaaactcatctagctaggtttcttaattaaaaagtaaagtcttaggttgcctaaattttgcctttagggatgccaaaaacttaaataggaagtcatttttacagtgacagagtaggagtttgactacattcacatgctttttccatttttgttcaaatgttatgcttgtccatattaacattgtttatagtagattgtattactatrtgaakatgattgtttaataataacgcagttaaaaaacagtgaatgtcagagtgctcgggacaccataaatataaggcacagaagggttaagatagcataccacactaactaaaggaaagtggtataactttttaaatatccaatgacgtacgttttatggcaaaaacctttatttgaggtaggacataccataattgtagaatggttagatagtacatttaaattttaatgycctgtgagtctgtatctattgtgcctttagttgtggtcttttctcatatgtctgattatttctgagttatttctaaytgagtatttaaaatgcagatatttttgagtcctaggatgatgttctctctccaaagaagatggacctttgtttctggtaggtgttcaggctaagggcactagcagtcccagatcatctcagtctagtcaggacttcagagaatttgaagctggacttaattcgaggtcatcctagaatgatggcttgaatctaggctatcctagttcctgaggtccccttaggggcccaacttggcaagccctaaatttccatttttgcttctttagaagatatggcttagctcaatctgtttcaaactttattcagctttttaccattttaatatcactgattattgactgtactcaactgcagaaagatactttataaatacttgtctaaaagcctcggtttataactaaatatgaagytgaattacttaatgagttccatagtgaacaatatggcactagcactaaaatggagaaaccataggaacaaacctttgcctatctgaaataactctactggtatgatattttcaaacatttaaaaatgactaatcttggcagggtgtggtgactcatgcctgtaatctcagcactttgggaggccgaggtggatgaataacctaaggtcaggcattcaagacaagcctgaccaacatggtgaaactccgtctctactaaaaatacaaaaattagcagggcatgcgcctgtaatcccagctactcaggaggctgaggcaggagaattgcttgaacccaggacacagaagttgcaatgagccaaggtcacgccactgtgctccagcctaggtgacagagattctgtctccaaaaaatgaaacaaaacaacaacaacaaaaagtcatgagatttgtagatgttgtcttcacctcactctccccatcaccccagcttcacctagaacattcatacactgtggacagaattggtcttctaaaataaaaaataaaaataataaaaataaaaatgactaatcttggccaggtacagtggctcctgcctgtaatcccagcattttgggaggccgaggcatttgggtcacttgaggtcaggagtttgagaccagcctrgccaacrtggtgaaaccccatctctactaaaaaaacaaaaactagcctggtgtggtggtgggcgcctgaagtctcagctgctcgggaggctgaggcaggaaaattgcttgaacccaggaggcagaggttgcagtgagctgatattgtgccactgcactgcagcctgggcaacaaagcaggactctgtctcaaaaatataaattaattaaaaataaaaacggctcattttgtggccaggtgcggtggctcatggctgtaatcccagcactctgggaggccgaggcgggcgcgtcacctggagcctagagtttgagaccagcctggccaacatggtgaaatcccatctctactaaaaataccaaaattagctgggtgtggcagtgcacatctgtagttccagctactccggaggccgaggcaggagaatcacttgagcccaggagactgaggttgcagtgagtaaaggtcacgccactgcacttcagcctgggtgacagggtgagactctggctcaaaataaataaataagtaaaaatgactaatcttgtaaacaagtggaaagctctaaaagtggaaatagaaccacaatcataagaaatattcgaacatatttctttcaataacagataaaacagagacatactgagtacgtatattttcatgcacatattttatatgcacacacattatttgaatgaaaattgtttaataagcttgacctaatgaacatgcactcagtaactgcagaattcacgttcatttcatgtgtgtatgaaacacttgccaaaataggccttggaattcatcttaatatattttaaaggattaatcttacagaatacattatctgtccccagtggaattaaggttgcaatctgtaatggaaagataatagggaaatcccaaatgtttggaacataagcagtaaccttatatgacatcacaatgaaatgatcaaaatacaaaaaaaaaaagatttaaaatcagtaaacagtaaatatcaaagctgaaaattatttttatagactattaaaactgataaatccttagtgataagttggtaaagacaaagataaaagcaaagtatgttacaaatacggaaatgaaaaatagcacatccctataaaacccatagccattaaaaagattacaagaggatgttatgtacaactttatggtcatatatttcaaaattttgatgaaatggacaaattataatccataactgttaatgaaagtaagtctttaaaaacctttttatgaagaaaatttcagtcccaggggttagggagggattacttaaataatacactaaatgtaccataagcaaaatgaataaattgtaatgtgttaagaatgagaacttctgttcattccaagacatccttgaaacagtgaaaaggcaagccacagactgaaaacatatttggtatacagctgataagggaatcctgtctaggatatatagagaattctaccaattcaaaaatccagtaaaaaaaaaaaaaagagcaaaagattggaacagacgtttcacagcaaaagattagaacagacatttcacaaagaggatacccagatagctaataaacctgaaaaagctctcaactgtattaatcatcaaggatatgcaaattaaaacttcagtgaaatactaacatatagtcattagaatggctaaaatgtgaaagacctcttgaagtgttggtgaggatgtagaaacagcaaactcatatacagctagtggagcagaaattggtactaccacttaggaaaattgttttgatatattttaaagttgaatgagtcaatactttttttttttttttttttttttgagacggagtcttgctctgtcctccaggctggagtgcagtggcacaatcttgactcactgcaacctccacctcccaggttcaagcaattctcctgcctcagcctcccgagtagctaggattacaggcgcatgacaccatgcctggctaatttttgttgttttagtagagacagggtttcaccgtgttggctaggctgatctcgaactcctgatctcaggtgacccgcccacctcggcctcccaaagtgctgggattataggcattacgtgagccactgtacctggctgattaataccctttgacctgacacttttactccctggtatatatctgaccaaaatgtgtgcacttttgcaccaaaacatatgcagaagaatggccactgaattgttacttgaaatagccaaaaactggagacaatccaaatagccatttatattagaatggattaacaaattgtttattcatacagtgctatacaatgaaaaagaacaaattactgctatatgcaagaacataaaatctcacaaacataatgttgactgaaagaagtaagatagtaatatatattctgtgattctatttatatctarataaaccagaaaaaactctaatcctttgttagaggtcaagatagtagctacttgagggatggagggtgtagtgactgacagagtgcatagcacaatttctgatagtttttatctgggttttggttacatgggtgtgttcatttgaggataattcattgaaactatatgcttgcgaacgtactatttgttactgtttgtgtacctttaagtggatattatacatcaagagagtttaaaaaaaaaaaaagaaagaaaaaagaaagaaagcccgtgtggcttrctggaggggaagtgagaaagtggggaatggtagactataaaatcaggaaggtagaaggggaccagatcatatgggaccatatcagccatgataatattttagtgtgaagggaagtcactggagacttctgggygggagaatgacgtgatatgttttacattttaataagcgtgctttgactggtatagagatgatagattgtggcaagaatagaagcaagatacaccagcctgggcaagagaggataaaggcttcaagtagggtcgtaatagtgtagatggtgaaaagtggcccagtccgggatatatttttaagttagagctctcaggatagttcatagattacattgtggggtcgtaatagtgtagatggtgaaaagtggcccagtccaggatatatttttaagttagagctctcaggatagttcatagattacattgtggggtagaaaggaaagaaggtaatgctgagatgtttggcctgagcagctgggtgaattgtgatgctgtttactgagatgaagacagagagaggagcacacttaaggagaaatcaagagatttacttttgatgtgtgaaggttgagatacttattagacattcaagacgagacgttaaatagctgagtagagaaatcagggatggggaaataatttattagtgttttaggtggtgcttaaaatcctagggctggaagagatctcctagggaatgcatgtagacaggacagagtacagtggggtagagtgaagtggagtagaaggatgacatctaattattgtggcaggtcaacactttgatatcagggagaaatgaaagagtaactaatgagttagattttaaagcaggaatgtatggtgcctcaaagcccagtaaagcatttcataaagtaggaatgagcaactgtcaaatattactgagctatttagctagtgttcagcttggtgaaaaatgagatttgactactgggtttggtaggtttgggggagagatttgaggagagttggaattggaataaagtattatatttggagaatgaatctgtataaaattagctaatacaataaaacttgaagactttggagcctttttagtctagcaaagaagtatcagctaagattaatggttaaataaaatgtaaaatcaaatttcagaagttaagagggctgcttacaagtaacctataatagattctttgatgtaagatagaaaaattagttacgaatctgccattagggttttataccccattcgaaatggttcascgtattcctagtatcttcaagtgaagtggcttgactattctgaaccttcatctttattgaaaggctttaaaattggctcttaatgattcttatgtcagtggtctcttattctgatagtttttcattaataacttttwrstcaaatcttgatgtcttttctttaattcactattatcagccaatgctaaaataaaacatactctatgtaatataagataacaaatggaatcaatgaatcagttaccccgcatggatctgtagcttctatgtgargtaatatggggtttttaagtttctttttccatagagttcaggaggtggagagggccctctgtagagaatttggtctgttaggttgttcctttgtaaaggaatgaagattccagaagatgtgatgggaatgactagtcagggacagcagtgttaggaggttgtgttgggaggaaaagcacagaacagtattgcagtgaatatatactgggggcccaaagacttacgttgtgtgatgctgatggcaggatctaggtctagttctaactgaaaatgtggtgaagagacattttaattggaaagaacagagactcactcaaaaagatccacaaaagagaatggggcagttattagacaagttcagggaccttaggcattgcttatgttcctgaaaattggactgcaggtgtgggcttgaggcaaatttaagttgtgtgtttatttttctatctctgcttctttttatgtgtttgttttgttttctgtcttgtacagactgcagcattctcagggtttttttcttttcttttcttttcttttttttttttttgtctctaccgcatataaaaccagcttttacttggctgtcattgtcatctttagctcaaatgtcagatgacctttaagcttcactgcctgtcatcgactgacaactgtgcactgtgttttagttttaagtacctaagagtaagaagaaccttatctaattcacccctgcctctttgctccccaggcctctgaattctggttagtctccattggctgcccttgggtccattgccaatccctagttcagcccctcctggggaaaggaaaagagagtctctgggcagagcagattcccttagagaaaaagcagtgattgagcaggcagtggccttatctagtagtttttcttcttaccttagaagttttatgattaattgaaattgtaaaagcttaaaattttggaggaatggcatgaagcccccatggctagtggaacgagtgcgggaagagtgatgggagataaagtcaaagaggtcagctaggccaggtgatatagagccttgcaggccatggaatagagtgtgaattttatatatgtatagttgtatatattcttatatataaaatatatatcagataaatagacacatttgttcatatataagaaatacatagggaaaaaaatcgtaggttacttaccaaatkgataatagctatgtgtctctgtggaggaagagaatgaccagacaagaatgggggtgtgatcagactttatgtgtaaatgtttaataaaggggaatatagtcatgtgctgtttgtggaattcaaagttaattgaaagaggtggggacaacctattccctgaagcaagttcctgtggagtataaagataatttacttgctttgtaattttgtaagtgtgtgaatttgcttgttttttaacaatatgtttaattcccccccgcctctttttttgccttttttctctagggagttggtctctcagtccatgggcaatttcgagtggctacagaaaagtgtctttttgctatgccagaaactgcaataggtaaacaaccagaawtttttttataattacttttagcatcatcttcttttgatatgtttcagagtttactgttgttgaaggaatygatggactcttgtgtgagatgcaacaatgaaaggattttaaaaaagaaattaaataggaagatactttgaagtctatattagctcaatgattatatctgaaaacacaaaactgagaacattaaaggagacattaacacactataaataaaacattaacactatagataaaatatcattaagggaatatatttttgcctttagatctgtgcagttttgagttgtgatcaaaactatcatatgacacttctgagttaatttttgtatatggtgaggggtgtggatcacctatataagtcaaagtttattttgtatatggaaatacaatcattccagtaccaactgttgaaagggtattgttttgctactgaattgcctgtgtagctttgttatagttgtctatagatgtcaatcatggtgccaacaccatgttgtcttggttagtgttgctttatagttaagtcttaaaatcaggtagtgacaatgttccacctttgttctttgtatcttaccaagttgctttggctatataggttctttatctttccatatgtattttagagttacttgtcgatttcaacaaaaaagcctgcagatgaatttagagagaattgacatcttaacactatcgagtcttttcagacctgtgggcaagatataattcttcatttatgtaagtggtctttaatttctctcagcatggatttttagttttcagtttataggtcttatcttttgtcatatttatccataagtatttcatattaatgatatttttgaattgttagttaccagtctaaagaaatacagttgatttttgtatttacctttatcatgcagacttgctaaactcacttattagttttagttgctttagatttgaattcgattctactttactggaattcctaaagagacaattatgtcattyacaagtaagagcagttttactttttcctttcctttttctratctggataccttttatttctttctcttgccctattgcgtagaatagaacttccaatacaatgttgaatagaagtggtgagagtggacattttttccttgttcctgattttaggggaaagcatttagtcttctaccaattaagtttgatgttaaggtatatatttttcatttaagataaggaacaagacaatgatgcctgctctcatcatttctgttcaatgctgtattgaaagtccttgccagagcaattaggcaagagaaagaaataaaaggcatccaaacaggaaaagcagaggtgaaactgtcactgctgatgacatgctcttatatatatatggaaaactccaacagctccagtaaaaaactgtttgaactaataaatacagtaaagctgtrggatataaaatcaacacataaaaatcagcatttctatacactaacaacaaactatttgaaaaataagaaaacartttcatttacaaaagcatcaaaaagaataaaatacttagaaataaatttaaccaagtaggtaaaatctgtatggygaaacgacatccctacaaaaataacaaaagatagctggacatggtggcgtgtgcctgtggttccagctgctcaggaggtggagataaaaggatggcttgagccctgaaagtagaggctgcagtgagctgagatcatgccactgcactgtagcctgggcaatagagccagaccatgtcagycagmcagacacacacacacacacacacacacacacacacacacacacacacacacatctgtatactgaaaactacaaaactttgatgaaaaaaattgaagaagacacaaataaataaaaagatattacatgttcatggattggaagaatatttttaaaatgttcttactacccaaagtgatctacagattcagtgtaatccctatcaaaatcccaatgtcagttttcaaaaaaatagaaaaaacaattctaaaattcatatggaaccaaagaagactgcaaatagccaagataatcttaagcaaaaagaacaaagctagaggctttgtattgacttcaaacactattgcaaagttttagtaatcaaaacagcatagtactggaataaaaatgaatacgtagaccactggaaaagaatagcaagcccagagacaaatccatatatttgcagttaagtgattttcaagaaagatgccaagartacataatggtgaaaggacagtctcttcaataaatgatgtcagaaaaactggatatccatatgcagaaaaatgaaattagacccatacctcatattatattttagaaaaaaacctcaaatggattaaagatgtagtcatacaacctgaaactgcaaaaccactagaagaaaacatatgggaaaatgacgtgacattaatctggtcaataattttttggctttgacgccaaaagctcaggcaacaaaaacaaaaatatacgattgttgtcgtatatacacatgttgttgaatcyatccaacatccaggctacactgatgcaaggggtggctcccaaggtctgtgcatagacaaatagaattacattatgtaaaacgcttctagaatcacagcaaagaaaacaattagcagagtaaagaggcaacctattccaatctctgctcgttgcctagttcccaagtcacttctacatttccaggtatctttatagcaatgccctacttctctggtaccggtttgctgtattagtccattctcacattgctataaagaactacctgagactgggtaatttatgaagaaaagaggtttaattggctcacagttccacaggctgtacaggaagcatgattggggaggtctccagaaatttacartcgtggccaaagatgaaggggaagcaagtgcatcttcacgtggctggcaggagagtgaagggagaagtactgcacactttaaaacaaccagatatcatgagaactcactcattattatgagaacagcwagggggaaatctgcccccatgacccaatcaccttccaccaggcccctcattcgacactggggattacaattcaacatgagatttgaatggggacacagagccaaaccatatcagggcctttcaagaaatttgtcaatttgttagcataaagttgttcataattgcttttttgtatgtgtcgcctgaagttcacgtgttggaaacttaattcccaactcagcagtgttgagagttggtaccactaagaggtgagtggttcatgggggctcttccagtttttgcaggttagttcccgatacagggatgacttcagccccctttccttctgctctcttgtcctgtctcacccttgccttttgccgtgggatgatgcaccaagaaggccctcgtgtgatgttggcaccatgatattgggcttcccagcctccagaactgtgagaaataattttttttctaaattaccccggtctgtggtattctgtcatagcaacacaaaatggactaagacaataatattcccctattatctttttaatatctgtagactccttagtgatttctggctctcttattcttgatattggtcattgtgtcttctctttttttttcctgatcaatctagttagaggtttattaattttattgatcttaaacagatttttgttttcatttattttttattttgctgatttctgctccagtattcattcctcctttcttctgcttattttagattttgtttgctcttctttcatttcctcaggtgaaacctgagttcacttgtatgagatgtgggtatggaattcgattctactctggtttttaatttcagtaatttaaagatgttactacactgtcatctcatttaatttcctacagaaagtcttctctcttccttatttttgttcctgtgtctttttattttctttggctgctcttaagattttctcttgatcacatgtttcaagctatttgattatgatgtgctttggtgctcttcatatttctaatgcttgtggttattgagctacttaggtttataacttctgtcaaatttggaaaattttctgccattatttctacaaatactttttttccacccattccgttttcaggaattctggtcatacttctataaggctcacttatgcttcattcattaaaaacattttttttctctctttcattttagatagtttctgttcctgtgtccttaaattcattaatcttctcttctacaagatctaatctgcccttaatctcatccaggtatttttcagcttatacattcatttcagttttcatctctagaagtatgatttggttctttttctgaaaagaaaaattttctgtgtctctaacttcttgaatatataggttatgtttgtgataactgtgttaatgtttttgtctgctggttcttacatttatgtcggttcttatttttttaaatccccttttaatggttagtattttcctgcatctttagatagctggtaattttttattgaattgtacatattgtaaactttactttgtygggtgctggatatttttgtattcttttaagtatttttgagatttcttctgagatgaatttaaattcctgggaaacatcttaatattttcaagtgttgtaagatttattattattrttwttttttttttttgcagaattggagcagtggtccaactagggctaattatttcccactactggggcaagatcttgctttgtgttctgcacagtgccccatgacatcaatcatgagtttttctagtccagatggtggggaacatgctgtttttagtcctgtgtgggttcccagtactgttctctataatcattttctgtgattctttccttagtctcatgtagtgatatggttaggcgttgtgtcctcacccaaatctcatcttgaattgtaatccccgtaatccccatgtgtccagggagagatctggtaggagctgattggatcatggacgcagtgtctcccttgctgttctcatgatagtgagttcttacaagagctgatggttttataaggggctcttccccctttgctcctcactcttttttctcctactaccatgtgagaaggtccaagcttgctttgccttctgccatgatcgtaagtttcctgaggcctccttagccatttggaactatgagtcaattaaacctctttcctttataaattactcagtctcgggtartgtgaaaactgactaatcatgtagtttcttgacacacacacacwctctctctctctctctctctccattcctaagctaagtacttaaaagagacaccctgcagatctccagagctttctctctgcagctctctccgctctggtactctgttgtgggaattctagctgtcttggtttccctagactcagcttcatcttctcaaatgaggcactgtgctgggcctgggaattcactcaaggcatgaagttggagctgttgtagaatttaccttgcttgttttctgatattcagagaccacttttctttattgcttgatgttcagtgtgttgaaaacactattgatccatatattgtgtctgtttttatagttgtttcaggtagggggataagtctggttcctgttactctatcttgtccaaagtataagtctcccagatggctactttaaattggatgattaaagatgctctcagaggagttgtcctttaagctgagatgtgaatagcaagagtcagctacatgaagaactgagagcagaatattgtggcattaagaaaagttagctcaagacccttaggtaagaatgaacttggcctgttaaaggaaccaaatggaggcaatctgtgtctgaatcgagggcaggagtgatgtaacatgctctcaaaagggtacatgggggcctctggtgaagagttaagatttaaacctaaatatgggaagttgtggaagagtataaagcaggcaatgacataatctagtttatatttatattgtagtaccatgattctggctgctttgaggataatggattgtaggggtagcagagtagaagcagtgagattggataataggttattacattagtctagagctacactgtccaatactgtatagccactagccacaagtggcttttaaaattttaatataaattaattaaatttaaagaaaacaaattcagttcctcagtcacaccagctacatttcaggtgtttaatagctacatatggctagtggctgtcttattggacagcagaaattatagatttcatcattgtagaaagttctgttggacagcacagtctggagagattttggctttggagtagtttggaggtatagagttgaaaagagtgaatagatttgaaacatgttttgggcttaactgacttgctggtatgatgaatcaggaataactccaaggtatttaacttgtgctactttgatggatgaggctgatgagggaaggagcagtgtagttggaggtttgtgaatcagtagttctacttttgccatgttaaatgtgagatacttattatcyatgtggttctgtttaggtggcagatctaagagttcagtgttcacgggagaaggcatgagtgatttcgcagtgtattaaacttttagggctgcataacaaaataccacaaacttggttgcttaaacagtagaaattttttttctcacagttctggagattgaaaggctgagatcaaggtgtcagcagatggttctcttgagccctctctctgtggctaatagactgctgccttcttgytctgtcctcatgtggccttttctctgttcacatgcatccctgtgtttcttcctcctcttataaggacaccagtcctgttggattaggaccccacccttatgacctcacttaaacttaattacctcttcaaaggccctgcttccaaatgcagttacatcgagggttagggcttcaacataggactttttggaaggacacaatgcagtccatagcagggagtaatcagcatatagatattatttaaagtcataggagttaaggaaaatgtatatataggaaagaggaggtagcctaatatggagcttaggcaccttgagcaagaggtcaagcagaggaggtggtgtctgtgagggagactggaaagaagcagaattgggggaagggggagaaaagagagaatgtggtaccctggaagagaagaacgtgttgtcaggatggagggtttttccacttgggcagcatgctgctgaggctctggggcrggaatgagtgtagaatgttagggaactgaaagaagaccagagtggctggagtattgggagtgagtagtaagggatgtagtggaaaaagtggtaaggggccttgaagactttgataaaggtgtttgttttaatccaggagaaataggcagccatgggagggttttaagcagtggatgcaagactctggtaaggatttgtgtttttaaaagatcactttggctattgtgtggagaacagttcagagggaaaatcaataagatgtggtcactgatggggattaaggggatggtgcgagaaggtgtcaaggctgtatacgtgcaccctttattgaggtaggtgatgctggaggaagattgtgggactggcgcggggaggttatgagtttaacttgagacctagctagtttgagatactaagagatatttctgtttacaggagcatgatgctttttcttttaagtctagaacttttttgtaaagtagaactggagagaattttagtgcttgcatttttatcccaacataattaaaggaaactttagaacagatacataaattataaaactagagggtcacagttgtttaagatcttaaacacccaaaggagtgtgctggtaattacttgtatgtatgctattttctttattttattattattattatttttacttgagatggagtcttgctctgttgcccaggctgcagtgcagtggcattagctcactgcaacctctgcctctcgggttcaagcgattctcctgcctcagcctcaccagtagctgggattacaggcatgcgccaccatgcccggctgatttttggaattttagtagagacggggtttcactgtgttggccaggctggtcttgaactcctgacctcaggtgatctgcctgtcttggcctcccaaagtgctgagattacaggygtgagccaccgcrcctagccttatatgctattttcagttgttacccgtagataatttttaaatactgatggttaagaaaagggtaaatgcaaatgattttattaggtataaacctgttcatttagtaggacttgtgattattgcatcaatatttaaacatcttgaatattagataattgactaaggttgggacatgatttaaatggtaataattttgctataataggccataggttatgtatttttttttcctgtgctgatttggaaataaatttttttgaaatttttacctattttggagattcttcaaaagtagatcagtggtaagaaaatttaggtaacattgagtacttctaatatacaaaacattgtgtcatcaaatactttactgacttctatagaaatgagacatgaaggttttgaaaaatacccaagttagcacagttyatagcaagtcttttgtgatattgattgcagtgtatagtacttagtttaataatgtttgtaatgtatattcaagctccagagagaartggtttgtgtgatctacggcaaaaaggttatatttatctttttcatttgaatcaccattatctctttttgttacatttaattacaggactgttccctgatgtgggtggaggttatttcttgccacgactccaaggaaaacttggttacttccttgcattaacaggattcagactaaaaggaagagatgtgtacagagcaggaattgctacacactttgtagattctgaaaaggtactttttcagatgtttgcattttgtattgttggaataacaacacaaaatagtgcatgggaaggtacaatgggtggttgagagccacagacttctggtgaaatcgtggtgtgaatcctggacctattagtttatagctgtgttwccttggagaaagtgcataagctctctaattctgtttcctcatatgcaaactggagataatgatacctggattcagggttggcaccttcagtgagtatttttaagtgaacaattagagtctcttaaaaaaaaaatcatgcctaccttaagaaagtctaatatgtacaaatctaaatttatatataaaaagatagccttttattttatgaggacattttgaaggcttcttttggttatgagtttccctagcgcattgaaagtaattgcatttgacttttctaaaacacatctgttacaaggaacacgttacttatctttgcttttttttttttaaaaaaaaaacaatgtggccaattttctcagcacaggataacatagtggaaaagaatatatagatagtttgagtttaagtcttaattggaacttagcctcttttgccccccattttcccgtctgcagaatggagatgacactattacatagtagttgaaactccttgtgttacatgtggcagaagacccaattcaaggtagttttgcctcagaattcccagcaagagacttaggatgtattttgcttcacctggtttggttcactctgactggactggcttatcttattcctgaaccgtatgagtaggtagaatataccaactggcctatcctaggtaatgcacactctgtccttcaatctgtggggtaaagtcagctttcaaggaagcacatggtcatcagatgaatagctgatcagatcttaagggaagggtgttttaggatayggcaaggaaagctataaaaattaaattagaaaatttatgttacatgcttagcccagtaactgacaaatagtaaacactcaaaatttaactattattaataattttaatgcagttttatrtttttagaggttgccrgatttttcattgagagtctcttntatgttacaaaggatggccctttttatcctcatatctgtaacattcttctgttttgggtaaggatgccagagattatactgacagttagactatcatgtgagtcccccaaggactttttacaaatgatgatgatttattctcacacgtcctctttggccattgaagtaaaacagctggatagcataaaaatgtactgtttggtcactaatagaattctcttcataaactttataaattggctgtggaaatttttatgttgatgagctttggtcttgtttctcacactgttacagattctgtaaaatgtatgaagcatacaaaattgaagattgtctctgtaaactgttatgaaggcctttctatcatgtttggccaaagattcagatctttctctgtgttgtgggcatcctcagtcacattgagtagtctcatgcttcccttgagctataacaggaaggaaacatgggcatgtgattatcctgtctggaagggacacccttgattacagtggaatttaggatacgagagagctgatgcataacccctttctttgtcaatgtgttcaatgctagtatctgcaatgagtagacagacattctcagggctgtagaggatatgaaaaagaggaatatactttggggatgcgattagaagtgggtacaaaagataaataaccatctctctcatctggcagaggtaaagtatggtaagtgtaaaaacaatacaaagaaaatactcaaagaattgaaaggaggaagagcttacctgtaagaaaggactagaagcttttttatgaaggttgcagtacagccggcyttaaggtgagtattatcaggaaaaggtattgtcaggtaaaggaaacatttaatgaaatcacaggggcaagaaagcattagctatgctctgggaacagtaaaaagtcctgtttggctcagtgtagggtagattaagtgagggattagatggataaataagtgaagctatattatagtgttgtgcattgtctgtggtagccactaataatttgtggcaattttggttaaaattaattaaaaataaaataaaatttatatgtaggtctttggttccaagtactcaataggctgagaaacaaaagtytctatttctccttcttaatttcttccatctttatccattcctttgaaggctacatttgctgtgtgggaatacctgttcattcaacttaagtcaaaatttctttcagtgattcacctgaagagacagcttcataatttaaagtcaagaattctaaaaaagaagatgagatttttataaagctttctatgtttctattggatctaagatctttcctttttttctgcctcccctttagttggccatgttagaggaagatttgttagccttgaaatctccttcaaaagaaaatattgcatctgtcttagamaattaccatacagaggtaatcttgttaatattctaacctcaggttttaattcatggggaggggaagtgattaaaaaactggcagttggtgaatattatagtttgtaaatataaataaatgtactaaggatttatttactttaaagygtggcrgaagaatcagtgcttcacagttgttagtatagccagctaataagatgacttctttcctgtgcagctgcatagctgtcttcccactgctggttaacttcagtgcatagccttgtgatcattctttgcaagggttttggcatttctgtaaacggtgttcaatgttaacrctatttgtggagatgcaaactcttgacatttatttatatttaataaagtttattgcagcatgtatttttaattccttacttatgttgtctgacttgaattttcttataagagccaagaatctttaaaaacactccataacttctagttaaacatgattgaatacatgctgcctcctaaaacaccattcaaaattgtaataagtgaataagaaaaggcataaacccacaaagacaagtagaacrgargaggagacagtggcagacatgagatgttagtattttggaagcttgaaatcagcaggatgagtgctgctaacttaaaccaaagaactctgaaagccaataagaagtcagctgattgttgctgtagacccttctaaagggactaggtccctctgaagactagkgtgtagaatggggcagaaaaacaggaggatttattataagttttttttttgttttttttttttgttttgaagcagagtctcgctctgtcacctaggctggagggcggtggcgcaatcttggctcacggcaacctctgccttccaggttcaagcgattctcgtgcctcagcctcccgagtagctgggattacaggcgtgtgctaccatgcccagctaatttttgtgttttagtagagacagggtttcaccatgttggccaggctggttttgaacttgtgacctcaaatgatccaccctcctcagcttcccaaagtactgagattatagccatgagcactgcacctggcccttccacaagtcttyttgtacaactgagagtagctatcttccagtagcctggcrgaagagtagatacttactccttagagaaaccaaatcaggcaggtctagctgacagtagagactgatgaagtactgtactgatgagaggtgagatatactaagttggaagacctctgtcccttttccctagttggcttgcagaaccgctgcatcccaccccactcctaagcaatacattggaagaaaaaaaaacccatagacgttgaaattcatggaccccttaataacacatcttgcctgatcmtcttataatgtaacacaattgagaatcccataacttgcaactgacattagaygcaaagcttcctaattttagtgctttgcatagaaaaacaaatattcctaggccaaaacaaacaacaaaggcactggaaggaaacagttaatgcaagaagaaggaaacttagacaaataccaatctataactgttaacttaagaggaaaatattttacctsttaaacaacaacagatgttataaaggtaattcaaagaataatataggcatgcctcagagaatctgaatttggttccacaccatggcaataaagctagtcacatgaatgttttggttttccagtgctcataaaaacttttacactatactgtagtctattaagtgtgcaggagcatcatttctaagcacaagtacgtatcttattaatttatarttataaaataatttagctaaaaatactaatgatcatctgagctttcggtgagtcataattgttttgctgctggagggccttgcctagatgttgatggctactggctgaccttggtagtggttatgcctgtaaaattttaaagatgataacaaaagttgggaataaaaaacccagaacagattaaaatctgtggttgaggaaaactctaacagaaaaggataattaaatagaaaagggagagaatggaaaactagaggtattattccaagaggtccaaaatctaatcattaggaattcatagtaaagaagatagagggaaggaaatatttggagaaatagtaccaaataaattacccagaactgaagaacatgagtacagattggcagggccaccaagtacttggtggagagaatatgaatacagagcacatgaggatttcacttgtttttatcagagcatttgatagtctcctgttgtcgaattgagtaaatatgtgatgaattatgctttgcggtggttgaaggggcttatcaaagagttctactaaatgtataggagttagtttgtagggaagtcatcttagacttattcagcatttttctcaagtgatttggtgaccactgatagygttttgatcaagttgatttagaactaagaaaaacaagttaaattaggaaaaagaatatggatgaaaaaacaacccttagagtttagagtgatctgctcaatagtaataatgtgaaatttaataaagataagtgcgaatcttgtgttttaacccaaagtgctaaattcataagtacagaataggagaaacacagcctacaatggcacaggtttaaaaaaaaaaaaaagtcttatttaattggagcttagtgtgaatcagctgcaatcataggcctgtctcaacactaactcagagttagtccaattaagaaaagtatatccaaagcaatcaagggcctgcagaaccctcttatactttgctaccatccagccacacctgcagctaagatacgtgtcccgtacttgaagaatgaccttgataaactggaacttgtccatgagaaggacctggatcatgaggggacacaaaactgtgtcatgtgggaagtggttaaggtgaaagagattaactagaactataaacatgctagcattggtttttgttccagaattaaaacaacaacagaaacctaattattcagttgttctagcatttgtgaactcctccttgagaggtgctttctctccctgaaggtcacagctgcaggcataccaggtatatggtgtgaatttctggctaggatggaaatttgggcaggttgacctttcaggtcccttacatattcacagatatattttaatgataatgtgtcaaatgtaatagtggttacatatatttatacatgtaaataaaaatactagaacatttttgccgttgatacttttaagagctagtctagagttctacatgctgtctgaattttgatcatacagcggtagttatttatgagacagttagatgtaatttgacygaaagtgacaagtgacaatctttcacaaagtgtatcattaaatatgaatttttaaggattaaaaaattgtgttcaaatttattaaaagatttttcttttcaaacagtctaagattgatcgagacaagtcttttatacttgaggaacacatggacaaaataaacaggtacctaaaaagagatctcagttatatattcctttagaaagactatgttaaaatgaatttgctaacattataattaccattttaattacaytgtgtttgatagtgcactgaattctgagatcagaaagtatagagctttccttcctttttttttttttttttttgagacagagtctcgctctatcccccaggctggagtgcagtggtgcaatctcagctcactgcagcctccgcctcctgggttcaagcaattcttatgcttcagccttctgagtagctgggactacaggcacctgctaccatgcctgtcgaacttttgtatttttagtagagacagggtttcgccatgttggccaggctggtctccaactcctgacctaaggtgattcaccctcctcgccctcacaaagtgctgggattacaggcgtgatgcctggccagcatagggtttttttttcacttacctttgaaagtagcttctttccctctctttctgggtgaaataaattcattatatttaagtaatctaccatgagaattcatcttagtacaaaatacctttttttttaaagtggggaagagcagctagaaaataataattaacttttatttttgtaaattcatcttttctgaagatcttaccaagctgaacagcaaaaagattttgtgcagtgatttgaatttatattagtgcaaaatatcttttttttttaagtggagaagagaagctagaaaataataattgaattaacttttacctttttaaattcatcttctctgaaggtcttatcaagccgatcagcaaaaaaggttttgtgtgatgatttgagagattgacaaactggctttgggaaacaagaggaggaaaagtattagaaaataagacaaccatctctacaatttagaagcatcgatttttcattgttgaattgtttctttacatggaaatataacagatgcaaaagaaaaaataaaatttagattttattttatgttagtgaaggtagackgcaaatgcttacccagggaagcaatgctctctttcttttcacgtcctgttaaagaggttagacaatttttcattattgaaacagaggtgggggaaagcctatgttcagattcatcgtatgttagaaacaggaaatcacttacacattggtgaaatcacatttcctttttttatagttgtttttcagccaatactgtggaagaaattattgaaaacttacagcaagatggttcatcttttgccctagagcaattgaaggtaatattggaatcctttctgccctgagtgaacatagtgaagtccggtgacagggaagcctctctaagggggtattagtrctccattggtggtgacatagcccatgcattgtgttttcttttttcccaaatttaggtgagcttcagaaatcagttccactaaccytgacctaaatccaagtgccgtgtctacctgctggtcgttgagggcaaagccaatctagttttatgtcctttgaatgtaacagaggactttagtaagcatgcttcatttccaaatagtcctccttgtcctatggaggaaggttttagggacattttaattagaagggctgggtcactggagattagtcaccttatgatacattgcaattgggacattgatctataaattctacttaatatggtctttcyaaacaggaggtttaattaaaaagtgatcttttttaaacaagcaagagactctatctcttgccatagctgagtcttatgtagtgtttctgtgttaggtacactttgatctttttgacacataactgttaacagcagaagagccatttttgtataaatgtgtacataccaggtattgacattcgtggacctctagtatgattatgagacttggagtatttcagacttctagacaaaggaaagaaaaggtatgtttccttatacttaaaaggtgttttagcttgtcttcatctgatagcatttttcgtatatatatgtgtgtgtgtgtgtatatatatatatatattaggctccacatcatgattccataatgttttctatttatagatgtaatcatagcatttcagttgtcaggaaacatattgagaaaaaattttgatagtcttacctgtaaaggtgaaaacatttcctccattgtcactgtattttttttgttttcgtttttttgagacagaatcttgccctgttccccaggctggaggacagtggtgcaatcacaactcactgcagcctcagcctcccaggctcaagcaatcctcacacctcagcctcctgagtagctgggactacgggcgtgtgccaccacgggtggctaattttttgtatttttttgtagagacaaggtttcaccatgttggccagactggtctcgacctcctaggctcaagtgattcacccacctcagcttcccaaagtgctgggattayaggtgtgagccaccacacccggccttttactgtattcttaagggggaaatccaaagttaatttctcccatgggatcttatacagtattaaaattttgttaactttcaaggatgggcataaattagagcaggtagaccagccatttatttgcctaactcacaaaagtagattgttaatattaacaacttccaggaatgtttacatcaatagtcattttataattcaaggaatccgactttaagttggtgtatcagggttctctagagggaaagaactaataggagatatgtatataaaggggagtttattaagtattaacctgcacaatcacaaggtcccacagtaggctgtctacaagcttgaggagcaatgaggaccagtctgagtatcaaaactgaagaacttggggtctgatgttcaagggcaggaagcatccagcatgggagaaagatacaggctgggaggctaggccagtctctcctttacacggttttctgcctgctttatattctctggcagctgattagtttgtgcccaccagattaagggtggatctgccttgcccagcccactgactcaaatgttaatctcttttggcaacaccctcacagacacatccaggatcaatactttgtatccttcagtccagtcaagttgacactcagtattcaccatcacaagtccaccccttgtcaacttgaacccatacacatctcctgagtcttcaaataaagacaataataaggtcataattatgcctaacataatgcaactaccctttgtacgaccagaaatgcaccagttcccaacccaaataccattacataaagttagcagtacttaaatgccaatatgaagtcagtaaatcttatgtcacatgataaaggaaaaggaaataaagatattttcttagtacaagtatatgcatgcacaaacatgtttttagcaaaagatggaggaaatatttatgacaatcacagtctccatttctgcagctgatcacatggttgtagctagtattgatgactacctcctcctactacccattctgtattccctttgtcttcagcaagcacctcatgtcaacaaaaaggacacccacacaaaaaccccattcagaggccatcagcatcaaagctcaaaggtagataaacacacgaagatgaggaaaagccagtgcaacaatgctgaaaattccaaaaaccataatgcctcttctcctccaaatgattacaactcctctccagcaagggcacaaaactggacggaaatgagtttgacgaattgacagaagtaggcttcataaggtgggtaataacaaactcctttgagctgaaggagcatggtctaacccaatgcaaggaagctaagaacattgataaaaggttacaggaactgctaactagaataaccagtttagagaagaacataaatcttcttgaagaacgagtatcaataactgaatcaatcaagcagaagaaaggatatcagagattgaagatcaacttaaataaaatgtgaagacaagattagagaaatgagaatgaaaaagaatgaacaaagcctccaagaaatgtaggactatgtgaaaagaccaaacctaggattgattggtgtatctgaaagtgacgggagaatggagtcaagttaaaacacacttcaggatattgtgcaggagaacttccccaacctagcaagactggccaacattcaaattcaggaaatacagagaacgccgcgaagatgctccttgagaagagcaaccccaagacacataatcttcagattctccaaagttgaaatgaaggaaaaaatgttaagggcagccagagagaaaggtcgggttacccacaaagggaagcccatcagactaacagcagatccctgtgtagaaaccatacaatccagaagagagtgggggccaatattcaacattcttgaagaaaagaattttcaacccagaatttcatatccagccaaactaagcttcataagtgaaggagaaaggaaatcctttccagatgagcaaatgctgagggattttgtcactaccaggcctgtattacaatagctcctgaaggaagcactaaatatggaaaggaaagactggtaccagccactgcaaaaacataccaaaatacaaagaccaacaacactatgaagaaactgcatctaatgggcaaaataaccagctagcatcatgatgacatgatcaaattcacatgtaaccatattaaccttaaatgtaaatgggctaaatgcaccaattaaaagacacagactagcaaattggataaagagtcaagacccattggtgtgctggattcaggagacccatctcacatgcaaagacacatataggttcaaaataaagggatggaggaatatttaccaagcaaatggaaagcaaaaaagcaggggttgcaatcctagtttctgataaaacagactttaaaccaaaagcaatcaaaaaagacaaaggcattacataatggtaaagggatcaatgcagcaagaaaagctaactatcctaaatatatattcaccaatacaggagcacccagattcataaagcaagtttttagagaccttcaaagaggcttagactcccacacaataatagtgagagactttgaacaccctactttcaatgttagattaatgagacagaaaattaacaaggatattcaggacttgaactcagctctggaccaagtggacctaatagacatctgtagaactctctaccccaaatcaacataatatacgttattttcagtaccacatagcacttattctaaaataaaccacataattggaagtaaaacactcctcagcaaatgtaaaagaacggaaatcataacagtctctcagaccgcagtgcaatcaaattagaactcaggattaagaaactcactcaaaaccgcacaatacatggaaagtgaacaacttgctcctgaatgactactgggtaaataatgaaattaaggcagaaataagttatttgaaaccaatgagaacaaagacacaacgtaccagaatcacaacacagctaaagcagtgtttagagggaaatttatagcactaaatgcccacatcagaaagtggaaaagatctaaaattgacacccttacatcacagttaaaagaactagagaagcaagagcaaacagattcaaaaactagtagaagacaggaaataacaaagcagaactgaaggagataaagacagaaaaaaaacacttcaaaaaaatcagtgaatccaggagctggtttttgaaaaggttaacaaaatagaccactagccagactaataagaaaagagagaagactcaaatagacacaataaaaaatgataaaggggatatcaccaccgatcccacagaaatgcaaactaccatcagagaatgctgtaaacacctctccacaaataaactagaaactctagaagaaatggataaattcctggacacatacaccttcccaggactaaaccaggaagaagtcaaatccctaaatagaccaataacaatttctgaaattgaggcaataattaatggcctaccaaccaaaaaaagcccaggactagatggattcacagccgaattctgccagaggtatgaagaggagctagtgccattccttctgaaaatattccaaagaatacaaaaagagggactcctccctaactcattttatgaggccagcctcatcctgataccaaaacctggcagagacacaacaataaaaaaatatttcaaggccaggtgcggtggctcatgcctgtaatcccagcactttgggaggccgaagcgggcagatcactcaagttcaggagttcgagacccgcctggctagcatggtgaaaccctgtctctattaaaaatacaaaaattagctgggcgtggtggcacatggctataatcccagctactcaggaggctgaggcaggagaatcagttgagcccaggaggcggaggttgcagtgacctgagaccataccattgcactccagcttgggcaacaggagggaaactctgtctcaaaaaaaaaaaaaaaaaaactacaaaccactgctcaaggaagtaagagaggacacaaatggataaacattctatgcttatggataggaagaatcaatatcatgaaaatggccatactgcccaaagtaatttttagattcagtgctattcctatcaagctaccattgacttttttcacagatctagaaaaaacaatttcatatggaaccaaaatagagcccgtgtactctagagaatcctaagcaaaaagaacaaagttggaggcatcatgctacctgacttcaaattatactacaaggctagagtaaccaaaacagcatggtatagtggtaccaaaacagatatatagaccaatggaacagaacagaggcctcagaaataacaccacacacctacaaccatctgatctttgacaaacctgacaaaaacaatcaatggggaaaggattccgtatttaataaatgttgttgggaaacttggctagccatatgcagaaaactgaaactggaccccttccttacactttaggtgaaaattaattcaagatggattagacttaaacataagacctaaaaccataaaaaccctagaagagaacctaggcaataccactcaggacatagtcatgggcaaagacttcatgactaaaccaccaaaagcaattgcaacaaaagccagaattgagaaataggatctaattaaactaaagagcttctgtacagcagaagaaattctcatcagagtgaacaggcaactcacggaatgggagaaaaattttgcaacctatccatctaaaggtctaatatccagagtctacaaggtacttaaatttacgagaaaaaaacaaccccatcaaaaagtgggtgaaggatgtgaacagacacttctcaaaagaagacgtttgtggccgggcgtggtggctcacgcctgtaatcccagcactttggggggccacagagggcggatcacgaggtcaggagttcaggaccagcctgactaatatggtgaaaccatgtctctactaaaagtacaagaattagccaggtgtggtagagtgcatatataatcccagctactgtggaggctgaggcaggaaaatcgcttgaacctgggaggcagaggttgtagtgagccaagatcaccctactgccctccagcctgggtgacaagagcaagactccatctcaaaacaaacaaaagacatttacacggccaacaaacatatgaaaaaaagtttattgtcattgatcattagagaaatgcaaatcaaaaccacaatgaggtaactatctcacaccagttagaatggagatcattaaaaagtctggaaacaacagatactggcaaggatgcagagaaataggtacacttttacactgttggtgggagtgtaaattagttcaaccattgtggaagacaatgtgccgattcctcaaggatctagaaccagaaataccatatgacccagcaatccctttactgggtatatacccataggattataaatcattctactgtaaagacacacgcacatgtatgtttattgcagcactatttacaatagcaaagacttggartcaacccaaatgcctgacaakgagagactggataaagaaaatgtggcatatatacgccatggaataccatgcagctgtaaaaaaagaatgagttcatgtcctttgcagggacatggatgaagctggaaaccatcattctcggcaaactaatacaagaacagaaaaccaaacactgcatgttctcactcataagtgggagttgaacagtgagaacatattgacacagggaggggaacatcacacactggggcccatcagggtagggggcaaagggagggggagagyattaggagaaatacctaatacatgaggggcttaaaacctagatgacgggttaatgggtgcagcaaaccaccatggcacgtgtatacctatgtaacaaacctgcacgttctgcacacgtatatataaatatatatataaatgtggggcacctagaacttacacattgcagcaagaatgcagtttggcagtttcttacaaagttaaacataaactcaccaagacccaacagccccactctgcgagatttatccaaaaaagtgtaaacacgagtccacacaaatgmttatatttacatgttcattggaactttgttcataatagccaaaatctagaaacagctgaatgcatattaattactgaataaacttattgtgatatatttatacaatggaatactacttctctaagaaggaatgagctgctgctacacacagcatgataaatcttggaagcagtatgtcaacaaaagatggtggatgcaaaggaccactcattgtatggctttatttttatgaaattctagaaaagataaaagtatttgaatagaaaacagatcagttgccagagggtaaggagaactctttggagtgttagaaatgttctatatcttgattgtggggctaattatacaactgtatacacttatcaaaactcatagaactatgcacttaagtgaattttattatatataatttaacatcagtagaactatttaaaaaataaaatgacatactgacagttggcctatagatgtatgcattgtatttgctgaatgtacccattatagtataccatttattgctattaataagagcaatttaatgccagtgttgatggatacattgtgctttggggaaagagtatgataaaggggaaaatgcatcagtttatgtagacagaagagaaaacagttttctagttcactgatgggccttagcgacccttaaatgctaccattggcatttaggaaacataaaatagtagtacttgtatctttagatagtatcttttcattttatataaattgttaatgcctttaagaaattaccagaaaagtcttaagatcaggttgcaaaaggcagccttcttgcactggctctaagccttttattgtagatacaaaaaagaatattagtgccatgttttgaaggtctgttttggtctttatatagtaatatgacatttcagattggtgaaaatatactaaaaaatagaaatatttctgtgaaactgcactagtcaatgaaatagacattgacttgttcttgttttaaatattttgtatttgtattggtttattgtcagtcggaacacttctggaaatgatttatagatatatgtttgtaaggtttaagatgattacttagaaaaatatttacagttcaaagcagaacataactcttaaatatgtttgatttaaactagcttaaaaaattaaaaactaacagagtataatagagcttttgtcacttggtttcaatataacagatgatgtgacttattattaaaatacttgtgaattaaattttaccttcagcttagtttcatttaaccctgaggacaaatgccaagagatatttcccatttaagccttacaacaacacaacacagctccagatcttcagtggcaatattgtaaaataccttaaaatggcagttactccatgaaggtgtgtgcacctctgtctgcttgtctccattctgttacgtctttttctctcaacctcttaccttttgctttattgagtgatatctagcacacaccattaactcctggaagcttgcttaacccttatctcctggcacctatgacaaagtatttcatatgataggtatgatgaatgaatgaatggtgccacagcagccactgaagtatgaaaatgacaatccagtatctgttctcagggagtttgcaatctagtggaacacacacataaacaattacaatgcagtgtggcaagtgtgtctaaagtagaggcacaaattattatggatgtccataaaacgatggagggattctgagaggcctcatgaggaagtgtaatctgagcaaagtctatgtgagttgccaggtgccaaagggtattccagagagaataccacatacttagacaaatgtttggaaagtgcagagcaaggaacaaggagtaacataccaggaaatacggccaaaaagatgactgggggcagattgtaatggtccttatgttatacttaactgcttgaattctgtgagttttttctgagtatgcatattttaagaactcatgtttttaaattgtaacatacagaaaaatacagaaatcatatatttatacctcaatattttttcacacatgaactaaagaaatgttggaggctgaaagattgagggtcgtgattaactcagtatcctaccactggaggctatatgagtaaacaacaaactgttctcataaatgcagaatgttggcaaactgacaaactgygtatgccacccataaggaatgctgagggcagtcatgtcccaagtgcaatgtttcttgagattcggtacatctgaagcctgttagtaataatatgaacctgtgatyaattaagcagctgaccaatcattacctcttcctccttgctcttgttacccaataaatacgaagggctgtagaagctcaggcactgcctttgctcactagaagcagggagccctcttcttcttcccctggccccttcctttaaaacagttacttttgtcttaagttttcatttctagttcatcccccttcactcagtctcgtaatgacagtctcaagtagtaacagttgtagtgaaggtctcaagtagtaattgtggcagtctgccacaaagaaacatttacagagtgccccagatgtcttacttgtgtgccctcctactcactacctcttctccagaatacataaccattatactggcttctcacaccatacgttttgtttgaggtttttttttttttagrgtcttgctctgtcacccaggctggagtgatcttggctcactgcagcctccacctcccaagttsaagcaattctcctgcctcagcctcccgagtaactgggattacaggtgcccgccaccatacctgctaatttttatattttttagtagagatggggtttcaccatattagtcaggctggtcttgaactcctgacctcagttgatccacccgccttggcctcccaaagtgctgggattacaggtgtgattgtttgaattttatataaatgaaattgtatcattttgtgtctagtttcttttgctcagcactatatttgtgagattcatccagattgtacttacatgacagtagtttgttcattctaagatgctccattgtttgatgtattgcagttcacttattcatttctactgttggacatttgaagttatttgcaggattttactgttagaaataattctgctgtaaacagttttggccttgtgataacatagacacacatttctatgggttatatacccagaagtagtgctataaaatcatcaggtaggtgtatattcatcttcagtagttactgttaaataattttctaatatagttgtatcagtttacattcaagtactagttgctccgcattctcacccgcattttggtggtggtggtggtgtttttgagatggagtttcactcttgttgcccaggctagagtgcagtggcacaatctcagctcactccaagctccacctcccaggtttaagctattctcctgtctcagcctcccaagtatctgggattacaggcatgtgccaccactcctggctaattttgcatttttagtagagatggggtttcaccatcttggccaggctggtctctaattcctgacctcatgtgatccacctgccttggcctcccaaagtgctgggattacaggcgtgacccaccatacccagcccaacatttgatattgtctttttcattttaatctttctgggatatataaaatagcatgacattacggttttaatttgcatttccatgttgattaatgaagttgagcaccatttcatatatttatcgtccatgtgggtagtctttcttatgaagttcctgttaaatctttatgattaatttgtaggaatcctcctggatgtaaatcctttgtctgrtaatacatattgcatatattatcctctgtattcatctcttttcacactgctgataaagaygtaccccagaccaggcaatttacaaaagaaagagatttaatggacttatatttcattgaggctggggaggcctcaaaattatggcagaaggcaaggaggagcaagtcatgtggaagagggagcttgtgcagggaaactcctttttataaaaccatcagatcttgtgagacttattcactatcatgagaacggcatgggaaagatctgcccatgtgattcaattacctttcactgggtctgtctcacaacacgtgggaatttaagatgtgatttgggtggggaccacagccaaaccatatcatcttcttttctgtgacttgccttttctctctcagtggtgtcatatgatgagcagaaaatgttaattttaatgtaatccagcttatccttttttcctttatagttcttttatatcctgtttaagaaatcactgttcctccaagtttttaaggaataaaacatgttacatatgaaggcttcaggtttctcaacaatattggaagctaaaaggcaatggttcattgccctctgtgtcaagggtccccaagatcactcctgagtttggcaacccactagaaggactcacaggactcagcatatatatattattacattttgttttttgttatttatttattttttttgagatagagtcttgctctgtcacccaggctggagtgcagtggcatgatctcggctcactgcaagctccgcctcccgggttcacgccattctcctgcctcagcctcccgagtagctgggactacaggtgcccgccaccacacctggctaattttttgtacttttagtagagatgggttttcaccatgttagccagggtggtctcgatctcctgacctcgggatccacctgcctcggcctcccaaagtgctgggattacaggcgtgagccaccatgcccggcctctattattatgttttttgtcataaaagtaatggcaaaaactacaattgcttctgcaccaacgtatagttgtactcttgtagcaaaagaatacaaaccagaatcagcaaagggaaaagcacagatggtggaatctggaggaaaccaggtgtaagcgcctaagagtcctcttccagtgggtacttgcacctccagcaactagttgagatcttgtgaagtgcattagagacttggcacacaggacttttattggggactggtagtgtaggcactctgcttagcacatacctcaattccagactgccaaaagggaagtaggtgttgaatcttctttgtggaagacttatgcttgcatatatttcattggatttatccctagatatttggtgttttttgatgtatgtttaaatggtgtcattttaaaatttaattttctattttttgatatatagaaataaaattgaaattaaaaaaaatttttttgagatggagtcttgctctgttgcccgggctggagtgcagtggcacagtctcagttcactgcaaactccacctcctgggtttaaaggattctcctgcctcagcctcccaagtagctgggattacaggcacccgccaccatgcccagctaatttttgtagtttttagtagactgggtttcaccatgttggtcaggctggtcttgaactcttgacctcaggtgatccacacaccttggcctcccaaagtgttaggattacatgtgtaagccaccatgctgccctgaaattaagttttatgttttgaccttatacctaatgattttgctaaactcactttttttttaagtgagttatttatggtttgcagattaggttgaattttcatcatttgtatacataatgtcatatttccttcttcctttattccttcttctccttttcttctcctctccctctctcccttccttcctccgtctcataccccctttatttctcccttctcaccagcttcctatacyggctagcactgccagcaaaatgttcagtagaggtgatgatagctatctttgtcttattcccagtcttaaggggaaagcttttaagaacattaaaaatgttgagttttgtaggttttctgtggatattctttgtcagtgtgaagaagttcattctgtgcctagttggtaaagagctttttcggtaattactgttttgaatgagagttggattttatcatgcttattttgctgcgtctattgagatgatcatatgatttttgccctttattaatgtaaattrcagtaatttttgatgatcaaatgtttttaattttgaggaagtctgatttrtctttttctcttttatsagtattgatttctgtgtcctaagaaaacttcagctacttgcagaatatcttcctgtgctttcttctggaagatttctagttactrcttttttgtttaggtctagatctatctcacattaattttttgtgcrtagtgtaaaatatagaagtccaggttaattttttcccacattattatataattgttccagcacagtttgttgaaaagacttctttcttccccattggattgcattggtgtcttttgtcaaaaatcaaatgacattgtagatagatgggagtctgtttctgggacaatggcttttgaaagaactaattwtgtatttctggaagaagccttattttttcgtgatacgtgttttacatattgttggatttgatttgctagtatgtttaggatttttgcattatgtttatgagagattggtctataatttttcttgtaattgtcatgtcaagttttagtaataaggttatgctagactcatacaacaaagtaggaaaggtttcctgttttccctgttctctggaaaagtttatataaatttaagatacaaattttattagtaaagccatctgggactgaagtttcctttgtgagaaggtttgtaatttatagattatatttctttttttgagactgagtcttgctctctcgcccaggctggagtgcagcggcacgatcttggctcactgcagcctccacctcctgggttcaagcgattcttctgcctcagcctccctagtatctgggaatataggcacgcgccaccacacccagctaatttttgtatttttagtagagacggggtttcaccttattggccaggctggtttcgaactcctgatcttgtgatctgcccgccttggcctcccaaagtgctgggattacaggcgtgagccaagattatatttctttaataaagaatacgtgacttttatttaagttgtcagatttattggaaatgttgttcgtaatatcttttgatgtctgtggtacctgtaatgattccttttttactactactgttttttttctctctctcttccacccaccatccccatttactttatttttccatctttatatttycaggctctttattggtcagaattcttagttgtagaaaagagagttcacaccaggtactcttaagcagaaaatgttttattaaggggcacagacagcacagacagcttacaaaagtgtaggggacccaaacagaaaccctttaattttactgattagaatggggagcttacaacagaggcaactattaaaatgtgcagaaggtattcagaagattgtgagcaggcatatatgagagatttcattacaagctctctacagtaaccaaccataatgcagaatagaaattcattattttggacttttgctacctgtcaatttaactgttacgtttttacggacttgttaaaaaagtgattagatagactgttttagattttccttaaaaaaaaaaaatccagccatataagatgcttctaatagtagtgtctcttagtttagttttattttctgtgcactatttgcccttgtagaaaacattgtttctgctgaaaatgctttcaggtagtgtatgttttgacctgttttgcactgatttatttctcttgtgccttgcaagtgtttaaaaaaatttgcaattcatattatttctgtactataatatgaacaaatgctttatcctcccctctgacctctgtaatgtggaaagaacattgaatattacttcattggttgccatctgtggcttgcttacacttttttcttgatggtatttttagcagttcaaagaaagtttttagaaatagtgaatttggtttctgaattgaaggattagaaagtttatctcacagcatgttagcagattggaaatatgctacagcctttattcagaggagagcaaaattacacccatgtatattcttcctacacctttaagcattcctttgagttggataggagataagccaatttgttttctttaattaggctcttaatccctcatttgctgttcattgtctctactctgtacttaatggaagtcaatatcagttctgtttttaatgcattttttaaaagtaaaatgatctaaatatacatgaattccaaacagttagagttctgtattagggttctccagagaaatagaaccaataggagatacataggaaatctcaggatatagcctctacctttgcataccccatacagtaggcatgtcacactgtatattattgggtgttctgggagacttttgaagggagtggcaaaggcaatatcctgagttttccttttgttagaaatttcccatgtctagataaaacttgtcaaaagaagggttctttggggtgttacccaaagggcagtgattatarttctgataatgctctttaagtgcaagaatcacgtcctctttgttattgtctcccctgtagtgcrttgtaggtgctcagcaatatttttgaattgaaatgagaatatgaattgtttgataaaggagaaaagaagttgtctctttgacaataggagacaactgattttccttccccctaatctttaaacaaatctttaaagggtcagataaatgggttgagccacttaccagtgttccataagaagtagaaatgtgttcactaggttgtatgggtacaaaattatatcaatacacatttcttgcatagctaaagatccaagtcccaataatttatcaaattttctagaacagtctgtgttctctctctctctttttttttaattatacttkaagttctagggtacatgtgcacaacstgtagctttgttacttttgtatatgtgccatgttgctgtgctgcacccattaactcatcatttacattaggtatatctcctaatgctatccctcccccctccccccaccccacaacagtccctggtgtgtggtrttccccgctctgtgtccaaatgttctcattgttcaattcccacctatgagtgagaacatgtggtatttggttttctgtccttgcgataatttgctgagaatgatgatttccagcttcatccatgtccctacaaaggacatgaactcatccttttttatggctgcatagtattccatggtatatatgtgccacattttcttaatccagtctatcattgttggacatttgggttggttccaagtctttgctattgtgaatagtgccacaataaacatatgtgtgcatgtgtctttatggcagcatgatttatactcctttgggtacatactcgrtaatgggatggctgggtcaaatggtatttctagttctagatccttgaggaattgccacactgtcttccacaatggttgaactagtttacagtcccacaaacaatgtaaaagtgttcctgtttctcttcctcttcagcacctgtcgtttcctgactttttaatgatcgtcgttctaactggtatgagttggtatctcattgtggttttgatttacatttctctgatggccaatgatgagcattttttcatgtgtctgttggctgcataaatgtcttcttttgagaagtggctgttcatatcctttgcccactttttgatggggttgtttgattttttttcttgtaaatttgtttaggttctttgtagattctggatattagccctttgtcagatgggtagattgtaaaaattctctcccattctgtaggttgcctgttcactccgatggtagtttcttttgctgtttaattagatcccatttgtcaattttggcttttgttgccattgtttttggtgatttagtcatgaagtccttgcccatgcctatggcctgaatggtattgcctaggttttcttctagggtttttatggttttaggtctaacatttaagtctttaatccatcttgaattaatttttgtataaggtgtaaggaagggatccagtttcagctttctacatatggctagccagttttcccagcaccatttattaaatagggaatcatttccccatttctyctttttgtcacgtttgtcaaggttgtagatgtgtggtattatttctgagggctctgttctgttccattggtctatatctctgttttggtaccagtaccatgctgtttgggttactgtagccttgtagtatagtttgaagtcaggtagtgtgatgcctccagctttgttcttttggcttaggattgacttggcaatgtgggctcttttttggttccatatgaactttaaagtagttttttccaattctgtgaagaaagtcattggtagcttgatggggwtggcattgaatctataaattaccttgggcagtatggccattttcatgatattgattcttcccatccatgagcatggaatgttcttccatttgtttgtatcctcttttatttcgttgagcagtggtttgtagttctccttgaagaggtccttcacatcccttgtaagttggattttaggtattttattctctttgaagctattgtgaatgggagttcactcatgatttggccctctgtttgtctgttaatggtgtataggaatgcgtgtgatatttgcacattgatttttgtatccggagactttgctgaagttgcttatcagcttaaggagatttggggctgagatgatggggttttctaaatatacaatcatgtcatctgcaaacagggacaatttgacttcctcttttttttttttttttagacggagtttcactcttgttgcccaggctggagtgcggtggcacgatctcggctcactgcaacctccacctcccaggttcaagcgattctcctgcctcagcctccctagtagctgggattataggcatgtgccaccatgcccggctaattttgtatttttagtagagatggtgtttctccatgttggtcaggctggtctcgaactcctgacctcaggtgatctgcccgcctcgacctcccaaagtgctgggattacaggcgtgagccaccgcacctggcctgacttcctctttttctaattgaatacctttatttctttctcctgcctgattgctctggccagaacttccaacactaygttgaataggagtggtgagagagggcatccctgtcttgtgccagtttacataagggaatgcttccagtttttgcccattcagtatgataatggctgtgggtttgtcataaatagctctgattattttgagatacgtcrcatcaatacctagtttatcgagagtttttagcatggagggctattgaattttgttgaagcccttttctgcatctatttagataatcatgtggtttttgtccttgggtctgttacgtttattgatttgtgtatgttgaaccagccttgcatcccagggatgaagccaacttgatcatggtggataagctttttgatgtgctgctggattcagtttgccagtattttattgaggatttttgcatcaatgttcatcagggatattggtctaaaattccctttttttgtggtgtctctaccaggctttggtatcaggatgatgctggcctcataaaatgagttagggaggattccctctttttctgttgattggaatcgtttcagaaggaatggtaccagctcctctttgtacctctggtagaattcggctatgaatccgtctggtcctggagttttttcggttggtgggctattaattattgcctcaatttcagagcctgttattggtctattcaaggacttaacttcttcctggtttagtcttgggagggtatatgtgtccaggaatttatccatttcttctagattttctagattatttgtgtagaggtgtttatagtattctctgatggtagtttgtatttctgtgggatcggtggtgatatcccctttatcattttttattgcgtctatttgattctttaatcttttcttctttattagtcttgctagctgtctatcaattttgttgatcttttcaaaaaaccaggtcctggattcattgatattttgaagggttttttgtgtctctatttccttcagttctgctctgatcttagttatttcttgccttctggtagcttttgaatgtgtttgttcttgcttctctagttcttttaattgtgatgttagggtgtcaattttagatctttccttctttctcttgtgggcatttagttctataaatttccctctacacactgctttaagtgtgtcccagagattctggtatgttgtgtctttgttctcactggtttcaaagaacatcttatttctgccttcatttcgttatgtacctagtagtcattcaggagcaagttgttctgtttccaagtagttgagcgattttgagtgagtttcttaatcctgagttctagtttgattgcactgtggtctgagagactgttacaatttctgttcttttacatttgctgaggagtgcaactttgtggtcacttttggaataactgatgtggtgctgagaagaatgtatattctgttgatttggggtggagagttctgtagatgtctgttaggtccacttggtgcagagctgagttcaagtccttgatatccttgttatctttctgtctcgttgatctgcctaatgttgacagtgtggtgttgaagtctcccattattattgtgtgggagtctgagtctctttgcaggtctgtaaggacttgctttattaatctgggtgctcctgtattgggtgcatatatatttaggatagttagctcttcttgttgaattgatccctttaccattatgtaatggccttctttgtctcttttgatctttgttggtttaaagtctgttttatcagagactaggattgcaacccctgcttttttttgttttccatttgcttggtagatcttcctccatccctttattttaagcctgtgtgtgtctctgcacatgagatgggtctcctgaatacagcacactgatgagtcttgactctttatccaatttgctaagccctgaccccagaggtggagtctacagaggcaggcaggcgtccttgatctgcggtgggctccacccagttcaagcttccctgctgctttgtttacgtactcaagcatcagcaatggccgacgccccttccccagcctcgctgcctccttgtagttcgatctcagactgctgtgctagcagtgagtgaggctccgtgggcatgggaccctctgagccaggtgcaggatataatctcctggtgtgccgtttgctaagaccgttggaaaagtgcagtgttagggtgggagtgtcctgattttccaggtaccgtctgtcacggtttcccttggccaggaaagggaattccccgaccccttttgcttctcaggtgaggcgatcccccgccctgctttggctcatattctgtggactgcacccactgtctgacaagccccagtgagatgaacgtggtacctcagttggaaatacagaaatcacccatcttccacattgctcactctgggagctgtagactggagctgttcctattcggccatcttctgtgttctctttttaacaattgaaggtatattacatgagctcctttagctttctttatcttcccttctttgattttctctaacatgttcctcacttccttgccaagggcaatagccctttccatgctctcattctatcctttcctgcctcctctaagaactaattatattaattttctccctctttgagtttcttcaattttgccttcttgggttattggcacattttcttctaccattattttcagaaagcttttgtaaacaaatcacaaagcctttccttgactctgtttttcttcacgcctaccatcctgactcagtaatatttgagtgactaccacttatcaggcattgttcttggagctaaggaaatagtggtgaaaaaaaggagttacttaatagggcatggtggcatgcatgtagtaccatatactcaggaggctgaggtgggaggatcccttgagccctggagtttgaggccagcctgggcaacatagcaagaccctgtctcttatttatttttttattatactttaagttctgggttacatgtgcggaacgtgcagttttattacataggtatacatgtgccctggtggtttgctgcacccatcaacctgtcacgtacattaggtatttctcctaatgttatccctcccctaacccccaactcccaacaggtctcagtgtgtgatgttcccctccctgtgtccatgtgttcttattgttcaactcccacttatgagtgagaacatgtggtgtttggttttctgatcttgtgatagtttgctgagaatgatggtttccagcttcatccatgtccttgcaaaagacatgaacttatccttttttatggctgcatagtattccatggtgtatatgtgccacattttcttaatccagtctgtcattgatggacatttggattggttccaagtctttgctattttgcatagtgctgcmataaacatacgtgtgcatgtgtctttctcgtagaatgatttataatcctttgggtatatacccagtaatgggattgctgggtcaaatggtatttctagttctagatccttgaagaatyaccacactgtcttccacaatggttgaactagtttacagtcccaccaacagtgtaaaagcgttcctatttttccacagcctctccaggatctgttttttcctgactttttaatgatcgccattctgactggcgtgaaatggtatctcattatggttttgatttgtatttctctaatgaccagtgatgatgagcattttttcatatgcttgttggctgcataaatgtcttttttgagatattcacttctaattattacttgatgcaatgttctcttcttgggttttttttttttcctcctttttgacttcttcagcctttgacattcttgaaccttagacaaattcatatggaagcaggaaattttccctgacaccttcatgggcagtaactgtagtgcacaggtgctaggactagccggccgtttctgtgccagcagggacagactccatttgcttggtcctgctactttccacccctcacaggaggtggggaacacaagtgagtgagtgcagaagctgggttgagggcttttgggcactgacgggagcaaaactctgtgcagcccagcagcagcgtctagggggtgcctatgacccctgaagcccagaaagagtgttacagtcagtgcttttttagctttgccatctgctgatggcttacgtgttagcagctcagtggagggtcagtgtgccagacttttgcaccttcacctgagtgagttcttgtccgacatccagggggaatgaggtctcatgaacatattggagatgttaaatgcaggagattttattgttgatgaaagtggctctcaaggaaggggagctgtaaagggaatggagtgggaagacaatcttcccctggagtctggccatccctggccagattcctctccaaagcattgctgtcaagccatccctctgaagtcaagctgcctctctccaatgtccaaccgtagtctccgtcgtcttgctacttctcctcctctctctgctgggtgaggtttttatgggcactggatggggggtggggcaggccaagggtgattctggaaaaggcaacattcgagcaggaaaacaggaatgtgtgttctcactttggaccgtggtttcacgcttgagggtggggcccttactgggggacccaccctcttcccggaatttctgtgcctcctgtccctatcagtatcagagccaggtttcctcatctgtaaaatttgtatgctgccatgccctttcccagattgtgattaaacatgttaaagtatcctcatgaaagctaagggaaatgtgtttaataaatatttcttcttgtacctgttttgcctggtttcagtgcaccatcatgcactgccatatcatttttacgaggttggcagtattattatgcctgttttacaaatgaggatactatggtcagtcatctagaaggtggtgaagcctaggattctaacccagcactctctgacggtagagtccaaacccgaagactctgtgctagattgccagcatactaagagttgttagaaactgcaaggattcttaattagaattttatgaaatctctgaaccaacagaactttttaaataaagttttcttcctatttgtgtgtgtttgtgtgtgtatgaaacaagcacagataaacgggtcctgtgcggcctttcttataaaattaattgataaccaactgaggaaatatagcaaaaggtagatttctgtgttttgagaaatccaggttacatagaaagtgccaaaccaagaaatggaaaccataagcagtaaaccataatggtagtgctgaggaacaattgtgtgcttgcacctggcagcactgttagggaattggagcttcattgaccttgcatatgaagccagaaagtggtcatgtcactcccttatacacaccttttagcattgtcaatgaagttcttccaggttttcacctaaggtaatagatggtactgttccctgctaaagaaaactagtgattttgtcagcaaaatggactcagtgtcttctgcttgcctacggaaagggtggggcctgttagcacagtatgcagactgccttggatgccctgtaaccagaaaggccagtggagtaccctgtaatcgggggcattaaatgggagaatgttcataaagcacctagggcaaagaatgagttcccatgaagaaccagttttatcagtgcccttaatcatttttctttccttctcatcttttctcttcagcagcaccgtgaytgtaggtaggatactgattttccttgaacttttcctgtaccgaagtcatctgttcaaagctctggcaactgctgtgtaagatactgtyctatccatttactctgttccttgaatctggttgccagaattaaggatgctacagagaacacagaatcttgaagtagggaattcttgaactcaggtaaagtctaaacctttgaaatagttattcawcaataaacttgaaaagtatctgttgtgattataaaggaaagcacaggcatcagatgtacacagcatgtaatgacctcttgcagcagctgttgaagtcacgatcatagatacatcttggaactagtgatagcacctttaatttcaaaaggagtggcatagcattrtagccaacaagtcagatctgtaattcttattttattaaatacttaaatgctgtaaacaagtgctgtacgtaatcttgaattgtcttctctctttccaaggtgagtagatttatttttaggtgaagactatagttaagacacttctctggagtcacagagtaggaaagagctactgtatttctactccttcatcttctttacattgtaaaataaaatgtcctctgtccatccaaacccacagaatggactcagacctggacaatagcgaaagcgagacttttaatgacagtcttgcaagattgagtgtctggcatgcaggcacacccagcatggttttaacaagcaatttatcccttagtgtgcaggaccctcccccggttccttataggctgagtattgtaggtcccatcacctattgattgttaggcagggctttaggtgtgtttttagggttgtcttgctgcattttgttgcagcccacaatgcactgcaatcctagttagctcaggggctcttcaagtatttgacttatgacctaagttgctgggcaggccgataagaacaaacaaagtgagctattttgcagactaataaacttttattttagactcaaattctttggttcgggtgagagaaactaagtggtggagaaagtggaggccaacaagcggcatcagctatccaaacaggggcctagtatatcctgttttttctgtggtttgctgacctaagccgattcagggcactttgttttggaaatgaaccatggtatacgttatttccttcaattctctcctttttttctttctactactatttgttccatttctgcatttatttttgtgtcctttagttcttaaatttattaggtcctcctttagggacttctattgagttaatataagtgttagaattaaaagaatttgttagatttctccaacttcagggccatgtggattcttggagatcttctggaatgccaaggtgaatggaatggccaagtgaactaaggcacaagtcccagtccagttggacggtaacaggttacggaggttccctttcccataataccaccagacattagcctggggtatatgaagagctgagtagttgcctttgtttgacttaccagtaacgtttaggatgtgggtacaagttgagagttttcccacgggcttactgaactctgtcccctgtctagagaggcaagaggagtggtttatattccctatggagaaagaagggatcgctctaggatttgacctttgcaaggtgggaaagagcaataataaacttttgcaagtctcatttccccatgcatccctgtcctggtatagagccaacatgcaatgcattcctctgggattggtatcccattttaggggaaacgcagctaccagtgcttgaggccgcccagcagagcatgcgtaactgttgcttctattaagagctagtactgaaaatttgacccattcaacccaggcagttacatccccatatttttaatttttagtttgccttaaagttagtgtcttaagggtcattgtctggtgggttaaaggaagtagtaagaccaggagttctagtaattctgggtgggcttgggggtggaattggtgatttgcctaagagctaactgtcccatggaatcccttcctgagataattattcctaatgtatacctccagggttcctggtctagagtagctgggttgtttatggtaattaatataggattgcattttaaatttttacrgttaggtagcatggggcccttatattttattttttaacggttggttttcagaagaatgactcagctggccttgatatggtgtggtccaccagacctgattccagctagcacagagatttttttgagagggcccaataacggtctgttttaggacatagatatttgtctgcttgtgacaactgcctttggttccgtaaattcccacaaggtaagacttggcaggcattaaattttatagtttggggggtgggggtggaggttttagttatgttgactattagtttgattagatatttcctactttccacccctagtactgggccctatccaatagggtttccttttaccccttgtgttaggattaatcctaaccgtatccacccccaatgacggagcctgctcatagcttcctttaggttttccttagagttagctttaagggtttcttaggtgatttatacattccctattcactcttttccctttctttcaggggttcttttaccagtctcttgacccgagtgtaatgtgctcaccccggttcagctgtttatgtggctgttttagtgattaggagcacttgwtacggactttcccagcttgggtggagcatgtcttctttccaggttttaattagcaccgagttgccagcctggaagtggtgaactgtgaactcaagaggcagggttcgagttagaagtttttttaacctaagggatgacagggtagaggatatgcccagtgtataatttttaaaaaattggtctttgattttcatagtagaaaggttagtagtcctgcttaaatatggccttaacccaggaggtctttttccagtagtctgtttttttgttttaagacagaatctcgytctgtcgcccaggctggagtgcagtgtgtgatctcaactcactgcaacctccatctcctgggttcaagctattctcctgcctcagcctcccaagtagctgggattacaggcatgtgtcaccacacccagctgatttttgtagttttagtggagacagggtttcaccatgttggccaggctggtcttgaactcttgacctcaggtgatccacctgcctcagtctcagaaagtgttgggattacaggctggagttaggtgaggcacttccccagggtccactgacccctggaggaacttggggaggcaagggactgaccagctggcttcccagggtgcctttggtcgggccctgctgggtctggcactgggccaagagctgctggtttgaagagctaacagcctgtggcacctttcctgaggggcactttcattagcaaaagcatccctggctccaccctcacttcctcattgtttgctttgaagacaccattcctctccctggcaggcggagagctgtactgtttgtattccacaccacccctgctggtgacccagcaactgcaaagggtctctggtttgtcccgctctgggaggggacttagtggcttttcctcctcctcagctgcagggatcctcccccagcccagccaagctctgggaaacagaacttttaaacatcccacctcaaagcgtcttggcagacttctccccagcacgagctctctctacttcagggattgcaaactggcatcctcttttgcctctattgggtttttaagttttttgaactgataaccagcatttaaaaatcccattttagataaaaagaattctggcctctgacaaagcagacagtttggcatcacagctgagcagctgtggcccctttaacagggtgtgccctcttcagttagccacagtccccacacagccctgcagccctccttctcatcatttactggccctgtagtcatttgagtttacaaccctctgatctaacttatatagccccccagaccttctgcagccttactgacagctgcccgtggtggacttacagcctctcagtaaaacaacaacaaaaccttaatggtcatttcatccatttacccttccataatctgaatcctttctgccgccttctgacagccatccataggcaacccactgctcctratcctaaactgtcctccacatccctttctcatttgcatcgcccggttcccaggctctgtcccgcctcagtggccacactgcaccctttgcttgcacctccttgttgcttgagcctctagaaccttcccccagccctgccaatctctccacatcctctcacctcctcttgtactctttcttccttttacattatttttctccccagtctcaccttctgtgtctctttgatctttgtcttttccagtctctctcttgctcattttcttcttttatttctctttctgtcatcccctgtttcctttttccctcaaactcagtttcttcctctttctctctctgggcatgagctgagccttaactgtgccctggctcccccgtgtctgacagacagttctgactctttttctctgggcaccagcacacctgcacagtgtcttacactgccttccctgtcttggctgcttagtccagtggctcccacacacacagctgtgcaccaggctttcccttgccttcagggtcagcagcttaactctttctctggccctctacgtttgctgtttcctcccctttatctttctgatttcctttcttttcatcgatgtttccccctttcttcttacagaaaccttctgagcttcccttagtaattccttaattggtttttcattccatccattaaccttttgcagtttcttagtaatatcaggccagcttttagtcagaaaattaacctttaaaattaaaggccttgccctactgggtcctctggatttaatcctgaatattttcgcatttgatcactgagcctctgcagcaacacagagggagtctcctccttttwtgttgttgaatctcaaatgcttttgagacattttatgtcctaggagtggactttttaatccctttaattattagttcccttaggtcctgcatttgggcccgatctctttattgttatcccatccaggatctgcatttaggaatttctgctcagttggcaggacttcttgcctgggaggacgctgtctttcccaaatggttatggctgcccttataattattcccctctcttccccagtaaacacaatattcatgattgacatcatctcagcctaagtataaaaattgggtcctaaaaattgatmtagctgctaaaccgaggggatctctgctaagctgaggtttgctctgctaaaccgagggkatcttccaagaatggcctcatttcctttttaaaattcctaacctcagtacttgttagaggygcattcacaaacccaactcctccctgtcccatagggacttctctaagagagtacttattagacgtctactgttcagaagaaatagggaaattctcaatgtccttcttacattgttctaattctttcctcaagtttggataaggatttaagggagcactgggtttagctccttcatgatccccagattcctctttcctcgaccttcctcttgccccygatctccctgtcctctaccttgtgagatgtttgggggaggggcaagcgtgttggggatcccagggcttttcactgggtgagggctctttactgtgctcttcctctttaagggggaacatggggttaaatcactaatccaacaaagaacataacccacatcctctgtgagtatgggttttatcattcacgtagagaattaaagcttggcacacccagtcctcatctgagccaaacttaggccaaaagaccaaaggctgacaaatgggctttttgggccagataaaacagcaatactctatcatcttttgcttttccttgttcctggtttggggattatccattcaaacctgcaacattctccccaagggactatctgggagaatgtcagagggggtctttttagttcgctctttcctttgttctgtaggcctagaattcctgtttcccattttcacttagtctctgtgtcaggtttttgctgtgtactcagccccccttactggaggtttcttgcacactccgggttctctgaaaatgccccaataccaaggcagtactgataatccaactttcctaccttggatcatgcaggaggttggctggttgccacggtgcctgcttttctccttgtgtcacctccgctgtctcctgaacaagacttgggtttgtctgtggcttctgcgggragccaagatgtccagagcaggccacataaatcaagtggggtgcgtctcccttctcggctggagtcttaactccatacaggcacagagatagccgtatgggccaccaggttgtgagaaacaattcacccgtccaaacccacagaatggactcagagacccggacagtagcaaaagcgagacttttaatgacggtcttgcaagattgggtgtctggtgtgcaggcacacccggcacagttttaacaagcaacttaacctcctagtgcacaggtccctcccccggttccttataggctgagtcctatagggtcacagtcatcccggacgtcacctgttgagtgttaggtagcagctttaggtgtttttttttagggttgtcttgctgcattttgttgcagcccacaatgcattgcaatcctagttagttcaggggctcttgaagtatttgacttatgacctaagtagctgggcaggatgataagaacagacaaagtgagctattttgcagactagtatctaggctaaacttctttggttcgggtgagggcagctaagtgggggaaaaggggacgaagcgggaggctgacaagcaggcattggctattgaagcaggggcctagtatcctgtttcttctgtagtttgctgacctatgccgattcaagacactttgtcccggaaatggacyactgtatgcgttattttctatactccatgaatatgattggtttgtaaggtgtgtattgattttatttaagtgtaattgctgtttgcttagccaattggcataatttatgctaagcaaactacaaatakggatttattttattagtcacagctacagaatttattccacttgtggaatgatgttttgtttttgtagcagattagaaaagttttgtttggtgctttggcaggattaagctagggtataatcttttatgagattttggcatattttaatattatttacatagacactctgcccatttattatagacaataaaggaactattggactaacagtagtaaattttttcctccaaaaggtaattaataaaatgtctccaacatctctaaagatcacactaaggcaactcatggaggggtcttcraagaccttgcaagaagtactaactatggagtatcggctaagtcaagcttgtatggtaagaatttaaaaaaaaaatgtcattttttagttctaaaagtaacatacgtttattgtagaacttgtaaaatacactaagtgcaaacaagaaaattaaaaccacctgtaaatttactctacaaaaacacaacaggccagttagttttagatgtgtggaagtattgctacccagattgttattaagcctttataaaatagcaattacatttgcatgtcagtgtaagaagctctctaacctcatcttagaggaattcaaaatagaaattaatgtctttcagcgatggtctctgtgaccttgggcaaggcatataaactctgtaaatgtgaattccctcattggtaaaatgaagaggattatttataagcagatatatatataaagtaaatgcacaaatggaagttattagtctgttacrtgtttaaaataatgagcattattaaagtaccattgtaaacataaagtggacaataatcacatagaatattgatttcatgaaacatctcatatttatatttatttattcttccagatgataaactctttaaagtcagaatcatcctttatgttcagaggacccttaagaagcatcttattatttagactaatatatggactaaagggactatttggcttaatagccagaaaggagacattcctaatgactttaatgtaatagttattaagatgttcaatgtagttcatctagttagaaataactctgttagccatgtcttaaagtcactccttgagggatgtaaatggcagctgacgtctattgtttattatgtgcaggtactacgctaggcactttatatgcatttgctccattaaatcttatggtatctctagaaggataggtactgttattgactccattttacagatgaagaaattgttatatagtggtgtaacttgcctaaggttgtgcagctattaagtgacagagatatggcatatgaaaccaggcagtcttactccagtgcctgcactcttgaccactctcctgtatacctcacacattccatgtttttcattacacttttagtgcactgcctagattgattgattcttgccttcattctctcagcaaatatgttagctatgtcccaggcactgtgctcagtgttagccttatattgttgaataagaagacacagtcctttattttcatgggtttagtctactgagactacaaagaacaagtaaacaaaataagtaaaataattataaattgtgataagtactctaaaggaaaacatacagggttggtgatagaagagattatgcagggacaggagggagttggggggcaatgggaaacctccttaagtagatcagggaagacatctttgtgatgtcacttcatttgtgacctaaaggatgagaaaggagtatgttgagaagactcttgggcttaagcaggaggtgatttgatttttcatttcattcggttcaatttgctttaagaaggaaattgttgctgctgtgtggagatagggttggagaggttcaagaacggtttagagaccagatatagatttcctgcagtgatccaggtgtgaaatagtagttttgagacaagcatggtggcaattgagagaagtaaatggatttgagacacatgtaggagatagaatagataggacttgctggatgtgagggaaggaatgcatttaggagttagagattagaggaatgagttggagatttaaatctgaaagacaccaacagcaattaagaaaaccttggggattcgttatttactaaacaagagtgcttactatgtcgtagacactgttagaggtacccaggtacrtrggttccaggtacataggtgtgctccaggggttgaggttgaaaaggcagaaaacagtttaaatcattatcttggggagtagggagtaggataacacctgccctcatggaacttactttataatggggaaatagactgtaaacaagattaatacataaaatatatattatatgattataaatattaacaagaaaaaggaagcaggatatgtgatatagagtaacagggggatgaattgtagatgggatgaccagagaaggcctcactgagatgttctttgagtgaattcctgaaagaagtaaggaagtgagcccatgccattatctagaggaagagcatcccaggcagtgggaactgcaagaacaaagctgtgaggctggagcatgactgcctgtgctagggaccacaaagaggccgtgtggaagcggatggggggcagaggttgtggtgagtgagagatgaggtcagaggaaacagtgtagagaaaggctgtgcagagcatacagagccttgaaggtctctctaaggactttggctgagtaaaatgggaagccactaggtgattatgaggagaggaatgccatgatcttatactttaaagaattgatcactcaggctgctatgttgagcactgaataggtaagatcatattataaagaaaatgagagtccagacctgagccctaaggaactctaacattttgaggtgtggtagagaaagagcagtaggaaggaaaaaaaggatggagaggtaggaggaccaggagagtgtagtgtcacaaaagaaagtgaggaatgtttcggggaggagggtgtaatggacagtgttgaacgctgtcaaagygtagacgaggttagaagtgtcatttgaccttggcgatgccgatgtcatgggtggttttggcaagccattttagaggagtgggggcagaagttagagtgtagtaagttggagaggaaaaatgggatgtgaagaagtggagagaatatgtgtagatgaatactcttgaaagtgaaataggatagaagctgggactgtggaatcaaatgaagttccttttttattttgtaagatggaaggtactagaacatgtttaaaaatgattgggaatgatccaatagagaaamaagattatgttgatgatactaatggtagttaatatttactgaacacttagtgtcggacactgtgcttggatgtggattaaaataatcctagratggatatataaattaccttttcatgtaaagaaactagggttggagaaattactagtccgaggtcacatagttaatatgtagctatcaggatgtgaacctagacatttgaactcagctatattgcctacrtcgatgattctaggaaaataaaagtgaatgaccacatcaagcaaagtccatccttgagaaggcaagaggggatgtgaattggaatgcaagggaggactggtctttgaaaaagggatggtcctttcctccacggcattgaaagagaaggcaggtgcagatggccacagttgcctgcaggtgttttagtggtgagaagacaagacttcatatctaagagcttctcgtatttttaaagaagtcagaggttaagtaactggctgagactataataagagtgtgctctacgggtagaggttgagaaggcagaaaacacttaaaatcattatcttggggagttgggaagagatcttggattgtttggcagttttctgtgcctgtttgagatttttgatcatgaattttaaatgaaaccagtcacagttgtatgattttctgcagcaagacttagctgctgaagtgcaggcaggggtacgtgatagggtttagttggtgccaggattttgctaggattgtaaaaaaggaaaaaaggtttgrgggagatgatgacattttgacaggaaagtgaccatattaaaggactggtgaaattsggctggatgaagagcaaagtgaagccagcacagatggggagaaagtcataggatctgtggacctcagtaagatcaatgatttgtagcagtggagatacttgagcaaataagatttaggaggtggtgatcagagagtgggctatcagaggtggttcagtctctgaatgtcatggttcaggttgtggccatgggagtggaaggctgaagtgaatagaggagagagaaaataacccagaataaggacacccagaaattatccccatttaatctcaattttctttcagagaggtcatgactttcatgaaggcgtwagagctggtaagtggcaaatgggaacttaccattttggggaaatgggatttgtgagcatatgctgttaattaaagaagatacagattatgcatcccaaatcctaaaatccamaatgtaccaaaatctgaaactatttgagcaccaacrtgacactcaaatgttcattggaccataagtataatgcaaatattccaaaatctgaaaaaaaaaaaaaaaatcaaacctgaaacacttctgatcccaagcattccagataaagaatactcaacctatagttgttttagtagtgaaaattaaacttttattaagattgcaaagttgtgtatgtttttaaagaatatgttaccatctgggatatgaaaaggaagatcagtctttgaaactgataattgttttaaaaattcacataactyggccactgtttcctaatttatatataaggtaatcctgcccctacaatcatggactgcatctgataagtgcagcattgagcttgtaaactcatcctgctgccatcctgctgctgtggcctttgaaacatgcatttattaccttacaaaaagccctcaaatcccctaccctttctccctctttcgtgctggcctggcaaaattgaccagtggtctaaccctactttccaccttcttgcctgtacctcagcagttaaacattgctggggaaaaagaccatatgatgtcattagtaacatctgcagattgtcttattaatactttccattttgcttataatctccaatgtcagcatatttagaaaaagcaagtgaagtgcttgacgtgcttgactgttttttctagcatacttgcaacaattcctttttatgcataattcttatccttataaaaagctgttatttatgttgtataaaatgagttgttccctctgcatgtattttgcatatctaatgttcctgtttttattaattattttactatagtgcagactctggatatcctttgttttttttattttattttattttttttggagacagggtctcacactgtcacccaggctggagtgcagtggtgcactttcggcttactgcaacctccacctcccaggttcaagtgatttgcctacctcagcctcctgagtagctgggactaccagcccatgccaccacgcctagctgatttttgtatttttagtagaaacggggtttcaccatgttggccaggctggtcttgaactcctgatattatgtgatctggctgccttggactcccaaagtgctgtgattacaggcatgagccaccgtgcccagcctggatatacttttttatctgaataaaaggttatgttatgttctctcagctcttaagctttgataaacaatcactcttcatagagttctcttcatttctgacatgatacaatatcagaaataaggacttgattgaaatctttttagtattcagcacatggagctgatcagaggagatggcagtgtgtcttgtagaaactaagtaacataggcattttcctcacaaattctctgcaaattcttgctgcatgtggattacagcctagaactctgattttagaggacctgtaagcatacagggttatattgttaaagtattcattatatgttataatagcccttctttaaaaagaaagatactgtttttagataaatactgttattttgaggaaaaaatgttgaaaccaatcagcatcaaagttctgattcataaaggaagtgcttattatacgacttttttttgttttgttttgttttttgagatggagtctcactctgtcacccaggctggagagcagtggcaaaatctcggctcactgcaaactccgcctcccgggttcacaccattctcctgcctcagcctcccgagtagctgggactaaaagcgcctgccaccacgcctaatttttttgtatttttagtagagacggggtttcacagtgttagccaggatggtctcgatctcctgacctcgtaatccgcctacctcagcctcccaaagtgctgggattataggcctgagccaccgcgcctggcctatgctactttttaatgaagagaaagtatattgccgcctctttcagaaagcagcgtctgttctgagattgaaaactgttgtgttctttacatagtcaaatgtttgctgcagtttgctaataataaaaacatattagcaagttaaagtaagttagcaaatttaacagttgttaaaaattcttactgttaacatctagaacaaattactactttgtggttatagaagaagaaaaaaagaccatcttagtggagctggatacccactcaaactccatgtagtggctatctcaggagacttgcaaaacctgagctgcctacatggcacgaacttgtatgtattctagtaaaaaaattgttagcttgaaataaaataacaaatttgattaatagtctctttgctcttgtccttcagtgggatctcaaggagacaggtagtattgaccagaagacttagagtgagagagattcttgtggaaaaaatgtgccggggttgttctttgtttacactgtccacggaatataaaactttcaaatagtagggatcagaacatcagtatttaatatcgccactgatctgataccagaatctcatagtaggcagttaaatcttaaaaacaaacctcccgtatctgcatttaattgtatgtaaaagcttccctccacctaccaaggcagtcttcttccttggttcccatactgcttctttaactattttagcctttaaatgctaaattaggtttttctagttcactatagtttgcacatttaaatatttccattcttcacaagaattatgtgcattttaagcatggttgaaatttgctgccacaaccataacattaaaatttggagatcattgtagattcatgcggttgtaagaaataatatagagatcttgcataccttccacccagtctcccaaatgataacgtgtgtgtaactacagtatactggacattcctcccccttttttttcggagaagttacagattgcctcataatcctgtggggatactatgtggctatgatgagtgatgactacactgaaataggagaactagacggtttcatgataacctgatttttttaaatccagagctgtctgaactggaggattcagcagaacaacagtatccacatttaattatgcatgaagtccccttttctctaccttaagcaattaatttcctcccaaaattcaatgtggaggaggttagaaggcacatctggtccctctgccctcccctgcctttactttaaaccactggttttacctgttttgtaatgtggaggtttcactggcaattttatttcaagaagaaaaaaagaattctaatgtttaaaccactggattaattcagtaggctttattaaagctaaracatgaggcttaggaagttagaaaatatccaccccagtcatcaaaagtatattgctgtccatccctggagatttaatttaaaagaaaaatagaatacatataaaaatwttgcaggaaaaaagtatgatagaaaaatgtgcctagtataagaatttctgtcaattcagtaagtaaaatctarcaatattagacaaaaataatggtattaacatttgtatcttctcttgacagttttaattgataaagaccagagtccaaaatggaaaccagctgatctaaaagaagttactgaggaagatttgaataatcactttaagtctttgggaagcagtgatttgaaattttgaggtgacaggcttttaaggtatattttgtagcatgggttggcaatctacagcatgtgggccaaatccagcctgctgcctgtttttatataccctgtaagctaagaatggtttccgcatttttaaatggttgggaaaagaaatcaaagactaatawttcatgacgtgaaaattatcagaattcacaaataaagctttattggaactagctatactcatctgtttatatattatctgtggctgctttgaaatgagtagttgcaatagagatggtaaagcctacaaagcctaattatttactgtctggtttttgtcagaaaaaagtttgtcaatccttgttttagaagatggaaaaatgtgaagatctttrgagattctcttgagtggtatatctaattgaaatgggatcttygtttggcttgtatgttgatgaaatcaacttaggtatacaatataaaaaataaagaccctgaaaattgttttggatactgtgttaatgcctcatagaatttttgttttggatactgtgttaatgcctcatagaattttctccatatatgagtgtgttttaaagtaactgagttactgtagcagaagagctccttttataaacattagaaaccttgggcagagagaaaagatttttattaacgtccctcttcagtattaactcagacttggtcttccctaaaataatcagaataccatcccatggtgaaactgaaaggattattttcttgttatttgtgatatttgttaatctggtagaatgagaaattaggaaactccaatctcttagatagagacactctgtttttttataatttacgtaagacttttgtgtgataattatccttacaaacaaggttcaagtcaggagaaaaaaattaattgaaagcaagaagacttttgttcaaaagatatattcaataattgatattgttaatgaagtaagtactttttaaggtatgaaagaactaaaaggtattccagactcagaaccttaaagttctaggcaagaataatttttaaactaaaggtaagtttataaattaacaaagtaaacaaaatttatgattttgttttttgtttgtaatttttgtttaattttaaaggtaagtttataaattaacaaacaaaatttataattttttgtttgtaatttttgtttataaacaaaataaattttttgtaacttgttatagtttctccttcatcccatactctttagaaactaagtgaacttcaggtttgtaagaataaaaagccaacggaactgaaaaagacattaaagatcatgtcctgcacccttctcatagatgaggaaatggcagcccagaaggtattgctttatgttttctcagttcttaatctgttttaygtgaagcatttttctttcaaataattcagtaacagatctggaataaagatgccatgatatcggatacatttacatttatactcttaaaggtcctaaattggacctgaatgatccaagaaattatttgtataaatggatttttgttctctatatttgttaacaatgcagaaaatgttgtcttttatattgttaaaaaattcaaagtacacactgtcagaaagcatttgcttcagttaaataagagctcacactagttaattgcaactggacttttattgkgcagttacaacaacaaatgttttcagaaaaatatttggaaaaaatataccacttcatagctaagtcttacagagaagaggatttgctaataaaacttaagttttgaaaattaagatgcaggtagwgcttctgaactaatgcccacagctccaaggaagacatgtcctatttagttattcaaatacaagttgagggcattgtgattaagcaaacaatatatttgttagaactttgtttttaaattactgttccttgacattacttataaagagtctctaactttcgatttctaaaactatgtaatacaaaagtatagtttccccatttgataaaaggccaatgatactgagtaggatatatgcgtatcatgctacttcattcagtgtgtctgtttttaatactaataaggcagtttgacraattatttctttgggactaaggtgattatcatttttttccccttcaaaattgtgctttaagtgctgataaccacaggcagattgcaaagaactgataaggcaacaaaagtagagaattttaggatcaaaggcatgtaactgaaaggtaacaacagtacataagcgacaactggggaaggcagcagtgaaacatgtttgtggggttaagtgagtcattgtaaataaggaatttgcacatttattttctctgataacctgcttccatgttgccacctggaggctctttgttgtgctggtagaagcccatttgcccttactctggatgttccaaatgtttccctttccaggagctagtcagtctttcagtcatctgttttatatgtctcctgccttctcagacagtccttctactctcttttattgttcatgaaagaccttcaaattgaagtaaagcccatatttcaatataaagatatgaaagaaggctaatatcctatcagtgatattctcatccatcttgtcatgaaggccataccatgataactatcacatgtaatgtaaatttgtttattcatctctcttattcatttattcatcttttttcatttgtttattcatctttctcccatttgctcctgtcttgatttatccactagctcactgattatgcaagccttgtagttcatatatgtcatgggttaacatacaatacagcatatatttcagacataagtgtttcagaaatattgtacagaagatattgtactctattaaaatgtgattcagggacaagggartggtgcttggtgataaaagtatactgccatagttgctgaggaacggcagcaacagaratcagacttctagttgatatggatctggcaggcatctctgtcacacccctgggaaatagtggcccagggcacagaaggaacctgaaattaaaatatttagatacaaccaaaactcacttgtctgtccctatgtatactgaaaartttagtggggcatgctgctttacctggctttgtgttttcaccattgtacttattttatatacctaattgtacattttaagcagcaratgaccttgcagcaaaaatgtcttggtgtgagatgcaaaatgaatgaaaaacaaccacacctaggcttttgtcactcaacctaaactactcttcatgacctggaaatgttttatacttatgggaaactttctgcccttaaccttataacttcagatccttgtatgaatgggtttggttgtttttctattatataaattgtagattgcaagtacaatgggacagtacaaatcccgggactcggtaaaattagagttgaatgatgaggtgtccaaaggcaacgaaaacatggcatatttcaaataatgttttccttgcttatgtaacttggagaattcactctatttgattgtgggtttcaaagtattagtgttaaaattagaggtagattttctgcctgcttacaagacaaatacatatttatctcattaaagaggtcataagccttttttttaacctttatatttcaataccaatggtgtattgtggatctaacatacacaggcttaaataatttcctttccatttaaactcaatgtctaccaaatcttgatgaaaagataattctagaaactgaagtcttaattttctaacaagtcatgtcttaatttcttcttctccctcccaaattttctgttaccactgatcttcaaacagtacttaatcctttaaaacaaaaaggtgtgtgtgtatgtgctgtgacagtaaaaatgaaagagaaaaaatagcttccctaaaaggtagccaggcttatggaaacagtataataggtggctataaatgccctataggcttgtgttaccactaaaaaataacaaaaacccagaaaacgagtactctcctcaaaggacagttttatcttttccgttttgcaatacaactgtaaatcttcatgcattatctggtctattttaatggtgaccgccttactagtcaagaaaaaactggaaataaatgcccatatkccagccctctgtacctctgagatagtaaagcttaatacagaattaaaactgaaactttctaccttgcagactaagtttctgttatttttaagatttattggattgctctttgtaaaaggtacccmtacttgttttcttgtatagttatatcactgggcttaattcaatgcaataaacactaatgtcatggcttctataaactgttatctctaagatggctttaggcacaaagtctgagtcgtccagtaacagctgtaattagttagggccctgaggtccaaggtggtagttacacttctcatctacaaaaataaatatcttatcttattaaagacagggttcatttgtgtcaagaagtagagatccttgacaaacaaacaaracttactgttaatcactatgatttgagtgccattccctcgccaagaaattttagaaaagcccttttcatatctggactttttttgggtataaacaaacaaaaattgttattttaaaggataaacttcaaccattggaatttggggcagtttttattccttagcattttctttggtgatgccattacttaggaagaagtgctgtgacattcagctgattattgggtgtcacaggacctctgttcagcccttcagatgactaaaatctaagactaaacagaaattgctgttaacatagaagtacttaaaatgcakttcatcctagttgttcttataatagtgacattatcgtagacacatttttaaatccagatagttatttgtactttttcacaccagtttttgcttttgtcacatttattcaaactagcacctccacagtcaaagtgttgtcatcctacagcctcaaggcccctcactctcaatgtatggaatgtcatggtacttgatgttattgcatgcccattgctgcaaggcatcacacaagatatcctgagacaggcggtgtgcatattccaagatcacartattggtccctggaggttccttcacttcctctttgacattaactggagaagccatcctaggtagacatctctcttctggcataaagggttcttcactctcatgctgcttctcaccttcatatatggtaggaaatgggaaagtttgctttgatttcatgcagcccatgttatgaagagctgtttgtggaggaagcagtggcaaagactacttccaggccatctttagaaaacaatgaaatttgtccatgtgatgttgaccagtgctttccctctccagggcacttcagtaatcaatgttccctttcaccactcttcacgtgtagtgtttacytgtcaagagaaggtaggtttcattttgaagttacagaatgcaaaatagtgtatgattgagtggcatgtaaaaatcctttcatcactttggtcacatggaagaaatctgaggtaaaaacaaacagctttatcttatcagtagaagaaaaagataatcactcaataaaaatggcaacttgcaaaataggaaaactttttttcaagatcttgcatattttataaaactgaaaacaattcaatttttgctagcttagatttatctataccaaaacaattcaatttttgctagcttagatttatctataccaagggctagcaaaccattgggccaaattccagctacctatttttgtacagccatgctcacgtgtttacatgtgtccatggctgcgttcatactacaacagcagaactgaataactgtgacagaccatgtggcccacaaagcttaaaatatgtactatctgaccctttacaaaaaatgtttgctgagtcctgatctatactgtcaagcaaaacaagcacatcaaaattttgttcctccccaaacctcatgaacctacagatcttggactactgttagagtctggctttatcccctggtcacatatttacaactcaaagagtagtaaacaatgttggctttactctagtgccacgtctaaacaatataggttacatatagcaaagccacctattgactgttccctgtgaaattgtacagaagctcagattaaggttaaaggtttttcctcctaaatgtctcattcctacccttgtttgatgtttggtcaataaatagatgacaatgcttgtgatgtgccttctaagcctcccaagtgtgtgttatcacagaatgaactcctcttaagggacttaaggataactaaaacaatacaagacagcttcattttaaagaggactgagtgtaagaagcacaggtaatctctatgaatgagattaatggtcccdgattgtatcttagttttgggactaaaaacatagctctaaaaattcataaaatctgtttctgaaaacaccttttttttttttttttttttttttgagacagggtcttactctgttaactcagtctggagtaaaggatgcaatcacgrctcactgtagcctggacctcctgggttcaagtgatccttccacctcagcccactgagtagctggcctgcaggcacaagtcaccatgcctacctaagtttttgtagagacagggttttgccattttgcccaggctggtcttgaactcccggggtcaagtgatctgcccacctcagcctcccaaagtgcttggattactggcgtgagccactgtgcctggcctgaaaccactgatcttaaggcaaaagcttgcgtgcatctaattcattttttaatagtttgtaattaaggatgtccagaggaggtgatgtttgccaggtctaccaccatatattattctataaattctacccagyttctcataatactacatctgttcctacccctaataagagtgatatgagggtaagaaaggaaaggcagtcttctgcttttaattacctttagttctgtatgccctgcttcacgctgcatacttcagagatgttaattttaaaagggaaacaagttatgtgtggtgtctgtcttgtttactagcctgaactgaagatggggactgtcttggttgttaatcatcagcatgttatgatttttcatagtgtctagtttttactgtgagggatggttaagggaattggacatggttaacctgaaaaaaattacttggagaactcaatgagtgtcagawaaataaaaggctgtgagtggaaccatcagtggaaccatcagaatattctgttttttaagaccttttgttttgcaaaagcagctttttcttaccctaacaaagtagtgccagatttgtgcatttgccaaaaccagttttaaaaccagacaaaatatatgttgccattattttcaggcatagagcaacaagcaacactggattgtgatccctgagagaagaaaaacacaagatgttaaatcccacagatggtcattgtgggattctacctgggggtatctcccagcattaccgtgggagttgagccccaggagagtcagagagtggcaactctgatgcaacagaggttagggttactaaaacagctggaatttataagatagagttcaagattgggaagagaggcagaaatctgcatgagacttgkcaagggtactgggatgtgcatgtccaggataaggatctgcaaagtgttagcaaacgattacttcctctaggacttaagagttgaacagtgacaccagaagttatacagtacttagaatccttggaattgcagcctgagtggagcaatctcattgaacactttcrtatttagttactactcaagaaatgcgacaccttaggaatcagtagtataccctaaacaaggtttggcaagtgttttcttaaagggctatgacttaggcttgtgagctaggatgtttgtggcttctccaaattcatatattgaaacctaatccccaacgtgatggtatttggaggtggggcctttgggtgatgatattagagtattagtgctctcataaaagagaccccagagagttcccttgcccctactgacatgtgaggccacagtgaaaagctgtaaaccacaaagcaggccttcacaagacaccatatatgctcatgccttaaacttggacttcccagcctccagaaccatgagaaataaatctgtgtgactgattgataaacacccagtcttmtaaatactccatactagtctctggtattttgttataccatcctgaatggactaagacacatagggtctatgttacaactactcagctctgctattatagcacaaaagaagccagataatatattaatattaaacaaatgggcatggctatatccaataaagcttcatttacaaaaatagccagcctatggaccacatttgactaagttcaaacagaaataatcctctttaacaagaaataaaacaataccatttaaaggaagataacataagccagatgccttacaaggtattattcacaatgcctaccattcaattaaaaaattactagccatacaaagaggcaggaaaatctgacccataatcaagggaaaaaaaaaaaaaagacccagcatttcttaatagaaattaataatagaactttaaagtagctatttaagtatacccaagaaaataaaggaaaaactagtgaacaaaaaaagaatctcagagaaatggaaattgtaaaataaaaatggaaaatcagtaactgaaatgtacaagatgtgaaatgaaaaattcattgtgtggactactgaatgttggaaaagataggattagtgaacttgaacataaatctatagatgtgtccaatctgaaaaatggagggaaaagatttaaaacatagagcagccactaaagagataatgcaagtatgacttatgaggaaaggaattagatacgtttaacccagaagaagacaggaaaggaagaacattgggggttggggagggacaattagaaaaccaacatatgaaaaagccttccatgtgaaaaattacctgaaagaaaatggactaaaaawaacaattgaaaggyagagatgatcagactagtttaaaaatccaaaccacacatacatagtcttttcaacgagtgctggaacaaacaaatcatccatatgccaaaaaaaaaaaaaaaaaaaaagctggacacagttcttaaacccttcacaaaattaatttgaaatggatcatagacctaaatataaaataggactcctagaagataacataggagacaatcyagataaccttgggtttggcgacaaccttttagattcagtgccaaaggcatgatgtgttaaagaaataattgataagttggacttcactaaaaaactgctctgtttaagacatggtcaagaaaatgagaagacaagccacagactgggagaaaatattgcaaaagcatatttgataaaagattgttatctaaagtatacaaagaacttttaaaagtcaacaatacaaatatgaacaagctaattgaaaaatgggcaaaagatctggacagacacctcacggaagtcttcttacatatagrtggcacataaacgtatggaaaagtgttcaacatcatgtcattcaggaattgtaaatttaaacagtgagataatggcaaaagcaacagaactctcattcactgttggtgagaatgcaaaatggtacggttaccttgggaggacagtctggcagtttcttagaaagtgaaacattcttactgtatgatccagcagttctgcttcttggtatttacccaataagttgaacgcttaaatccatgcaaaaatctgcatatggatgtctgtagcagctttattcataactttgaaaacttagaagcaagcaagatgtccttcttggtgaatgggtaaactgtggcacatctaaacaatggaacatattcagcattaaaaataaatgagttaggctgggcatagtcacgcctacaatcccagcactttgggaggctgaggcgagtatcatttgagcccaggagttcaagaccagcctaggcaacatagcaagaccccgtctctacaaaaaaattaaatatgaaaaaaaytagccaggcatggtggtgcacacctacagttttaactactcaggaagccgaggtcgcttgggcccaggagttggaattgaaggttgtggtaagttaagattgattgcaccactgcactccagcctgggtgactgagcaagaccccacctcaaaaaataataatccagccatgggaagaaaaggaggaacctcaaatacttattactaagttaagccaatctgaaaggggtacatgctgtatgattacaactatatgacattctagaaatggcaagactctggagacagtaaaaagaccagtggttgccaagggttatggaagaggctgagatgaataggtggaacagacaatttttaaggcaatgaaactattctatatgatactaataatggatttctgtcatacatttgtcaaaaaccataggttgtacaacaccaggaatgaaccctaaaataacgtggatttcaggtgattgcgatgtgtctagtgggagatgctgcgtgtgtgtgtgtgtgtgtgtgtgtgtgtgtgtgyryrkgwkwatacacaggatacgtgggaacactacttcctgctccatttttctgttaacttaaaactgctctgaaaaacagtctattatttttttaaaaaatacacccactatatgctatctataaaagatacacaacttaaaactgacaaacccacaagcatagctggagacttaaaacattactagaatagtcaaagaaaaaatacgtgttctgaacaacattatgctccaacttgagttgatattcacagaacactacacccaacaactattacatattcttatcaagtgcatatggaacattcaccaagatagactattggtagtctcagcagatttcaaaggcttaaaacattacacagtacaatttctaaccaccccagagagtaaaatatctagaaaagcctcatatatttggaaactaaacatatttctaaataacccatgggacaaagaagaaaatcacaggagaaattaaaatatagtttcaactaaacaaaagccaaaacatcaaaattttgaaatgcattagttttagagcttagaaggaaatttatatacttaaatgcttataatagaaaagaagaaaagtttaaatcagtgatataagctttcaccttaagctaaaaaaagaaaagcaaattaaacccaaaataagtagacagaagtaggtaagaacagaaatcagtgaagcatacgatagagacaacagaatgaatgctggttctttaaaaagatctaatagatacatctctatacagactgatcaagaaaagtcacatattaagatgtgtaatgggcattatgacatctatatacgtttaaaaggcaaacaggaataatataaacaattttatgccaatatcaaattaccaaaattggcacaagaaaaaaatgatagccctacatcaattaaagaaattgtaaatctttccaaaaagaaacctccaggccctaatggctacactagagaactcttaccaaggccattacgaggaagtaataccagtcttatctaaactcttcagaaaagagagaaagaggaaagaaagatttcccgaattattctatatgaggccagtattaccaagaagacaaaactccacaggccaatatccctcatgaacatagacccagaagttggcaaattgaatctaacgtgtaaaatggataaaacatgatgactgagtggatttataccagaaattcaaggatattccaaagacaatagatataattcactatattaacataaaaaaaatcagatgatcacctcagtagaaacagaaaaaaaattttgataaaataccattttttatttttaaaatcccagcaaagtattaataggaaggccttcctcaaaagtaatgttagtggtgaaagacaacactttttccctatgacaggagcaaggcagcaatagtcattctcatgatttctgtttgatattttaccggaagtcccactgagtatgaggaagggaagacatacaaagcataaagattgagagaaggagaaaactgccattatttgcagatgacaaaattgtatagagaaaattttaaagattatatggcctccccccaaaaaaaatttactggaataattgtagcaaggtcttaacatataaaagtgacatataaaaagtaatttctacaaacttagcagaagatgaaattaatgccatttgcaatagcatcaaaaacatgaacacttagggataaatttaacaaagcatatgaaggaaaactgcattttgtattgtgtacgttgtacgtgraaaatacaaaatgttactgagaaaaagtaaagaacctaaacaaacagacaaatgctgttcatgatctgaaagacaatattcttagtcctccccaaattaacatgtatattcggcaaaattccagcaggcttttctgtagacattgacaaatggattctaaaagtccagtcaaaatcccagcaggatttgttttatatatatagatatatagatacacacacacacacacacacacacacacacacacacacagattctgaattatacatggaaacacaaactagaatggccaaaacaattttgagaaagaacaataatttggagtactcctattatctaatgttaagaatgactataaagctacagtaattagtgctatattgacaaaaggctagccacaaacctatgaaacagaaacaagtccagagatacacccataaaaatatggtaaactgatacttgacatgtccaaaaacaatgaatgcaaaaaggataatcttttcaacaaatgggattggaacaattggacattcacatactctccccccaccaaaatctacttataccttatactttatagaaaaattaactcaaaagggatcatagttttaaatgtaaaatgtaaaactataaaacaagaagacaaaacatttgcgatcttgggttaggaaaagagttcttagatgtgataccaaaagcatgaaccatgaaagaaaaaaactggtaaactagactgaatcaaaatgaaaaagatttgctctggaaaaaaaaacacagttaaaagattgaaaaaaaaacagcaaatataaaaaatatttgcaagtcatcatctagccaataaatgacttgaatccagaatatataagtatcaaaactcaatagcaagacaacaacccagtttagaaaacgagatttgaaagatttaggcagttcacttggtaccacctatagatagcaaatataagtacatgaaagatgctcaatatcattagccattagggaaatgcaaattacagccatgataagaaaccactatgtagctgttagaatgggtaaaaataataccaagtgctggtgcatatacagagcaactgcactctcatacattgctggtgggaatgcaaaatgacatggcctctggaaaagtttggcagtttctcacaaagttggaataaccacatagaagacccagcaatcccactcctagaaatttaccctagatacatgaaaatttgtgttcacataaaaaaattgtatgctggctggggacggtggcgcatgcctgtaatcccagtattttgggaggccttggtgggtrgatcacctgaggtcaggagtttgagaccagcctggccaacatggtgaaactctgtctctactgaaaatacaagaaagttagcagggcatagtggtgcacacctgtagtcccagctgcttgggaggctgaggcatgagaatcacctgaatccaggaggcagaacagaggttgcagtgagctgagatcacgcaactgcactccagcctgggtgacagagtgagactccatctcaaaaaataaagaaaaaaaattgtatgcaaatgtctgtcacagctttataattgccaaaagttgacaacaaagatgttaatgtacaccaatatggatgactcaaaggcatgctgattgaacaagctagtctcaaaaggttacttatttatatgacattctggaaaaaggcaaaactatagggacagatgatagattagtggttgacaggaggttgggggtagactgtgaccaaaagggcagcaggagggaccttttttggagtgatgtaactattctttatcccgattgtggtggtggctgtaacaaatctaaacatgcgttaaaattcatagacttgttcaccaaaatgaagtcagctttactgtatgttaaaaattttaaaaaggtattttttaaaaccacaatataattacccacactaagattgctaaaatttaaaaaaccccagtgcttagtgttggtgaggacatgcaacgcatatattgctggaaggaatgtaaaatggtacaaccattttaaagaattccttggctgtttcttaaaaagttaaccacacacttaccctgtgaaccagccatttcatttctagatatttatctaagacaaatggaaacayaggtattttaaaaatctgtataccaatatccatagcctctttattcacaatagtcaaagctggaaacaacccaaatgtccatcagtaggcaaatcaaatggataaacaaattagggatatcctyaaaatggaatataacttgacaattaaaaaaggatgaactattggtatgtcaaaccacatggatgaatctcagacatgttgagccagataaaaaagatggatcatatttatatgaatttcaagattggacaatagtgaccctatgaatagaaatcatagtagtgattccctttgggtgggaagaagtaaggactgtttggaagaggccctgaaataactttctaggctattaaaaaattctatatcttaattggtatgttagttacatgaggtatatgttaaaacatgttagattgtacctttaacatctgtttactgtatttcactgtaatttttactttaataagatataagaacagtttttgagaacattctggggcacctaaatccaggggactgatgtattttatctgaaaaagaccgcctatgggcagcatccagagcggaccagctccctgtgctggaggactccagtgtgaggcctgctgcttcctttctacattggcctgaaaccagcccaactcagtggtcataatcttctgggcctaccgaagagcaaaagcctacttctagttcttccagttgccagttcaagggctttatytgtcacttcctttgggaacaggtagagtgctttgatttagaatgatggcaataaatgagaaaccaatttgaaattggatgtgagagtcttttgtcctttattgtgttgttcctgaacttgtagctaaggagggtagagtagagagagggatatataaccttatccaaggaaatagattagtaatacttcatccccaccacactttaatttgcacatatttctagagtataggacatcaaaaatacctagatattaaaatatttatgttgttaaccttcagctggtttagccgtatctattaaggatagaaaacaactgttcttcagttacttatcacatctgcttactaatttatgttatgtttatcatctcttcccatctaatagatgaaacaggcagataggtctggctcttccacttgctgacccagagttcacatggcaaataagaatggagctgtcactccgaattccagcttcttcttggaataaaagtgctccaacggtactttatccaatccagcctatgtttttaagtgttaactttctccctttcttgaacttatagaacctctgtcccatctttgaagttaattcttgccggtaaagaccaagatagctccttcccagggtctctgtttctttcttctcattgcccctgtccttgacctgatctctgggctatcagcaagaacgtgatggcccagaccttcccagtctcccaaacaggtctctgggtactactaccccaggactagttctcaaatctggccttcaagtcctgtgttgggaaaaatgacactgatatattcatgtaattaggtaatcatctggtccagtaactagctatctaatggaattgctcatggcatgctgagaaggtgcagttgccctaattgaatggattagtaaactgcccccacatatttgttaatcagattttcatgctatagtttccatcccacagaagcctcaagatttatcatgaataaaaaagcatcatccttaaagtaagagccaagagggaaaaaaaagttcatgtgaagcatctactgttcataatagcagctgtttaaatacttttaaatacttaaaaggcagttacaatacagtactttaaatacttaaaaggcaattacagtataagcctgcacaccagtgaagaacaaacttcgtataatttcaatcactcctaataagatagttgattcataaggaggaaataaagtttcaacaatgttagccattaatgcaagtcagtggttaggcagctatgattagccttaagatagcaggtgtgatcagctgtcctgaattaatttttagtctgttattcatttgtcaggttgggaagtgactatggtcatcagttgaaggtgtgatacattaaatgctgcatatcaaccaggaagtgttttggccttcttgtcattttaactggctaattacagaaatataaaatgtttaaaaaacacagtttctcaaaaatatttaaatcaatcttttataccttagttctcaagatacacaaaagaactatcagagcatcccttaaccatccaaccagtctatattgagtgtctactatgtgtttagaacctgcgcccatagaatgtaagtgcttccaaaattaacaaaatcaaaaggagaaagagaatataatttattcaggctataagtattaaaatctaacagtgcccttccacccaccactccctctccctctgtctcctacccctcaaatcacaatgcacagacacatatatacacatgacagtcatacatgaggaaaagaaagcccctttacatgtttcaatgttatttgaaggctcaaagctctaaaaatatagaatgagccctgacactatcctcaggaagagatctagcaacaactgggccttctgttgggtccgtcaaagaaaaaatgtgatttactgcagctacccaccttttttctcctagagccagggtctcagtccatcgcctgggctggagtacagtggccagttgtggctcacagcagcctcgaactcctgggttcaaactattctctggcttcagcctcctgagtacctgcgactataggcacgtgccaccatgcccacgttattttttatattgtttgtagagacagccatattgcccaggctggttgtgaactcctggcgtcaagtgatccttctgccttggcctctcaaagtgctgggatgataggtgtgagccaccatgcctgcctagcccttctttatagttcattttgtagctgtgttcctccattctgggtgcagtgtcatcaaaaggagtaaattccttgggaatatgccagtggaaggtatcacaaaaaggccataatttggacatgagttggacccaaacacaaaaccagcaaaaaaaaaaaaaaaaagtaacttctaaaatctgctgtgtaaacgaataggctgctaactccccagaagtccatcttaaacactggattaacagggatggtttattttaccattgtcccattttatgtcatattcttaagcctttacacaggtttctaagatgccttatatctcaagttattgcttaaaattggtctcaccctgaattaatgtaaatatataaaaaaaccatgttgtggtctttgaaaaagttttatgcatatatatataaaatgtctttcaaatttcagtgtagatgtgattaataaaaataccaattcattaaaacataactcgaggtgggcagatcacctgaggtcaggagttcaagaccagcctggccaacatggtgaaatgccatctctactaaagatacaaaaatcagctgggcatggtagcaggtgcctgtaattccagctactcaggagacagaggcacaagaatcacttgaacctgggaggcggaagttgcagtgagccatggtcacgccactgcactccagcctgggcgatagagtgagactcagtctcaaaaaaaataaaaaataagtttataaaaaatacatatatctcagttcctagtaacatatttgtcattatatgttctctaataatggatactaagaatatactttcttgtagggctccgtgaaaactggacagtaagtggaggtctttgtactgggagtattgagaatcattcacttggactataaattcacaacaggatcaaatgacattggttaaacaggcaaacagaaatggacataatttaaatgtagtgttctttgtctttcaccaaaaaggaaaagctacaaaatactgtatatatgactttggtcagtatgaaggtcaccgaaagaacactactgtagggaccttagaaactgagaagtcggtttcatccttaggcacttagagcacacacactgtacagctggtcactgacaggatgggctcaggatgactccatgtggtcacacttggggccaaaatttctcaatagagaggcagagaaaataacattgttaagaaatgagacaatgtttgagattctaataaacctgaataaagcggtatggtatgattttatctgtgaactgggctctacctcagtcatctaaaaattgtgattttggttgggcatggtggctcacgcctgtaatcccagtgctttgggaggccaaagtgggtggatcacctgaggtcaggagttcatgaccagcctggccaacatggtgaaaccccatctctactaaaactaaaaaaatcagccaggtgtggtggcatatgcctgtaatcccagctactagggaggctgaggcagcagaatcgtttgaacctgggaggcagaagttgcagagagccaagatcgcaccactgcactccagcctgggcgacagagtgaagactctgtctcaaaaaaataaaaattgtgaatctatatgtaaagcatctagaacttcccttggaacgtggaacatgttctgtgttatttccatttcttatctctccagattgtctcctaaagctactaacatctaattattaagtgttgtattatatctccagattataattgaggaaagagaattataatctaagaatgacaacagtaatttaggattttgaacaattagatgatagactaactgttgaacaggcgatagatgtcttaagtccaggtatcaatacttcatctcatttaccaggtcctccaggtagaggaaaaaaaccacacacatacacaagcaggtatttccctaagcccttctgggcttcactctggctaccaggtggcttcatctggccactcctatttatggccatgaatgttgaccttcaatctgcagcaattcctccagcaccataatataaatcctcacagaaaaatgaaaaggagctctgaccaactagtaaagaaaatctgatctagaacctcttcccgctttatcattttgttaagttggtagataagccccaaattctaaccacctcctccagtcacatttcttttgcaaactcctgtgcatacgtgtgtttaaatctgttctatttatgccattactcttttatcagtttgattcacaggccttggtcacaaacctaagagggtagaggacagcttttttcctcccctacaaattcaatttctattagtctttatgtagtaaaaccacttcattttagaacaagtaggaggcataaattaataaaagagtgttaagtgctgtgcactgaattaaattctaggcagcagtatatgtaattttgagcactgaaaagaatcattactctggtatagagacatggaagaacagtgttcaaattcactaggactctaggtcagaggaccaagaaattcagaaaattttgccatttaaagtttcatagttctttcatgatccatatactccacatctttacctaaagagttactgtatggttcctattttctgtggcctaacagtacagtgtcttgggggaagagaggtacatttaatgtaaccattttttaaagccctgtttttacccaatggacttaatttctcactaatacaaggaaatttcctctcccatcaagtgagtctccttggctcacccattctcatttcctactcctagtcctcctttaagttgaaacacaccacctcgcctttatctccacccagcaccctttcccctgttccttacttaaacccaagtactatctttgaggataggggaagccgtatctccttattgcagacttcctagtcctcctcccgcccttcctcagaattctgttcttgaactgaagtctagtctttaatttataaatgctgtctccccaaatgagattagatattcctcaagggcaggagttatttttttctttattttgtacagaacagttctctacatcaaggcgattaatgaatgcttactaaagttttcctatttatcaactatccatgtgcctatagtatgttagatgttgggaagaacacagtgaaatttacatagttctgcctcttgcaggctgtttacatgcaaagactacaaacttgcagtagtgtttgggccagtgttttgttgggccaatgcagtgttgaaactgttctgaattagaatatttctaagctaggcattcactctttgggtcacatatctgttactccctcccattcagcttcactaatttatgttaccttcagccccttgtgaaacactcttaatttcacaacttttaacttacaaggaataaattcattcttaaaatacaaggctcttcccatgtgagatactgattagagttatttactactgccaaaacttttaacattataacaccatgagtggttctacttctcaaccaccgacttagtgcatgttgtgcatagtatacttactatatggaaagtatagtaagaaaggctcattttaaaattctcaaatccaaggatagatagcgtattctaatgagaaagaaaacaaaactgctcagcaacattttgctcccttaaaagcaaatgattttcaagctggaaagtatggaaacctcactaagagagaactaaggtgcaagcagaagaggtcattttaaaatagtccatgccttcacattctggtgaattatattccagggtaccaaaagaacctgcagatgtcagc

SEQ ID NO: 95218 - DNA, 21653 bp, Homo sapiens
caaatgtccagaaatagaaaggtgtttgaataaacaatgatagaatacatgatataataccatgcagctgtcaaagggatgaagaatattactatacactactgtggaatgatctccagtatataatatctgataagaaagtcaaagtggcagaaaatatgtatagtatgtcatttgtctaaacaaaagggtattatatgaatatatatttaaaaagcatttgcttataagtaaaaatacaagataatataagtgatacattgtaattataaataattataattaaataaacagtaataaataaatacatggccaggcacagtggctgacgcctgtaatctcagcactttgggaggccaaggcaggcagattacttgaggtcaggagttcaagaccagcctggccagcatggtgaaacctcatctctactaaaatacaaaaattagctgggcatggtggcctgtgcctgtaatcccagctactcaggaggctgaggcaggagaatcacttaaacccgggaggcagaggttgcggtgagcagagatagcgccgctgcactacagcctgggcaacagagtgagactctgtctcaaaaataaaataatacatttaaaatgattactagacatcaagtttttacttaaggtataaaaagccagaaaaaaaaatcagtctcccactttcaaaaacacacacaaaaaaatggatgatctgcaaaatcacagcttttcttgaacacatcaaaaaactgagtttatgcctttgatcccttatcgccaacatatgccaccagatgtcaaacaactcagaaagaaaaattcagctaaagtttttaatgaatgctaaaagtcagaggtaagcttgtgtgagagtacagaagccctgggagccacagatacaaggggaatttgcaaccatatttataaattatataaaattacacataatttatataaatattataaatttatataaaaattattataaatttatataaaattataaatataattattatatgtaataattatataaaaccatatttatatactatataaaattgaaataatttttttaatgctcatcatcactggtcattagagaaaagcaaatcaaaaccacaatgagataccatctcatgccagttagaatggagagcattaaaaagtcaggaaacaacagatgctgaagaggatttggagaaataggaatgcttttacactgttggtgggagtgtaaattagttcaaccattgtggaagacagtgtggtgattcctcaaggatctagaactagaaataccatttgacccagcaatcccattactgggtatatacccaatggattataaatcattctactataaagacacatgcacatgtatgtttattgcagcactattcacaatagcaaagacttggaaccaacccaaatgtccatcaataatagactggataaagaaaatgtggcacatatacaccatggaatgctatgcagccacaaaaaaaggatgagttcatgtcctttgcagggacatggatgaagctggaaaccatcattctcagcaaactatcacaagatcagaaaaccaaacactgcatgttctcactcataagcaggagttgaacaatgagaacacatggacacagggaggggaacatcacacgccagggcctgtctgagggttggcgatgggggaaggataacattaggataaatacctaatggaggtgatgggttgatgggtgcagcaaaccaccatggcacatgtatacctatgtaacaaaactgcacgttctgcacatgtaccccagaacttaaagtataaaaaaaagaaaaaagaaaaataatagtttttataaaccattgaacaaagaaaactttaggcacagataaattcactggaaaattctatataatattaatagaagaaataacattaattctacaaaaactcttccaaaacatagaaaggaagtattaaaataataaatcggaaggccattacactgaagcagctctagagctgagtgcctacctaaacaaaccaaaagctaaaaggttatattctaggtaaacagaacttagcttaaccaatcagaaaccaacaactaacctctaactagggattttccaatggaatgatccaaataaggctactggtccactttaaccaatcaaatattttctttgccttgcatccatatttgaatctttgggaaagaggtggacagtggcactcatatggaatagttctagaagaagccaagataatttcgattaaccttctttatagctgtcagactatgtgaagatacaacaggcatgggcagcatataaaacatctttcattggtgacattcacaaaccacactgacctctagattgtaaaacagaactaccaacaatgaaattttcaaatccaactggcaggagagcagtggattggaaagaagacgaatatgcttagatgaggcatgtgaggcacctgggcagaaaatttaaagagcacttactgcaggacctgagagtcagtgcatcttcaaatttgcaccctaccacactcaccacatcctgtttcagccctgcacaagagctccaaagtgaagttggctgcaagcgtcagggaggcctgatgtccgcattccacagctttgaagcaaagcttgagaaccagccttatctcaagtaaaaaggatttactaatctctagaccagtacttggaaactctgccatttcccttgagagaccaagaccagcctgatgtgctttgttactagggcgacaaagcattctccctgcgttctccctgcaaagagtttatggtaaggatccagtagttcctttcccagatcctagagccttgtggaaaacatcagtccaatatctcaggccctgtcaccttctggcagaattattgatataaatcacctatttagactgtgatattacctctcctttgacttcacccccttggtcctacagcctaccttacttccccctctccaaccccctccccccaccggcaattaccagcactgtctacttgctgagatttccctttggtctgctagtctacgcctcttagaagagtctgtagttgagtctgtctcctttcaaatgacttccagtctgtcctacccatcagagttaacagaaccatccaatcactgtgacaaccaacagtacctccaaacattttttcaagcatcagctagggaaacccctagctctgttgagaatcactggaagagaagacatagtttccagttgtatggtgggctgcagatgggcagtcctgagccagttaggcatgacacatggtactagctaaccccaaagctgacttcaagcaatgcagaagttagagcagctgaaggaggaaatagaagcaaatagataaatattttttaaataagacaaagtgtgaaagcacttttaagacagtttagcaccatactaaaattattatcaccactttgtttagtactattttgtttagtactatgttgtcttgggcagcccttgtgaataaacaaaaacatcagaacctggcagagccgtaagcaacagcccacttcccaaaacggggtgaacagctgtagaccaatcagcggtgttgggtgtttccggctactcgatgtggacatgattgtgagtcagaaccaattcaaactttaaccagagctcccactctgccagacactataatagaaggtggggtacaaagaagaccaataggctaggatgctcagtctcatcagctttacagataagcctcactattacctctaaacaaagtggaagccagtcctggcagcgcacacctataaccccagcattttggaaggctgaggcgggcagatagctggaagccaggactttgagaccagcctggccaacatactgaaaccccatctctactaaaaatacaaaaatcagccgggcatggtggcacacacttgtaatcccaggtacttgggaagctgaggcaggagaatagcttgaatccagaaggcagaggttgcagtgagcagagatcgcaccactgcactccagccagggcaacagagaaagactgtgtctcaaaataacaacaacaacaaagtgaagtgatacttcactttggagctctctttttcctaaacttggattcttaaaatgtttctaagctagcagttttgtaagaacttttttccttaaaaatctggcacatttaaagtattggaaattctgggcttttaaaaatattgggattataccagtgcttatttttctctataaactagtcagaacagaggccctttaattagagatactatagtgggatttattaatacactccagaagtagggaaatatttcatatttacaaagggagacataaagcctgttctaagttacagacacacagacacataaagaggttattgcttctgtcttacaacttcaatctcaggtcaaaagtaaacacaaaaccacaaaaattcaccagttcttctgcttgagcggcctttatgttaaaacaaacaaacaaaaccttactagcccacatctcaaatagctgtcctccttccctctcagtggacacaaaagtaattaattaatttgagctcacaaacaataaacaaaaagacttacaaactcgcttctctgtcacctctcttatttatttatttgaacccctggcctcaagtaatcctcccacctcagccccgagtggttgcgattacaggtttgagccactgcacctatctacctctctaccaatgagactagacgtccatcatccaacagataccaccaaatggttagaccacaaaaccaaactcccaatcattgctgctatcaatgtatcagtaatgtataagttatacctgaataacttatcaggaatgtacaaatcagaaatgaaaacacaatctttaaaaatcaattataaaggaaaaatatataaccacttgggttttctgtaagagcaaataaaaaacatgcctggccttaaacaacccatgatgtatacatttctttcgccagatagtttgattcatcacataaatccagttgggcatctctgtggaaacttaagatttccaataatatagtataattatcaaaaacctaaaatcatgtctctaatgtgaacataaaatatatacatgtcaaacttttattcaactcattggttagtgagggaaccgatgactttaaaaccaatacagaatattagagaagctaggcatatgttaataaagaaatgttaggacagaatgcagggttagatacaaaactgactaatgtgttgcagaacaataaatcataacctgtgttggtatctggtacaacaaaaaattatttgcatctctaccaaaccaaaatctctaccaaagttaacctttgcccctacagaattgtaaaacagcccagtcaatataataaagtcaagtccagagcagcactgaaagagcatccagtaaataaatctcttttgcctatttccaagttttagtcattttttccacagaaatgagatattgcaaatattgcacgggacatagatgcactaaaaaactattaattcatctgaagttcatactgtattttatccggcaaccctaaccacgagttaaccaaaactttaccaagtctgtacagttcttttgccaacacggtatctcttaaatctgttccttagcttcatctttccctagataataaatatcatattaagcgctgtttctattgcacgactattcttcatatttaccactggagggcgcacagaactcgtagtatactagataagaggtcatgaagaaaccacctgagcgtttctgcatctcaaccacaagaggccagtacaggaacctcagattttgcaaccagactgtttactcgctccctaagcagccatgcgcaggcgcgaaactcctccccaggccagacccggcctgcgcatgcgttcaagtgagcgcgcagacgctattggtaagactcgcgggaaaagaaagggtgagcgcggctggaagcgcgcatgcgctgtggctaatgccgtaggctcyttcagggctgagccatccygcgtgtcttgcgctcggtggaaatgcccagccgagggacgcgaccagaggacagctctgtgctgatccccaccgacaattcgaccccacacaaggaggatctaagcagcaaggtgagtgtgagacgcgacgaaaaggctcctggactcgggaccgggcgccactggaccctgaaggtggtccgcagcgggcagcgtggggcctgcctgggcctcggctttgccctgctactttgctctttttattcatagcacttgacagccacagttagtccttttattttctgaaaacagttgcgaaaagggagatcttgaaatttgtcccgagactggacccaggtgacagtggggcggagttttggttgggtgttttcctccctagtctttttaaacttttggaaataccgcccaccccaaatctgttccatcaaagatattctccatccagttaaccatgccaryaacccggggtccatccttgacccccatcatggaagcctatcagttctacctttgaagctcatttcaaatatgtccctttatcaccgtgaacactcttaccaccccaaataagccaccgtcatctgctatcgggacccctgcccccggcaaggccttcctaagcggtctctcctcatccacctgttagctgctgcttctccgttaaccagagcaatggtcctaaaacacgcattgggttgtcactcataccaaactgggggagagaggaagccaatataatataagccttaactgccataaacaaacaacctttaaagataaatgggggtggcgagggttatagcccttcaggtattacatgtcctagattctactttggttctgtcccaaacttacaatgacatcttgggcaagtctctttaatctttctgtatcagttaccttctttgaagtaaagtgaaatgtacacctgtcattcctaaaatgggaaagccctgtataaatgttaagtctcaaagaatgtttacaaatttggccttggaattcaacctcattactacagctctgccaacgggggagacagaaaggtgcacattcatggggattgggggtgaattttcaaaagacacacagcccattctgattaccaccatagcaagccacttacgcatactggtggttacagatccctgaggtgtgtgtgaggtagcacaaatatgataaaagctgcttttagaggctcttgtgatactatgtaatcagtcatgttcacaaaataaatagagttaaaaagaaacttagttttcacttagttgagccctcccctacaaataaatgaagcccaggccagcatggtggcccaggcctgtagtcccagctactcggaggctaaggtgtgagaatcgcctgagcccgggaagatcaaagctgcagtgagccgtgatcgcaccactgcactccagcctgggtaacagagcaagaccctgtttcaaaaaaaaaaaaaaaaaaaagcccagttcaacagtgccagctctatgctagtcattgagataaaaagagggaaaaataccaagatggaacatgataggtcttactgtccccaaatagggcattgcttgatttgaatgtttgactgcagcacttagtacataaaatcatgaaaatattgaaaaaagtaacccacccctcattcaatttgcttttttttaaatctaaatcacaacttaattttcaatctaaatcacaacttaattccttttggtgtatatcatatatatatatttttttaattatttatttatttatttttttgagacggagtttcactcttgttgcccaggctagagtgcagtggtgcaatcttggctcactgcagcctccgcctcccgggttcaagcagttctcctgcctcagcctcccgaatagctgggattacaggcatgtgccactacgcttggctaattttgtatttttagtagagatggggtgtctgcatgttggttaggctggtctcgaactcccgacttcaggtgatccgcccgccttggcctcccgaagtgctgggattacaggcatgagccaccgcacccggcctggtgtatatcatatatttttaacaaaaggtataaaccttgtttagtaactgtagtccttggcatgattgctggttatgaacacgaaaatccctgtctggtcttaatgggttacctaacattttgcaagtctaatcactgttttttctcctccagcttttcctgaactgtacccccacacagagactcctgttgaaaatgatctgtatattcacaaactgcccgtttggaaaaccagtacatcatagccccttatcccatctctaattttaaaacaamcccttaagggattttcattgagcatactttgaaaacatctgacttaaggagtttttctttatttcaatagattaaagaacaaaaaattgtggtggatgaactttctaaccttaagaagaatagggtgagttattataggaattctgaataatatgtgggaggtttatttatgttaactatatattaaagttataagaagtatatataagatttartcatactttaataaaatgtatagtatttcagcatcttttaaaattgcaagtgtctagattctttttttaaatggatagatctcatagctgaagatgtcttttttctatcatatgccattcacattgcctttgcaacaaatgatactagttgtattttggtatcttggagctataatcactaatgatgttttatacctgaatttgatgttttcttttgatataaaygaactttatattgagatgagaagaaacttttcttttaaatgaatgtggataattattgaacaaaaaaggatacattgcttcccctccctccaaaaaatttttacatagattttcctaaatgtgtaacatggttatttaatgccatttccattaatatgttacaaacaagtaagctactgctttgtgtatggttatagtgtcaaattgcattttaacattcaggaagaaatgagtctgagctcttaaaagctttgtaaagattatgtaataactggctggttagatatttctgatattgtcacttatggaatattagaagttgaggcacatacaaaaattagccaggcgtgtgcctgtaatcccagctactcaggaggccgaggcacaagaatcgcttgaacctgggaggcagaggttgcagtgagytgagcacaccactgcactccagcctaggctacagagcaggactccttctcaaaaaaaaaaaaaagaagttgaggcagaattaatacagactttctctagagggcaaattggcaaaaagtctcaacaattcaaaactatctaacactttgacccagcagttccatttatagtagttgatacttaggagagaatcatggtagtgcacaaagatttagttacaaagataatcatcacaaccttgatttacaatagcaaagagatggtaacaccttaaatgtctagtatttgaagctgagcaaataaactgtaatatattatatctatatagcagtaggtataatttggtcaccatagcttgctttggcattttggtgttcttgtaaaagaacacttactgataagaaaaagtattctcaatatattgctcattgataaaagcataaatctgcaggtacagtaagaaccttttttgttaaaatggagagaaaatagtttcatttcagtagtagcaatttctggtagttgggcagtgggtgacttttatttgtctttttgcttgtctgtatttgctaaagtattgtactgaatagattttcaagaattagtgataatagggtttaaggattttaatatctactttttagatcaaaatttgatattagcctaaattatgttttccagaaagtatataggcaacaacagaacagcaatatattctttcttgcagaccgaacagaaatgctgtctgagagcaagagtaagttttttcttttttggggtttttggggggtgcctaaattatactcatctgagtgttaaaatatatatctaaagattaatgcagcagtttgattttcttcaaattaggcttccgaagatgagtcaacagttatatatatatgtatgtatatatatatatatatatatatatatatatattataaatgttttagaaagcaatagttattaacatgtgctttagagttttaaacaggtctaagtatgacaaaccattaccactttctacctttgtgactttgggtgaaatactttaagcctccaaggtattgtgggatctaaataagatgctatgttaaaagtgcttagccaagtgcttgggccaaaatcagcactcggcaaaacagaagctatttttctaaaagataaacattctttattagtagcctgttgttaattatcattggtactggcacagtgtgtgtgtttatatggtttgattttggtaaacagcttgtgttgccctctgaattgctaggtaaaagtccaagaatttttatgttatttaatatttattctccttccctgcaacagatatattggatgaactgaaaaaagaataccaagaaatagaaaacttagacaagaccaaaatcaagaaatagtcaacctgatttcacataacaatgtgtggcatttgttgttctgtaaacttttctgctgagcatttcagtcaagatttaaaagaggacttactatataatctwaaacagcggggacccaatagtagtaaacaattgttaaagtctgatgttaactaccagtgtttattttctgctcacgtcctacacttgaggggtgttttgactacccagcctgtggaagatgaaagaggcaatgtgtttctatggaatggagaaatttttagtggaataaaggttgaagctgaagagaatgacactcaaattttgtttaattatctttcctcctgtaagaatgaatctgagattttgtcactcttctcagaagtacaaggtccctggtcatttatatattatcaagcatctagtcattatttatggtttggtagggatttttttggtcgccgtagcttgctttggcattttagtaatttgggcaagagtttctgcctctcttcagttggcacccaaacatctggattggcaaatcagtggcaagaagttccagcatctggacttttcagaattgatcttaagtcyactgtcatttccrgatgcattattttacaactgtatccttggaaatatatttctagggagaatattattgaagaaaatgttaatagcctgagtcaaatttcagcagacttaccagcatttgtatcagtggtagcaaatgaagccaaactgtatcttgaaaaacctgttgttcctttaaatatgatgttgccacaagctgcaytggagactcattgcagtaatatttccaatgtgccacctacaagagagatacttcaagtctttcttactgatgtacacatgaaggaagtaattcagcagttcattgatgtcctgagtgtagcagtcaagaaacgtgtcttgtgtttacctagggatgaaaacctgacagcaaatgaagttttgaaaacgtgtgataggaaagcaaatgttgcaatcctgttttctgggggcattgattccatggttattgcaacccttgctgaccgtcatattcctttagatgaaccaattgatcttcttaatgtagctttcatagstgaagaaaagaccatgccaactacctttaacagagaagggaataaacagaaaaataaatgtgaaataccttcagaagaattctctaaagatgttgctgctgctgctgctgacagtcctaataaacatgtcagtgtaccagatcgaatcacaggaagggcgggactaaaggaactacaagctgttagcccttcccgaatttggaattttgttgaaattaatgtttctayggaagaactgcagaaattaagaaraactcgaatatgtcacttaattcggccattggatacagttttggatgatagcattggctgtgcagtctggtttgcttctagaggaattggttggttagtggcccaggaaggagtgaaatcctatcagagcaatgcaaaggtatgacacagtgtttcttctcctgagaattcctgagacctatttttgacccttaaagcttttagcattttgattgtaagaatatagcatattttaggtgcatttatcttattttctttactgtgtagttgataacatttttatacggatttctttaaacctcataggtagttctcactggaattggtgcagatgagcaacttgcaggttattctcgtcatcgtgtccgctttcagtcgcatgggctggaaggattgaataaggaaataatgatggaactgggtcgaatttcttctagaaatcttggtcgtgatgacagagttattggtgatcatggaaaagaagcaaggtaattctaatcayttgagtgttctwacggtatttttataaaaacagcagagtgtaaatggagactttaaagtttgttttctctttggagactgttcacatgaataagagcagcaataatagcttggctttgtattataaacaaagtcagaaacagagctgggaagagccaggagagcatttattttctagaactcattctctaagaaatgtcttttcagtaattttcaaaggtaacataatgacaggattgtttttaagactatagtgaaaaatactgtcaaagtaggccaggcatggtggctcacacctgtcttcctagcactttgggaggccaaggcgggtggatcacctgaggacaggagttcaagaccagcctggtaaacatgatgaaaccccacttctactaaaaaatacaaaaaaattagctgatcatggtgctgcatgcctgtagttccagctactcgggaggctgagaatggctgaacccaggaggtggaggttgcagtgagcccagattgcgccaccgcactccagcctgggagacagtgcgagactctgtttccacaaaaaacagagtaaaactgagatagtgaaatactaagagaaggtatttagagggttttgttcagcttttaatgtttgctttcctcccagtaagggcataagccccacctgcaagccttctccagtgttatagaaactggctttgtctctatagacatttctgtatgtacagatccatgctgatttgaaggtagtccttacactggatattcctctgccacgttttttgaacacaatttagttacatattgcagattacctaaaaccttcaaagaaaccaaggcactttcatgtatgtattcttgcttttcaggtttatttttacctatatcatatttctgaaggtagtgaacaagtacagtatttgaataaaactttctaaaacattaagtaaggataaaggaagatgtgacatttagttataaagagcaaaaattcattcaagtaggctaattgattaagtggtagtttattacaagggtgcaagcatccaagaataggaagtccaagtaagcttcatgagaattaaacatactacactttctctccctctctctctctctctctttgacttcattgtttcttgtctctacttcagtcttttcctctttccactgacttgtagttgcctttacacagttgtctttcttaagtttctggtcctagcccatgtaaaagtttagctactatgtcattattctgtcataattttcaagatttcactataaactgataactaatgccataataaagtccgtaaactgttaaactgttttctctttgaaggacatgagagaggtagaaattcagtctgttatttcagctaggtcatagagaaaggaatttgtctagtaaaagcccttacttatgaaagtattatattatgctcaaataaaaatgcatatgaagaatgtttaaagcagctaatacagaattgtgatataacaaatatagtggctagatctaaataatttattacgtatcttgacatacatattaacagtagtgtgttgatttgattctctagttaaatttgcttttgcaactcattcatttttatgtaatattccagataacaaatgtctttgtcctttccaatctcttaacctagaataggatgtaataaaacggaaacactagtgtaactgtattgcattttgagatgtgggatggtgggtgttaaagtattttaaacagaaaaagaacataattttctagaaattggggaaggaaaagggcagaaagtttttttttaatcgaatattttgtttctaggtcatcccagaatttaggggaaaaaaatctaatattttgttctgttacagtaatttatcaccatttaattggtttaagtataattaaacaattttgagtaacaaaattttaccataagtgttttgcaggttcaggactgtggagcccttctatattggttccatatccctaaagtgtcatttctttagacctgataaagatcagacacagattgaatagttagttaagatcatgctcgtaggctaggtgcggtggytcactcctgtattcccagcactttgggaggccaaagcaggtgggtcacttgagttcaggagtccgagaccagcctgggcaatgtggcgaaatctcatctctaccaacaaatacaaagattagctgggtgcggtagtgctcacctaggcaaaaaaaaaaaaaaaaaatcatgtttgttttcaaggcctccacaaagataccttgtaaaacaatttgaaattatttctggacacaataaacctaatttatttattgagatttagactattttgtagtatatgtattaaaattagtcatgttgtgaaacaatttggttaaattttagctataaaactgtgtataaatcaaagcaggttgattttatttttacatagtggttatattatctgtctattttagatttcctttcctggatgaaaatgttgtctcctttctaaattctctgccgatttgggaaaaagcaaacttgactttaccccgaggaattggtgaaaaattacttttacgccttgcagctgtggaacttggtcttacagcctctgctcttctgcccaaacgggccatgcagtttggatcaagaattgcaaaaatggaaaaaattaatgaaaaggcatctgataaatgtggacggctccaaatcatgtccttagaaaatctttctattgaaaaggagactaaattgtaatgtgattcmcaatgtaacaatataaaaataagtttttatataattatataaaagtaagatactctgctgctttactattgtataayatagtagttttaaagttcatttggttgaattttcattttttcctgtcacagagcttctaaaaccatggaatttccttagtgatagggaatatcttttgttgttcataataagccccttttgatcacacctgagtttatgctaatgcgktgacttagggtgaggtctctaaatagcctttaacacctgcagcttgggaggccaaggcagagggatctcttgagtccaggagtttgagaacagcctgggcaacatgatgaaacctcatctctaccaaaaaaaaaaaaaaaaagtacagaaaattagctgggcatggaagcatgtgcctccctactcaagagtctgaggtgggaggatcacttgagcccaggaagttgaagctgcagtgaggctaggatcataccactgcactccagcctgggcgacagtgagaccctgtctctaaaaataaaaataaaaacaaaaataaaaatcaagtgattagaagagttggaatttcatccccacccaccaacctctgggagggagagtggtgctgaaaattaaggtctattaaactttataaaaactcttgaacaagatttgatgagcctctggtttgctgaacatgtggaggtgctgggagtgtggtatgcccagagaggacaaggaagctccctctcatcttaattttttttaatactttgccttatgcatctcttcaatttggctgtgcctgagatgtatcctatataataagccagtaaacgtaagtatttctatgagtgctgtgagccattctagcaaattatcgaacctgaatagggggtcatgaaaacccccagtttatgtagctggtcaatcagaagtaccagagatccagacttgaaattgccatctaaagcagagacaccttatggcactgagcccttaaatggaaggatctgacactcactccaggtagatagaggcaggattaaactgtaggatacccagctggtattcagagagctggagaattgcttggtaattctccacacatctggtggaaaaaatccacacatctggtgtcagaagtgttgtgtgagagtgaagagaaacagtttgttttcccagactcactctctttgatcactccatccagaaatgattcagttccctctcttcagggaccatggtttagacagggtcctgtttcatggataaaagaactacaggtttaaagaagctaaacaatttgcttgaggttcatcctcctgaacagtacttgttacttctattacatctttttaggcagctcattttcccaccccagtaacttttaaagactacagttgacccctgaacaacacatttgaactgtgcagttccacttatatgtggattttctgcctctgccaccccgagacagccccttctcctcctcagcctactcaacctgaagacaagaataattacgtcttcctctacttactatgtcttgcctctcatccacagtcactctctccacctttttgtctatttactccaacctgacatccacccacattactcaactgttaactgccataccagtgtcactgtgaaatctgtccattaggatcgacaccatttctggatctggccaccctttgattctttaatcacagtagcaaataaattttaggatccggacaaacaggtcagtaacctggcaaaggctttcacatgccccgaatttattccctggaagatgcaatgttcaaccaaaatttagatactgcctacatagctttcatccctcaatctgaaagcagacaacttcaagtgtctgtgtgggcctgagcactaaattgacattgcttatattgggagtagatgaacttaagaggtttgccccacggcctagaattgaatattataacaccaatacagtttaatactgaaaatagctataacttatataatgctatattccaggtgctactctatgagatttaaatgtattaatcagtcaaacttttataaggaatttccaggtcatctgctccaccagaatactgagagagacagagagaggatacacatgcatgtgtgtgaaccccaagagggcctgggcatttacaaccttctgctattcaatcccattagctctgggatggagttctgtgttgatcctttaaaaaatgaggcatctctttccgaagatttgagacacatggaacaaaccatttggctacccagggggaaacaatccttgaagtaggagaatgtacatatatggttcatatttcttaagtgcaaacatgcaaatctttgtaaaaaaaaaagccctggaatagtcctcataaatttattaatatttatttccatagtagctaaaataatgacatggttactggaagagaaattctgccccaaacagtcaccaagaacttccaagctgctgcattcagtggaagtttgttctcatctcccctgaccgagcagcagcatccgataaagttggccattccttttttttttccacacacttctttggcttctgtgaccaattttggttttcctcctgccttcttggctgttctttttgtcttctttgctgacttcactctctctacctgacgtttaaatgttaaatttctcaggtctctaatccttggttctcaactcctcattctgcacgctctcccttggtgatttcaaccccactcctggcttcaattactataaatctgccaaaatttatacatctaacccctactgccattcttagcccagaactgtttatctaaagcatatctcacatctcaatttctctcacaggtacttcaaggtcaattagtacataactgaactcttaatcttgccctgatatcctgttgctcctgacagaaatgtggttctgacttggacacaaccttctttttcaacatatccccaatctgtcaccaacaggcaacctcattatttttcaaatctgtccacagtccctgagccccacctccactgccactactgtaggctaatcctttgggatgaaattcaaaatcattactcagcagcctgcatgatctgtccatcgcgcacctcagcagctcggtttgtgcccacatctctcttgttctctaagcagggttttgcggtttctcaaccatttcaactttgttctcacttcaattctttctctcctgctgttccctgttcctgaaaagctacttgtccagtcctttgcttgggtagctcttttccatcttctaggctcggaggggaaaagggcacttccttaggcagcctttcctagccctgggctaggttagctttcattcgagtgctgtcattccatctaatattggcacactgttaaatatagctgtgagatgatctgttcaactgtaagctccttggggtttcgtgtctgccctgttttctagggtttccagcttgtagctgggtgcctgactcataataggtgttccataaatgcttgttgaatgaaagaatgatgatggaggtggtattccaactcgggactgcctcaacgcccggcgctgtctcctctgctactctgtttcggtgttttagcagaggcagatagtgagggcggcacagtgcccacggcatgccgctggactaagcgctaagcgggcttgggatgatgcgcacgcggggggtctgagccagccaaggggccgggcgccgcctgggggcgctgcggctgctgcgggacgcaccaggcctagtcgcccgcaggctccgcccgaggagcagcccagccaccccagggcccggaggaccaaccgcttcgacccgcgcccgggcggcggcagtgttggccggcgaggcgaggagggccgggccgccacggtggggcgaaaagccctgaaagttcctctcagttccttccggtgcgcctcccgctcgcccttgcggaggccctgagggcggattcaaggccccgcgagaagccatctgaggcggcgacgactgttctcagccccacgggaacgccgcggacgcagcgtccctctcccggacaagaaaacagccattctagagtaggttcctcccctttccttgttttttcccctttcccgtgcccatggctgacgcgagctgcttttggacgtgggtcccgggcttgactggacagacgtgggttctgtttctgaaaggcgtaaaacctcagacttgtcctgcaacctcctggtctccgtttttgcctctataaagtgggcataacaaggtctgactcactgacctggggtctcaggtgtggcgcccaaaccagcactatcagcatttcctgtaactttactaaaacgcatattttctggccccactacagctcattgaatcagaaactcagtggtgggattcagcgatttgtatttgaacaagccccaggtgattttgatacaagctaaatttttgagaaccactatataatagagaccaatcagatgaaataaatcaaaccattatatagtaaagaacctggctcaataaatagtagttgtggttattattatttcaggaatagacaggcattcattggcacagaaattgaaggttaagcaaatgcttctttccttttctttttcttttttttttctttttttgaaacagtgtttttcacacttgttgcccaggccaccgcaacctctgcctcctgggttcagcctcctgtctcaagccccgcgagtagctgagattacaggcatgtacgaccacgtttggctaattttgtatttttagtagagacggagtttctccatgtttgtcaggctggtctcgaactcctgacatcagttgatctgcccgacttggcctcccaaagtgctgggattacacgcatgagccactgcgccccacccttttcttttctttcatgcaggtcagtatagtcttgctttaaaaaactgaaaacaaaataaatatccatatgatttggatatttatcccctccaaatctcatgttaaaatagattccccaatgttggaggtagggcttggtgcgaggtgtttggattatgggggtggatccctcatgaatggcttggtgctttcctggcagagtgaactctacctctgagctcatgaaagatctggttgtttaagagtagacacctcccctttctctctattgttccgtctcttaccatgtgacacactggctccccttccccttccgccatgattgtaagcttggtctcaccagaagctgagcagatgctggtgccatgcttgtacagcctgcagaattgtgagccaaataaacctcttttctttataaattatgcagtctcaggtattcctttatagcaacacaaacagactaacacgaacatatacaaaagaatgcctctccaacaacaaaataggtatgtaacagtagcttctcacagataaacttaacgtttctttttgacatacatcttcttgtcttttgaattctttgaaaagcagaacatggttaatgataaaggttttataattttaattattttaattcaaatttcagttttcatatactgcagttatttttaatttgaaaactataatggttgaccatgaaaaattaatcttatgtaggtgaaaggtacagatttatttctagacaaatccagtttcattggcatgtcagattttattgataatcttttccttcttattcattgcagaagcttcaaaaaggacacactagatttaattagaaatgttaagattgcccaaaaaaggattacctagatttgagcaagttcaggatgaagacacctacctggaaaatttagcaatacaaagaaatgcatctgctttttttgaaaaatatgatcggagtgaaatacaagagttactaactactgcactagttagctggttgtctgccaaagaggatgtgcgctctcaagtagacctcccatgtggaattatgagtcaaatgaataacgtaggcttctccactgcaatcctactgactcccgtggaccctactgccctcttagactatagagaggtccatcaaatgataagagagttggctattggaatttattgcctaaatcaaatcccttccatcagtttagaagctaattatgatcagagttcttcttgtcaattacctccagcttattatgataccagaattgggcaaattctgatcaatattgactacatgctgaaagcactatggcatggaatatatatgcccaaagaaaaacgagctagattctctgaattgtggcgtgccatcatggacattgatcctgatggaaaacctcaaacaaataaagacattttttcagagtttagttca

SEQ ID NO: 95219 - DNA, 64020 bp, Homo sapiens
gaccctcaagacaggcagaaatgcatgatagtgacacaggagttagagaaaagcacctctcccgaggggcccctcagtcaagctctcttaagtgctagttctctaaccttgggagtcagcctggactcctgtctctcatagcccacatccatccatcagcaaatccccttggctgcccctttgaaatgctgtaatcacttgactctgtcagtagcctcctgccagactccatggttccatcctttatctgctataatttgttttccacatagtacccacagtgatatgttacagacttgaattagatctgatcttggcctaatcagaactctccaaaatgccccttcaccctgggaacaaaagcacaacatcctgagtatgaagttacccaaagccctttatgacctggcctctacctgcctctcaaatctcattttctacgaatcccttcctgttctcatagctccagcctccttagataaactaagcacactccatcctccagtctttgcagttgctgttgcctctgcctggaataattttccgccataagttcgcctgccttccctcttcttttcgcccaggtatcccttccaaggaattcttctcctcagagaagtcttccttgatcaacccatctaagaaagtaccactatcactctctgtctccctgcccaactttattgccttcataatagttttcatgactggacatcccattgcatatttatttgcttatctgtttattgtctgtgtctgccatgagaaygtgagcttagtgaggacacggatcctgtatgctttgttcaccactgtgtttccagtactttaactgatactggcatgtggccaatgctcagtgaatatttcctgagtgaacaaaggaatagtctttagagaagtgagaaagcatgatacttgcctgtatcttttttttttttccccatacaaagtcttgcactgccacccaggctggagtacagtggtgtgatcatggcccactgcagccttgacttaccaggctcaaacaattctaccaacccagcctcccaaagtgctaggattacaggcatgagccactgtgcctggctgcctatatctttaaaaattctgaggttctgattttctttagattactgatactgtatattattttatgctttaggttttgttgaaaccaaggtagctgaatttaagaaactatcactgttcccagaaataataaggcctgaacaattcttatttactactgcattactgataggatattgaatccttatttgtatatttatttttatataatggtcttaagatacaaatagcatcattaaagaaaatatatttgaaaataacatttttgaaaggaagaaaagtcactcccatcaccctaacatatccacatgcagacattgtatgcaattataattagggtgtacataagagttttttggtgtgacatacaaatattttcaacactgtctcacatactccatgttaacattaggcattaatttctaatgtctacagaatagttcattaatttgccatatcataatttacttaaccaattcccaattgttagacaatttggttttgattttcccccttttatttatttatttattttttgagacagagtctcactctgtcatccaggctgtagtgcagtggcttgatcttggctcactgcaaccttcacctcccaggttcaagcaattctcctgcctcagcctcctcagtagctgggattacaggcatgtaccaccacacccagctaatttttgaatttttagtagagacagagtttcaccacattggccaggctggtctcgaactcctgacctcaagtgatctccccacctcagcctcccaaagtgctgggtttatagttctgagccacttcgcccagcctggttttccccttttagatataatggttcagtagtgaagcataggtatgcttttctggtgccccctaccttccaatattttagaagactgcctcatgataaatttctaacagtggagtaactggttcataagatgtgtgtataattacgatattctagcatactggaaaacatattttcttttcgaaagtattatatcaatagaacaatatcatagcaaccttatcagtgtgggtggtactattaataattttgagggtttaataggcatcaaataaagccactttaataggtctaaaaaaaataagactttgttaaaatgtacatttctttaactgctattaatgtttttctcatatacttgtgaatgatttatatttctctgtttaatggtctctcctttttaaactattaagggcctgagaattttctctcacatttgaatgaacactttcatggtatatgtaaatattttcctagtttattgttctttttagtttttcatagttaaaaaaatttttaatcttcatctggctgaatttatcaatattttctttgttcactgtcctttctttagacgttgatgtatatgacatgttaactgatcaatgataatagacaatgattatcgttataataaaagtcatttcagagggtctcatcatacttgcgaaatatggtgtttaggaaggggcgtaatgaagtggatacctccctagagtgtaatctatgagtatgtactggcagaagggaaagaggaagaagaggggcagtttccttcctctgtcaaggcatgacagcatgtctcagagcacgacgcacacttacgtaggcagaaaatggctttctaagtctttcaaatgaaatccccctggctggtggtattcatctgctttgccagtgatgttcataaaatgattccaaggcaccgcagagctctcgaatctctcccaactatcaaagggttatgcttggtttacgtttcaatattagttacactttgctctgagctacttgcaggcatttgtaaccccaggttctggaacctgtaagatgcagccacaaatgtttgctagatgaacattcgaaaaaattattttaacaattttcgaatattttggcacttgtttggaaatgtatggagtggaaagaagtagggtatttgcattctaatccaggtccaggcaccaagggtttggctaatcttagataactgattttttttgtgggcctcactttcctcatttgttaagagagagcattaggctagatgatctcagagggacttttcagtgaggattctatgattatagattgtaaattaaataaaatgtccagttaattgggttatcctacatttttaaaactatgtccgatcacaaagagagtagattataaaagaaaccatcaaccttttcatagcttcaaaggtattggtttaatttggatttactgtgagttctcatgagtttcaatacaatgcagtttacagtataatagaattcatattacaaatataagtgcattgaaatcaatgttggacaattaaacaagaacaagaacaaaaagactttttatcctctagagctgtgcttgctgttcactatggtagtaaaatgtggctagtctgaattaagatacgctgtaagtactaaatactcatgagattttgaaggtttgttatgaaaaaaactatctcattagtgatttgacattgattacatacagaaatcattatcactaaatatatcttaaaaattaatttttcctatttttgtactttttaaaatgtggctaccaaaaattaaaattacagatgtaggccacactgtgtttctgttacacaatgctcctttagagggatagaagattatttgcattatttaaatgaaaatatttttgctttttattccagcatacttaatctccaatgatttttaaaatgttaaatttattctctcataggaaaatggctttgtaaagaagcttgagcctaaatctggctggatgacttttctagaagttacaggaaagatctgtgaaatgctcttctgtcctgaagcaatactgttgaccagaaaggacactccatattgtgaaaccggcctaatttttctgactcttacgaaaacgattgccaacacatacttctacttttaaataaacaactttgatgatgtaacttgaccttccagagttacagaaattttgtccctatttaatgaataarttgtatgtatttttctctatatgccatttttgtcttcagttttggagtctggctggaaattcagccaaagggtaaaagctcaacacaggatccaggcaattaattatgggatgatgaccaggaaggcggtgtcttttctgccccaggcagacttttaaggtgtgccattaccccaaaagtccttttctgtgtcactaggctagactgcagactagactgagaagcggactcaggctagaagcagactcaggtcggcttccctcttccctccttccttcccatgctttctgcagtttccagtgcccctggctgcttaagagtttccattgatgcctcctccccagccttctctctctggcttgccatttggggttgatggatatggcaacctgatatgcaggatactctgggatattctgaacaaagaaaattggtaaatgattcaacgtggagctagtgttaatttttatttttattttttggtaaaaatgaacagattagaaaagtacgtagtttgttagacctcgtgttctaacttttaggtcagcaaatctaattgcactatgtatacgctgtacctgcctggccttccctttttcttacaacacagtccccctgggacttgcattagctttccctggaagctgttgatagattccataaagaagccagaactcccctctcaagccatgtgcattctcaccgggcacttaattaatgctttacctaggaggtgtgattcttaacggtggggattaagacactggggcggtcagtagggacgtatttttggcagagacagctctggttttcttaggaagtcacatctgagaggcaaccgtctatgccatctgaggcgcctgtctactgggagcagtttaagacttaacagtttcttttacctcttcctgcaagtgcctcacccaccccccaactgcttttagttttaattcatttttgtgttttaatcagagctgagtggtgggaatgaacagtcactgatggttataacaggaagtacctatgtgggcactattacctggaatacattcacactagaaacccgcaaaatttggcttttacactacagttattgctttagcagtgttcccgattatgtatcatctatacattcatcacataaggacatttccatcaaccactgtggtcccttaagattataatggagctgaaaaattcctaatacctactgatgtggtagccaaccaacacattaccttttctgtgtttagatacacaagtatcacggtgcttacaattgcctacagtattcggtacaaaatacgcygtacaggtgtgtagcataggtgtgtagtaactttgtgtaactacactctgatgtttgcacaagaaggaaatcggggcatctgtcagacctatccctgtagttaagcgactcgtgacgatttcgctacatgtcctgccttgcccttcttttctggcccctgaagtcccactactgaacagtacaagagatgccaggcaccgtgggtactgccggccatctttaccatccccgccagtggcgctgccgcctccgcggtcccggtgagggcccaggctcagggaggtcaggcggcagggcagcgacggcgcctcgccaccgctcccctaaccggggagggcgagccggaccacggggaccgcacgagggctgggtcccaagggccagaggcgaggtaagcgcgcggcgcgccgcgggcccgcgtcccggaagcggggtgggggcgcttccccgagccccgacccgcccctaggccgcggatccacctgggagcggccaggggcggagaccgaacccgagggcgcccagggcgccgagggcgggactggactcggcttgggcgtgagatggcggcggcagcggtgagcagcgccaagcggagcctgcggggagagctgaagcagcgtctgcgggcgatgagtgccgaggagcggctacgccagtcccgcgtactgagccagaaggtgcgaggccgcccgtagcggaagccgcggcggacagaccctccgaaggcctggcggccagcgattgctgatctgtgcatggtccgtgctggcgctgggctaggcgcccccccaccccccggcgcgcgcacgtttcccctcccggcgcgcgcacgccccctagtcgtggtctggacgctcttggcactatggcggggagagggcccggtagtgaaagttgtggggctaaagagcgagaggacggcaggggttgacagatttatctctgggaggggagtttgtttgcatgggtggctcttttggtgctcgaaaaccctccgtggggatgacggtgctgtggtgagagcacggtgagaacagaaagttgtggtagaggagatgggtgaacacctgagtgcccaggttccctcagtgaggcctaaagttaatgagctacgagtaagactccggttatattagtaaaatggccagagaaagatgcaggtgctttagacgagggaacaccaaaaaaggtgtggagatgccaaagggcagaactcagaggttgactggacttcactaagcatatggagggctaaggctgtgtctcagtagctccagggcctaggcttttcctgtctcagagttggtcaacattaaatgctttttcttgagtgaacgaaaggaagacttggctatcatatccaggcttcccaagaacgtaggaaacagaagagagaaatgagaggaataagtgagggtccgtgtttgttggttagcagacctctgtttcattactttcaccaactgcactgctatgtatttttagtctatgtaatgtcagttttcttatcaataaaatggcagtcatatcctgttgtgaaggcatgttctaaagagtttttggggactcatttttgttagacaccagaggaagaaaaatttaatgtcccctgaataagtacgtatttgtaattctgttgtaagtcaaactgatgatctgtcttcccagcatcatgcttcagagacaccagatatttggaaacttgatgttccttggaattagttataccatcaggctttcttaattacccttcactattctattatccgttatttactcaaattcaaggtgcctatgggttaaagcagtaaagcatatatgctcatttcacccctctcttcatctatgtaggtgtgtatgagggaatctatacagatgttaattmgttcgttcaaacagaattattttagctattatgaggaagcattgctgggtgttttagtagatgtaaaggatatagactcttgtccttactatctagttgtttaaaatttagctaattcattcacatatgttgaacacctatgtagtgcacacttggctatatactgggttgtggagatgaaaaagatatgattgttgctctaaaggagcagagagcctagaagaggaaacagacatgaataaagaattgcattgaagccagatatatgataaaggtaaacaccaatgttgtggaaacatagccttggggaggggaaattggaaagctttctattggaaaatgtttgagatgaatttcggagaacaagatgaattctttcaggtgaagggaaagatgggataggggagtgtgagtagggatatttaggcaagagatgacaggatacagtttagcatgggctttggaactgcacagatctgggctgaatctggcgccattgttttttaactgtatatccttggacaggtctcataatctctcagaacctttggttccttgtctataaaatggataatatcactcttgtaggtcgattgtgagagttaaagaagtgtgtaaagggatgtattcagagctttacctattgtttgttatgtcctttaggaagagtataatggcagcatttggataatgggttgaggaaggaagaaagaaaaaaaatatggagaccagtaaggggctgttgtgccaattcaagtgaaagatgaaaaatatgcaaaccagagcrtgggcagtgaagatgaggggaaaggaggcaaatgggagactgttaagtgagaaacagcaggacttggcaactgattggaagaggttagagaatactggaaggggaggagagtcaccagtgattccaaaatttagagcttggtataatggtgtttagccttaggcataaagaaggtaggaattggaacaaattttggaggggcatggggaaaataaagatgaattcagtttctaatcttctacgttgtctttctccgtagaagattagaattcataaactatagatggaaatagtktacatagatacagagtcactgacagcaatagaatgaygactgagagctggcattaaaggaggagagagaaaaattaaaaagcagacccatgaccctcagtaataaatacattttactctgtacaaacaaatatacacatacaaggaacattttacagctcttaagcacatacaatgaaatttaatattttctttttttttcaagacagagtcttgctctgtcgcccaggctggagtgcggtggcatgatctcggctcactgcaacctctgcctcccacgttcaagcgattctcctgcctcagcctcccaagtagctgggattacaggcacgtgccgccatgctcagctaatttttctatttttagtagagacggggtttcaccatgttggccagggtggtctcgaactcgacctcgtgatcttcccgcctctgcctcccaaagtgctgggattacaggcgtgagccacygtgcctggctcgaactttaatattttctattctatttcatttaaaaattgtagcccactattgatttcatgactaaccaatggatcatcactggaaacatcagtgtactgtgtartgttttgccatagtgaatgctcaataaaggtgttaaatgatgtctttcatttagaaaagcgtatttattcttattggcactgtacctttttataacttagaaatttatcagagaagtaatttaaatggtaaagaaattcaggtttatgtcatatcttgattccctaagatgaggaaattagtgcccctttactcactrtgttttctactccctctgtcagtttctgacatttatattgttatatttatgttgtcaagttttgtaatttttctttttctttttccttttttttttttttttgagagggagtctcgctctgttgcccaggctgttatgcagtggcgtgatctcggcttactgcaagctctgcttcccgggttcatgccattctyctgtctcagcttcacaagtagctgggactacaggcgcccgccaccacgcccgactaattttttgtatttttagtagagatggggtttcaccgtgttagccaggatggtctcgatctcctgacctcgtgatccgcctgcctcggcctcccaaagtactgggattacaggcgtgagccaccgcgcctagccagtttttcattttttgagacaaagtatcgctttgttgcccaggctggagtgcagtggcgcaatcttggctcactgcarccttcgcctcccgggttcaaggagttctgtgcctcagcctcccaagtagctgggattacaggcgcctgccgccacgcctgactaatttttgtattttttgtagagacagggtttcatcatcttggcccggctgatgttgaactcctgacctcatgatccacctgcctcggcctgccaaagtgctgggattacaggcatgagccaccacgcctggccaggttttgtaatatttaaactttgttctgtaactataatgagtctactgagcagtatttgtgaccgatttccaaacttgagatttcagtaaattgtatttacagtaaacagtatttacaaaaatatgtaaagcactgaatacataccttgtatttatttytttaatttttttttagatggagtctcgctctgttgccaggctggagtgcagtggcccaatctcggctcactgcaacctccgcctcccgggttcaagcgattctcctggctcagcctcccgagtagctgggactacaggtgcgcgccrctatgcccagctagtttttgtatttttagtagagatggggtttcaccacgttggccaggatggtctcgacctcttgacctcatgatccacccaccttggcttcccaaagtgccgggattacaggtgtgagccaccacgcccagccgtatttttgttctgtagatggtattcattgtagaatcaagttgtatgattgaatatgtaagaaaagacataactttatgtcactagatatgtgtagctaggaaggtaatgtttcaagtgtcagtaccaaagcttttctcttttcccccataattgctcaaaatcattctcttttttactttgttcccatttggagcatatttctaatttctgtatttttccaggagcttctgattgcctttatttttccttttttgacaaatcaagaatatgygtttatcttatcaatagattctttttcatcgtctgttaaaataaatccactctctttttgaaaacactccagccccttgcttyttctggtctggttgcctctggcccattgcactgccattgccctggggttcctccttactccacttctgagttagggctgctttttgagtctaatatctttgtctttcttggattcttttcccttcatcttattagagtatattttcagatarttttttttgagaaagtatctttgggggtggtaaacttttaaatatacattaggaaatgttttaccttcatacttgattgatagtttgaatttcaaatttaaaattattttccttgttctgctcagcacccatggcccccattcaatatggagactcgtgtttttctttttctttcyctttttttttttttttttttgagatggagtttcattcttgttgcccaggcttgagtgcaatggcatgatcttggctcatcctctgcctcctgggttcaagtgatccttctgcctcagcctctcaagtagctgggactacaggcatgtgccaccacgcctggctaattgttgtatatttagtagagatggggttttaccatgttggtcaggctggcctcgaactcctgacctcagatgatctacccgcctccacctcccwaagtgctgggtttacaggtgtgagccaagtatatcttctttgattatttattttcctttgtgcctttttggaactcttgttaatcagataataaaaatcacagattgatcttctctatttcttaacatttttttcatttttcctatttttgccttttcccctactccamggctttctcctaagttgttttaattttgctaatcacaattttagtttccattgattatttcataattccctgattgcttcctccccatagcagtctattgttattttagaaatgcagttatcttcttgagtktgtctgagaaaactaattagaatttcaaaaaattatctgtcctgtttgtccattttttctccccttcttatttttttccccatccttctattttgtattttgacttttcaaaatgtttgatgatcctttgttatctgtacatatttgtgaatgaagatgtcttagctaatggggatttcctctgccttttatggttgctttgggatttcaagggaggagtggattctgcctgacctgcacccttattctctgagtgttgtgatctgctgctgttttgtcagtaaaatactgtcccatccactctttgtcttacagaaattaggtctctattctcttattctcagtactctaatggattttctttttttgtgcttctttaccatcatataaatgggatttgaggaaggaagataaatatgcatgyacagtctcacattgagtgttaactgatgtttattactgcttattcaactctcgatcttctatattctgctgtaaagagagcaaaaaggatacttaactttctcatatagtagttggatgccaaaagccccaggcctgcccaggtctaggtttcacatttcctttctttgcccatttcaggcctcaaaacaattttgtaacttttcagaatgtgagagttaactttcttccttagactggtttgatgtgctctatctacttaatttctgtgtttccttttttattagtgataacctgacttactgttcctgtatctttctgccagtcatatttataagctacttttatggcttacaattatataataataacaaaagtattaaaaagtcttataaagaataagaaaagtattcttttctttttagtttggagaatagggaggaacagaaaaggaagggaaaaaaagagagctggccaggtgcagtgcctcacacctgtaatcccagcactttgggaggtccaggtgggtggatcagttgagctcaggagtttgagaccagcctgagcaacatggtgaaaccctgtctccacaaaaaatacgaaaaatcagccggacatggtggtttgcacctgtggtcccagctactctggaggctgaggcaggaggactgcctgagcctaagaggcagtgattgcagattgaggcagtggttgcagattgcaccactgcactccagcctgggcaacagagggagaccctgtctcaaaaaaaaaaaaaaaaaaaaaaaaaaaaggaaaaaagagagcgaagggctaacttctgagtgtggataagttcctgagattgttgacatttctatgatgagcaaagctcatttaccttctcctgcctgatggatgattcaactgaatatggtttctttcaccaggatctgcccccaccccataattgtgaatattttaatattcatttgaacagatggattttaggaaatgggatggggatggtagaggcatgttctctgcctcagagaactcagttcatggaccggttagggataccacatttagggcacatgaaacaattagtgacccactcatgacagtacatcattattaaggtatatattaactctaaatgtagtaagggttcggcagaagttaggaaaagttagggcttgcgttgggctttaaatgggtagaatttgggaggagagagaagcctgacaatccaaggagtggagaagcttgtgggagccaagatacagaggtaaaataaagcatactctaggaaaagcatgtgaaatgaccgaagactactaaaatggataggtggggatcaagcctggaattctctggatagacagcttgtctccacagtgaccttttaatgagttttcacacctaccagagtgggtgtaccaggaagggataaaaggagcaggtaagtgctgggtcccaaactaaaagtcaggcttcatgatgcaacactgtctgacccactatatcactctggtccccccmccyttttttttctttttaatatttaaagaaattggagaaggctgagagagaaaggaggaattgttaagaggagttgctaaatatagtcttggaaaatataattgccataatttcccatttaggtgattgcccacagtgagtatcaaaagtccaaaagaatttccatctttctgagcatgcaagatgaaattgagacagaagagatcatcaaggacattttccaacgaggcaaaatctgcttcatccctcggtaccggttccagagcaatcacatggatatggtgagaatagaatcaccagaggaaatttctttacttcccaaaacatcctggaatatccctcagcctggtgagggtgatgttcgggaggaggccttgtccacaggtgagtattatggtgttaggrtgttgttagattatgaccagttgttagatctcagatccacgggttatgtgtgggtcagtgggagttgcttttcctgtaagggattaatttgtattttgcctacgttccaagacacctgtattacctggtttaggatgtgatgccttttgaaaactgtaaagtgtaaatgaataatattgttgacttctcacatattgttgccctaccttgtgggttgaattatatatttttcctgaataattatttcctgtggtttcagttatggtctgcttgctaatgagcatattattattaatgttaatgagcacttatatcttctcaacttcgactacctaccatgtgtttatctcagtacatggcaccaccagctacccagctggccatgccagaaatctccaggtcatccttgactcccctctttctcttatgccccacctgtggtctattgttaagtcctaatgattttacctactgaatatttactgaatctgtccatttctctccaacccactgctactactgcagtctaagctgacatctcctcttgcctgcattcctggaaaggccttttaactgttctttctctccatgtcttgcatcctctccttcctctttattggttatttaaaagtaattgaaacaagattttgaaaacacaaatctgccacttctctcccctccttaaaatctttctgtgacttactattgcccttagattgaagtaaaccctccttaacgaggttcttcctaatcttggccctgctatctttctattttcacatctttctactccccacttcatagtctgagttccagccactctgagtatctctgtttcccaactccactttgccttctctactgctgggtcttaatacatgctgttctctggccaacagctgcttgggaagttttatcattatgaaacaggtaaagagatgaaagcaaaacaagctaagggtattattttttagtataatgcctgaaacccatcttagaggtgtatatttttgactaagacttaagtggttgcaaagaagccctagcacaactttatgcagtcttcgctcagtttctgccccttccaatataacaccatagcctataaagtcagtatgatggagtcagaggggagagggtcaaggactcgtaacagtagagggattatgtactttgctagtttaactttccctgtattgtccaatcttgggctttgctagatgttaggcaccaaaaatacattcagatctacctccttcatgtcctgcatcaataggccagatgaatgtcagcattttaaaactcttwcatattttcaaggggaaagattgcaagcattttaaggcaatgagataataagggaatacagagtatcttggagagcagcctaggtttatcgagaagaaaagacaggaaattatagctactgactttgctcaaacttaatgcagctactccagactcgcaggcttaatggtggaacccaggatactgtcccaattccagttgactctgttaacagctccttcaatgcttgtatcatctctataatgtgcctgctaattgraattttacttggtttcctccagtaactaattcctctagaggcagctcattccttttagaacagctgtgctccttctagaacatcttctttgggttgagctaaagtgtgtcactttgaacttttgtgcatttgttctggttctattcaagtacagtggtgaaaagagtaaggaagaagcattatttttccttttaacttatatttacacttcttggttaggataatctcaatccaaataagtgagtcaatcatttatgcaggtttttttttcttttcttttgagacagagtttcactctgtcacccgggctggagtgcaatggcgctatctcggctcactgcaacttccacygcctgggttcaagtgattctcctgcctcagtagctagaattacaggcgtgcgccaccgtggctggctaattttgtatttttaatagagatggggtttcaccatgttgatcaggctgatctcgaactcctgacctcagatgatccacctgccctggcctcccaaagtgctgggattacaggccaccgtgcccggcctatgtatggtttttagcatgtcatttgtcacataggagctatcgaataaatggtaatttattaattttaagcaaggaagtcagaattattcattataagataaactcattactagccaagtagttaacatttcggtaattttcagcagatattttcacccatctactttgtgtcagacactattttaggtctggaaagataaggccctgatttgaagggactcacactatagctgatgagacagaaaatgaacataaacagaatatcctaacctgtattatatgtcaaatataagtgtcaaatgaaaagatactgaatattaaaaacatagaaatttagaatatggttctgaatagaaaaacgtccaccaaaaaaaccccacaactggttgctcattttttttttctcctctatagtatttatttatgctatatttgtagtaccagtggcttttttcccccatgcatttttctttgcagatacttgcaatctggattgtaaagggatagaggattatacccacagtttctcgaaacttcagtctggggtcaaagctcgctgttgttgtttatagaaatgtttgagtaggcagcctcagctgtttgttatctcctaacatcacactctgtactgtggatttttacttgcatcagcaacttaaaatgtgacaacttcagtgcttaagcatwcatctagctttacagtgtttgggacaagctgatcagagctcaggctgtcgttggtgtagcttttgttgtctgtttatctttcttgtttgctcacattatcagagcttagaaaagagtgagcttttgtgtcctcagttgcaattataagttcctaagcaaaaatttcccatgggctattcttgtattatatatgtagcaaaagaaatagattgctaaatgaaatcgagggtcggattctttcccaagtttatcctcaaggtaagggctgcttgggcaattagattagagcaggaatttttccaatgcaagtatatagtctgattcaacckggcttaagcaaaaatgagattttattggcccagagactgaaaagttcacagaagggctggctggatcagtggcattaggagccagtctatctctgccttttggctttgcttccatctatatcagtttcatttactggtgccacatggtggcccatagcagctctaggttccatggcatccttactgctagcaataaagaacaagtttgttttctaacagtccgataaagtcctggacctaactcttcttgacccaaatgggcatcttgaaattaatcactatggccagagatatggaatcggctgactggcttaggcctgggtcttacgtgcctgtccctgacccattctttgtgaccaggaagaaaagaagtgcggattgacttagactaggtcatatgcccagctcggcagccctacccaaaccactgagctgagagtagggtgagagtgtttgttgtgtttccagaacaagggggaatggatactggagagtcaaaactaaactcaccaatgctgtcaatcatttctgaaattctgcagaatataataggctctttgcagtcatagctttgtcagtgctgatttttaacttaygatcttcttggaggctttttgggaattaatatctatgtgtagttacctgagccataacttaatgatcacaacgaagactttctagtcctcaaataaaacattttaaagtaattgagtggggcatcatcaaggacagagtctttgaacaacccttctaggttgttcatgatcagtacttttgggagggttatgattggttcactgtgagtagctcacattgacttcatttctttctttgttagggttgcatggcgtctgcaagaatataataaaagatagtgggtatggatttcatcaaggcatatttgatggagtcatgatatcctcaggaggctggagaaatttggattggctcataatactttattcagaaaagatgtgtagatcactgctctgtggaaggtgtgatgggagtatagcagggaacagcatggacctggttcccagtgttttggagttaactagcctattgtcctcacagaagcaggtttgtgctggcatgtcacagggctctctcctttgagctgtcctgttcaactttttattgaacttttagcttttttcaccttttgttgaacatttagatgtctcactgttccttattttcagcatgtctaaattcattcttatcattcttttttgtttttcatatttctgttagcagccactttgtagacatggaattatccttgcctccttcccaccatctacttattaccaggtttttctttgtaatgtttttatcacctgtctttctctaattccagttttgggggaattcttagtctacaattttcattcttcatatctgttccattggaataaactttaaattggtttcctggccatattaattttcccaaagtacctttctgtacaggtcatctaccctattcaagccttctctgtacgctgaatagatctgtgtacctgggcaaacaatggttcctgctggttgttgtcaaaagaagggacattggatgaaatccaaacattcaggccactttctgggtctgacctccctctctatcttaatacttgtgcctccttggtacagctccttatttcagccaaagtggtctgctggaagacagtatttcctagtaatggaaaatacggatttgagaatcatactaacctggatttgaattctagttttgctcctttctaattgtgttaccttgggaagatcacttaacttcttagagtttcagtcttcttacctgtaagtggactcagacctaccttacatatctgttatggagtttaaatgagaaaatgtctgactagtgtttggcacatagtaggtgctcagtaaaaatgccattgttgctgctrtggctgctgttgtttttgctgatgttgagtggtcaagcatagggtaatgttatgtgctttgctgtgaaagtgattttgtttataccattttccagtctagaatatattatgtgtttcttcaggatagtctcttctagtctggtgcttaagatcactggctttggagtcagactgatctgagtttgaatctggcctttaccacttgggcagaattacttaacatctcaaagtccaaatttccccatctgaaaattggagataattacagtactgactaattgtgttgttgagaggataaagtaaggtagtaaggtgatatatgtaaagtgcctagtacagttcgccttgtagtcagagatcaatacatggcagttattaacagtaagcagaaattatttcccccaaaccttccatggctgcctacaatgtactagtccttttcttccgtaattcttatgtacttggcactttacgtatattagcacgttttattaattctttttggaagtatatcccttttctttgctgatagactctttcggagcagaaaccttcttctaaatcatttgtatccctggtacctagtcawatggtttatgttgtagactttcagtaaaagtttcttgaggtgaagctaacagttttgaattcaaagcgtgcctgtataaatgaatagattatcaacactttatagctatgaaagaaaatctggatttaaaaaactgtgtgcatgtacacagggacacattaaaaagtatactagagtcagttgttttataaggcgctgtaacttgttgtttttagagacaaggtctcactctctcacccagactggagtgcaggggtgtaatcatagctaactgtaaccttgaacttctgggctcaagtgatcctccaacttcagcctcctgagtagccaggactacaggtacacactaccatgcctgactaatttttaaattttttgtagagacacgtctactctgttgcccaggctgatcttgaactcctggcctcaagcaatcctcctggcttggcctcccagagtgctgggattataggcgtgagccactgcacccaaccaacattttttatatttgtgagtaaagagttaacatcggtcccggactaagctgggcctgcctgggggaataaccttgaaacttatcttctctcagcactagttttggggaagccatagagttgtgataatgtgggatgtacctgtacctgcctgttactgtgtgctactacacctgaattgggagctgtgagttggcatggaagccttgggtctgtggaactagatctgtataaaagatgggcaggaaatgggagttgcagcttctctgtgtgaaggtgacctatgtgccccttggctcttgctgcaccctgtgtgagtgaggaggcaaaagaagcagtgtactgaggtagctgctgggccctggatgaggtaaagatgctgaacctgccatatctcctcttctgtgttcttctgtaaggctaagtacatggagtaatacttagattggttcctgagcccgagtgctgtaacagctgctgggtcaatgtggtattctcaatccagtctctgggtttgttttttattttttgttgggggcaggcagtgcagcttaaataacagacatttattttctgacagtctgggtatttttaataatattctgtggagactctaacaccactggtcccaccagtgactgtcagcatgtctatgagaatgcttaatttttactaagccaagaaataagtagttataagatcctacatggtatgatattttaatatgagttacagcttatcttctcattgaaagtgtttccaaacctttaacacgtgtttctttagcttaacaaaaatcgttctcactaattgtatttgaacttttgaaataagttatgactaaaagtaaatgaaagcaattgtaattttggaatgtkcttttgcacatcgcacatgccattgtaggcattttgggtgacctccctctctggacaattgagaacattgcctcctgagttaggcactgtgggagggagagtgaacccttactgtccttgcttcatcttctttgttttcagataggataactgcaacccagggaggctgtcacttccccaaggacacacaggcagttaatgataatgcgaggtcacccagttctggtttccactccagtgccctttgaagtgccatttttcttcacacttcattcattaatattgctttactacctagattttctctctcttgacagcatactgcattaaaaccgttattcatggaacaggtacccttggtaactgtatgcatgggaacattgtcatattttcccaaggaagaacttggactgagtcacatgtatctaaaagtactctggtctcaaagttaagcttttttttttttttcagtcattttgtattcggctaaatacacaggaagaaccagctacagctttgatttataacagggcctttcatttgaatgagaagtgcacccatgataggcttccttggacctgttccagaattgtctattttatcttttgcagcggctttagaatatatcctcatttcagagaatggtaatttacttcttgttaactcccagcccattaagattaaaagacagttccttaggggttatgccctgttattcttgccaagatgggctagcctgctaaatgttctactcaagcataatgattcattgaatgtactattgaacacttaactgtctttaaaaggactaacccaggtgacttaaacctcgctacatatagaacttcaggtgtttaaactgcttttccaattcaatttttattttatcaccttaattgagacattaaaatgtctattaggtttctatgtttttgtgtatacatttaattcagaggaagggcagaatttttaagaggagtgaagttggaattagaaaaaataaattctttttttagtttattgctctgaaccttaaatttcaagctagggtagtaaagacctgtgtgtaaatgaatgcccagcttaaatgctgcctcctccaaaagtcttcttagatttcttagtcatatttaaacacttcctcctgtgttttcgccctgtattttgacacctcagcataccttttgtcattggatttgctttattatatcctatatatgtagtttaaaagttttttgtttgttttttttttttgctttactacttgcagggattaggagtccactatttaatagagaaccccatttcatttaccccactttataaaaggttagaaaagtactctccatattaagtttatggcttcatgtaactttcacctgatggtcctttagagaaacatataaatagtcttcaaacattttttttttggtgtgtttgggcttagcacagtgccctgatgaatctgaggtaccatctctttcttcagtaacttaaatatcctttttaaagtacagctgagaattgtatattgagtgaatgactgatagtattgcaaagaaatgcagatataatagcacatgatccatcaatgtttatcttttatgttaatcrtcatctacaaaaccagattgtattgattattatccataaataaacaagcagaggccgggcgcagtggctcacacctgtaatcccagcacttcaggaggctgaggaaggcggatcacaaggtcaggagatcgagaccatcctggctaacatgttgaaaccccgtctttactaaaaaatacaaaaaaagaaaaagaattagccaggcgtggtggtgggtgcctgtagtcccagctactcaggaggctgaggcaggagaatggtgtgaacccaggaggcagagcttgcagtgagctgagatcatgccactgcactccagcctgggcgacagagcgagactccgtcttaaaaagaaaaaaaagaacaaaagcagaataaactaatttactgtkggatgaagtaggcagcaaatcatgagatggaaattgaacagaaacaaaaaatatcttcctaactgcccatgtcattactttgggttaaagcagtcaaatccactgtaaaaatttaagtgttctttgggtgtagtgacacagggaaccagaatcacttgtaagaagtcctgtgattaattaaaaaacaagaaagagctaggaaagaaattttgattttagtcagagttttgtgtgtatatatgtgtgcatgtrtgtgtgtatatgcatgtgctgtgtataaaatgggtcatgatgtttttcttactgagtttctaaaatgtttgaaagccactgatttaggcctctgcttctcaagaaggcatgcatctattacaggccttattgggtaaattttcttcaactattaattttacttcaacattttagcagaaacaaaccagaaaaacaaacatataaacatacaaaccacacattagttttataacaaatacaatcacaaaggtagcatatagaagataaataaaattcacaaattttaaggaaaaaaattagctgggcatgctggtgggtgcctgtaatcccagctactcaggaggctgaggcaggagaattgcttgaacccaggaggcggaagttgcagtgagccaagatcacaccattggactccagcctgggggacagagtgagactctgactcaaaaaaaaaaaaaaaaaaaaaaaagggtaataatttaaaggtaaaacacaaaatattaaagcaaaaactttgcctctgtgggcaggcctgcaggcagaccctccagggattttaactttctctgcagttaccttagtgaaaaatttgggaagtactggtcatttagtggaatttcaaaattccactaatggatgatacaaatgaaaagcatgatacaaatgaaaatgaaaattttttgtgttaaattttttttgatgtgctgttttagttcctctgttgatttttaagctatgtattaaattgtttttgcagtttctggagggattacatcttttatttagtacagtctgtttcagattagtattcatctgactccagtaaaatacagcaactttgctcttatataattccattcttccttccccatttatgttattattgtcatattgaggcaggaaattaaagaaagaaagaaaaaaaaaaagggaataagctttcctgtgctaggctgacttgtcccagaggcagcaacaagcacagctgaaacccaggaaaagtcttgataatactatctaagaagccaggacacagaagaatgtgctctggagactctcccaccactccctccacatagggagaagaaaaacaaatttctctttgttttacagtatgagtttatagattcctgttccctgtaactagtgacttctagtattctgttttatctaagcagtggagtgatggtcataaagcaactgagcaggcctgagatacggccacctgggcaccatagtgaaggccatggaataagccttgctaggcactacggcaaactagataatggccatctgagttgcatagcaatggtcatgtgtaatcctgagttatgaacctgttacaatttgattaaccgtcttgtcttgcctctgtatccttgcttttgctttgcgccagtgtaagcttgactcaagttagcccatccccttttagaagtgtgtataagcgtcaagtgctgtctttgttcttggctcagtttttggatgttgagtctgctgggtctgagtgcactcagaaaagatcctcctggtttaccccgaggtctctcttgtcctcctaattcacacgacagtataagttacatctgtatgtactataaatctaacaaatagtattataattattgctttaagaactcttatgttttaaaaaggaatagaagaaaagagaaaaaaccagtcttttgtgtttaccttcctacttactgtttccagtgttcttcattctttcctgtgaattcaagttaccatccagtgtaatttccttttggcccaaaggattttctttagtctttctcagacagctctgccagtaattaattctctcagtttttgtttatctaggaatgtcttattctgcctctatttttgaaagggttttgctgaatatgaaattcttagttgacatatgtattttttttcctttcagcatgttcaatgttattcttctgccttgtggcctccattgtttctgatgagaagtcatcattcattctatttttgtatttccctttttataataagttatttttctctttcagcagtttgactctgatgtgtaaaaatgtagatttcttttcttttttttttgagatagagtctcgctctgtcaccaggctgaagtgcagtgacatgatcttggctcactgcagcctctgcctcccgggttcaagcaattctcctgcctcagcctcccaagtagctrggactacaggtgtgcactgctacgcttggctaatttttttgtatttttagtagagatggggtttcaccatgtgggctaggatggtcttgatttcctgacctcgtgatccacccgccgtggcttcccaaagtgctgggattacaggcatgagccaccgtgcctggcatgtgtagatttctttagttttatcctatatgggatttattgagcttcttgggtctgtagattaattttttcatcaactataggaggttctcagccattatttttcaaaaaaaatttttttcctgccacattgtctctcttctccttctaggactcttattccatgtatagtatattggtattcttgatattgtcccacaagtcacttaggctgtgttcatttttcttcagtcttttttttcttttttcacgttggataatttctgtagatctgtctttaagtacactgccttttttcttccatcatctcaaacccattgttgaatccatgtagtgcattttttatttcagtagttgtacttttctttttttttwwaaaaaggagtttcactgttgtcgcccaggctggagtgcaatggtgcaatctcagctcactgcaacctctggtccctgggttcaagtgattctcctgcctcagcctcttgagtagctgggactacaggcacgtgccaccacacccagctaatttttgtatttttagtagagatggagtttcaccatgttggccaggatggtctcgatctcttgacctcgtgatccacctgccttggcttcccaaagtgctgggattataggcatgagtcattgtgccctgccagttgttgaacttttcaactgtagagtttgatacttattgaaagtttcagtttcttcattgatattctttatttgttgagtcattggtgtcatatattcatttaattctaggaacatttgtttcctttacttttttttttttttttttgggatggagtctcacactgtcacctaggctggagtgcagtggcatgatcttggctcactgcaagctctgccttctgggtttacaccattctcctgcctcagcctcctgagtagctgggactacaggtgcctgccaccacgcccggctaatttttttttgtatttttagtggagaccgggtttcaccatgttagccaggatggtctcgatctcctgaccttgtgatctgcccacctcggcctcccaaagtgctgggattacaggcatgagccattgcgcctggcctactttagtttttttgaacagaattttctttaattcttggctcatattcataatggctgctttgatgtctttgctaaattgaatatcttggcccacttagacttcattttccttgactgatttcccccaccttgattataggtcactttcttgtttctttgcatatcctatattttttttgttgttgaaatctttttgataatatcttgtagtatctctggattctgatttactttttgaagtgtttgtttgttttttggtaactagcttgctcttagccagttagcacatatctccctatgatatgtgtctatagatatctctgctcaatttttgtgtgcttatttattttttggcctggcttcctaggtgctgctcctatgtccatatmgcttagtggtgagccaatgattgtttcttcaaatattcaaatcttttgcccaattttaattacrttgcctttttactgttgtgttatctaagttttttatgtgttctggataataagttccttgtcagatatgtgatttgcaaatatttctcccattgtgttttttcactctcttgatggtgaactttgaagcaaagtttttgattttgatggagtcctatgtaataattttttgctacttgtgcttttggtatcatagctaagaaaccattgcctaatccaaggtcatgaagatttatgcctcygtttttttctaagagttttattgttttagctcttacatttaggtctttgatgtattttgagtgaattgttgtaaatggtataagttggggccaacttattcttttgtatatggatatttggttgtcccagcactgtctttaaaaagatgattctttccgtattgcattgtcttggcattgtgtcttctctgtttttgaaggacagctttgctggagatagaattcttggctggcagtgtttttcattcagcactttgaatgtgttattttcactgccttctggcctccaggttgccattgacaattcagctgttaatcttatgaggatctgaggatctctagtgatttttttttttttttgkygcttttgttgcgggaagtcagggaccctgaacggagggaccggctgaagccatggcagaagaacataaattgtgaagatttcatggacatttattagttctcgaaattaatacttttataatttcttacacctgtctttactgcagtctctgaacataaactgtgaagatttcatggacatttgtcacttccccaatcaatactcttgtgatttcctatgcctgtctttattttaatctcttaatcccatcatctttgtaagctggggatgtgtgtcgcctcaggaccctgtgatgattgcgttaactgcacaaattgttcgtraagcatgtgtgtttaaacaatatgaaatctgggcaccttgaaaaaagaacaggataacagcgatgttcagggaacaagggagataaccatcaggtctgactgcctgagagccgggcagaacagagccatatttctcctcttacaaaagcgaataggagaaatatcgctgaattctttttttcagcaaggaacagccctgagatagccttctagattccctggaatatgtcggagcttttcaaaggctcctcaggacatcttcttccccagtttttccttttaagttttttggtcagcctcttgttagcactaactggattcctgccccagacagctgtgatattaaacaattgccattgatttttaaaataaatgtcctagggctagggctttttgcatggagagagctatgagtcagatcaagtaaagataagacctgacaatgcaccttttcagggaactgccagacaaattaattagtgacagttttctgggatggagcttttgttgagctccaaacctgttctgcccctccattggctgccaggctgttggtggttgtcacagctattttagttgtaaggctgttgattttcaagtctaccatgaagctggggagagggggatgggaatggggcaagttgaaaaggcacaaagctcactgttcttacagagaataaacatttagattgktgtaagcctttgactaatttctagagttttgaaaagttgattttgaccatttttcccaatgttcttgctggttttattaaggagcagatttttagttttctactctgccattctagaagtgattctgagccagtgatttagatagtagttgttttcaaacactggaatgcatgaagctccactgattgatctgtctgtgagttgcagagtgcattcaagttttagcacttctctagttgtccttggctgttactctctgccaagctctctcagatcttccctgcatatccctatagtttctagtcagccaggtatgtaggaagagtttatctcagcccttctatggacctcttattttagtatagccacattacattcccattatgctcttacaccaactgggattacaaccttggcaagtaaagctgtaatttttcctgtaatattcctatgtttagctcacaaagccccctaccacaagttaagtctgccccttctggcagcagagctgctgttttttccagccagccccatattggtaaaactgccattcttgaggactgagctgggggcctgggaacctcaccaggtaagaggaccagagacttctgctgttcctactcagtctttggtcagcttccaaatccctgaaatggctggctttggatgattttgtttgatatacagtattttttttttcagagaggattttcactgatttcttaccatcattgcaaaagggaatgttcaggagaggaaatttctgatttttcagggatgtggtatgtgggagagatgcataatgtaataacagtccaaatttcttgagtacttactacctgccagaaactgtgctaagcaattattttgcattgcttcatttgattctttccataccctgcagaggcatgggtgctattaatatcctgctcctctattttatagatcagaaaaaaggctcagatgaagtaccttatcgatggtcacacaactcatgagtggcagaaataatattaagacccaggtccctttggctgttaagaccccagccctaaaccactacatcatatatctatagctggagcctggcaccaggaggcgtcacaatgggattgagatagggatacagaaagaaggatggggactgaaaggtgaagggtcctgaagccctgagcttcctcttttgctgttctcactctgtttcctggaggttttactgagtgccctgyggtgttgactgcgtcctacttgcaagccctgtggtctccctaatggtcagctaggctgggcctctaaggtctttcagaagtgcacagccctatggtgaaaaggcatcctttctcatgaggtaacagaccagcaggacttgctttttggtcacgacactgctgaccaaaacaggatgtggtccagacaggataaaatggagaaaccggcagaaaccagcagacgatgacaaaagtgatccctggctgctgtcattgctcattggcataagaaactcctaccagcaccatgacgatttacaaatgccatggcaatgacctggaagttactacccctttccatggcaacaacctggaaattacgatccttttgtagaaagttctaaataacctcaatttgcattgacctgccccttaatttacatatagccaaatgtgggtttacctgaatgttaaatacagttgccaggagcccctgccttgctgactctgggctactgcctgagcgctagccctactctgcaaggagcagtactgttcaatcaaaggctcactcctgaattctttcccggcaaagccaaaaaccctcctgggcataaccccagttttggggctcacctgtcctgcatcactcacatgacatttccctatttaaacacccatgatccctgagccctacaagaccagaaggtcatagggctccacagtgttacctggtaatgttacagaattagatcagagaaaatgggatttcttcattgtagtgtgcttaatgatctctgtaaagagtatagcataaaaaagcttcattagtttgaagacttattttgattgaactgcaggatttctgtttgggcctcgtgtattctattaaaatgaaataaagtagctatacttaaatttttttttttttttttttttttttgagacggagtcttgctctgtcgccaggctggagtgcagtggtgttatctcagctcagtgcaacctccacctcctgggttcaagcgattctcctgcctcagcacccctagtagctgggattacaggtggccaccaccatgcccggctaatttttgtattttttcggtagagatggggtttcaccatgttggccaggatggtttcaatctcccgacctcgtgatccatgcctcggcctcccaaagtgctgagattacrggcattagccaccgtgccyggcctrtgtaaaaaattttaattttaatagcatttgaagtcagcatttaattttcttcttttctttttgtttaagcatttcarattgtcacttcaaacattatacagagtttccttgrtagtacttaaaagtactatttttctagtaatcacctttaagtttggcattaattttttttgtctgagaatatttgtataatttttttattcagcaaaactgcaaatgaatcgttaattataaaagaggtaatgaaagaagataaagtggaaattgaacactaaaaaaaaaaaaaatccctttgtcttgaattctcccctcatcaattttctgtggggcatccctctgtaaatagcttatgattgaatttttgatatttgtacccaactggtagtcttttagttaggctgttcagtctgtcctctttttttgggaataatgcatgtgtctggccttctttctgttacctttgtcatcatgtttttgggagacaatttttttygtcatttccttttctttgtgtccttttttccctctagtacttcataattatgcattcatttctactattggttacattaaaatatttttagcctcaaattctcactagcattataaatatagtatttattgaccttacccctgtgaaagacaagaaattaaatgtgccttttcttttctttttttttgagacagagtctcactctgttgcctaggctggagtcgaatggagcaatcttggctcactgcaacttccacctcccaggttcaagtaattctcctgcttcagcctccccagtagctgggattacagtcatgtgccaccacgcccagctaattttttgtatttttagtagagacagctttcaccatgttgaccaggctggtctcgacctcctcagttcaggtgatctgcctgctttggcctcccaaagtgctgggaatacaagcatgagccaccacgcccggccaatgtgctttttctttctagcttttgtcaacataaactggtgtttaaaattaatagtagtttaaagatgtgtatattctttaaagaatttttttcattgacattcgattattttcttactatattatagagtatagagaagagtcatttaaactgaactgtaaattttcctgggttcatgattccttgttcctactgttatagcatatcttctttattcttgatttatgtattttgatgaatttcttggtcagatggaatattcctttaagtagtttttttcagcatggtccgtgagtggtatgttttcagaatgcttttatttttgaggctgtctttgtacacatcagtgaattcttgaataggatagaattctagggtcacagttttttgtttttgtttcttttgtccacccagaattctagcccaggatttggcaattattttctgtcaagtgctagatagtaaatattttaggcttttcaggccatggaatctttgacagcagctcgattgtgccactgcaatatgaaagaaaccatagacggtaccaaaacagacagtgttccaatacaactctatttacaaaaacaggcaacagaccagatttagtcttagggctatagtttgtgacctgtgttctagacaactagtctgttgtcttgtggtgattagtattgtaggtgaggtctgatgtcattcatkttttcctttgtaagaaacttgttttttcattgcttgacttcttttaggaatttttgttatttttgatttccaaatttaatattcattaattttgtgaattaattggtatttagtcatctctttcatcctaaagtttcatgtcctttttaactccagggaactattttcaactatcttttttgataatcccttctttcctctgtttttgaaattattattatagttactttggttcttctggatctgtaatatatttctctcatctttttatccccatcactttcaaaatcatttgggtttataaccgaagttccctatcttgtctattttattgatttgggttcttcttctgtctatcctgttattcctttgccatcattaacattttaaaattattaatcttttaaaaaaatctgttaagtgagccaggcatggtggctcatgcctgttatcccagcacttttggaggccgaggtgggaggatcatttgagcccaggaatttaagactagcctgggaaacgtaatgagaccccatctctacaaaatatttaaaattagctggctgtgttggcatacaactgtagtcttagctgcttgggaggctgaggtgagaggattgcctgagcccaggaggtctaggttgcagagagctatgcttgcactcccacctgggcaacagagcaagactgtgtctcaaaaaaataaaacaaaaacctctaagcaattgttacaaatctcagattattcttttgtatgactgtgttttctaattttatattatagatgcagcatattctcaaatatcattgttaaaagctttgtcctgaaatatgtctattttaatgggaaatatttgcactgattcttcagactggtccttctccccatctttattgtgagagatatagaatttaacttttaaaatagtaattaaataccacaacaaagtaaggatacttgtggagttgttttctctttaagtaagtacaatgactaaaaatacttcatttgccaagagtctgctttcgttccttttgtatattttattaaatgctggtggcataaatacatacttacttttattccttatgacctgatgtagtcacagtaccccaaagtactgtatgtattatcaaataagctaccaacactcaccgttttttcatttttcatgaaaaggtttacattaaaaaaaaatgcacytagtgtatagtcagagttctcagaaccaataagttttatgtttgtgtgtgtgcrtgtacatctatatttacatctatatctatacttttaggagctttattataatgaatttgctcatgtgattgtggaggcctagaagtctcaaagtctgctgtctgtaagctagagacccaggaaaggtagtggtgtttactcaaagtccgaaggactgagaaccaggggagcctatggtgtaaattctagtccttgtgcaggaaatgtgatgagatggcctagctcatgcagttaggcaagaaagaagggacaaattccttcttctgccttttattctattcaggccacctgcattgagatgggctgtccactttactgagtccactcattcaattgttaatctcatcctaaaacactctcatagacacacatagaaataatatttggtctgggcacctgttggcccaattaagttgatgcataaaattaaccatcacaccaagaaatacctctcctttccccaaacccttcatagtacgtgctatatttctctttgaatctaagaagattatcttctatgaggaaataatctgctccacacagaaacctgatacagagctctttcaataatgactcattctcaacatcatgaaattatattcgaagttgcagaaaattcactattgtatattgaatgctacattgaaattggaaagaaaaaggtgatataaaataaaagctattacatattttgtgcttctccctaatctgctttattcattggaaattcctacttaagtttagtctgcttaaaacaagctagatacttgattttgcatgcaacaccttggctgttacttttactgtctcctagcactgtgctacagactgcaaaatatttagagaaaattcagacctcgctcaaaataaaaaataaaaaatgctagcatggtctataccaacgttggattgctgggctcactctcacgtgtgtgatctctctcattctctcgctcgtgctctctctctctcacacacacactccactcaaagctacagtgtgcattcttctatgatcccagtagattgtaggtctctgtattgactggagatactcttccaagttgaagatttaaaaaagaactttagatttttagtgctgattcttcatctttatatttagaaaattgtcatttttagattcctgatagaaactttctctaaaacattatcttagtacattaattagaaatttatgtcccacatatactagctctagtaatttactgktgactaaggcattgttaagaaatgtgtttggaaaacttctgttggttttttttttttatgaccatcattacatttttttctattttttcatttatctacgtttaaaaatgtttggaaatatttcagaatttgatagttataacaagctacaagagaataaagatttagctggattacaagaaaaatatctacttagtaatgagtgaaaatgagataaatttgtcatatgtgacatatggtaatatacatacagaggcctaaagaaaacttcaatgtcccccccttttttttttttttgctacgtaatcttatttccttagaaagagcatattgattttactccactgagagtttggctttctaaaatcacctcaacagttaattgatggtgataatcaaccaagaattgttcttcatttatataatttgctaactttcaagttcccattgagttgagaaagatagtgatgatagctctgacaatatacctgaaccagtttggataggaatgtttaaaagatgtattaggctatttttatcctgtagaaactatagttcataggagtggtgagttaggggaggctggagaatgggggaaaatgggaagtaagataaattgttggtgtatgtggttttgcagatttgcttttttggcactaaaagagtactttttttttttcttttctttttgagacagagtctcactctgctgtccaggctggagtgcagtggcatgcccaggctggagtgcaatggcacgatctcagctcactgcagcctctgcctcccggattcaagcgattctcctgtctcagcctcccaactaactgggactacaggtgcctgccaccaccatgcccagctaacttttttgtgtttttggtagaggtggggtttcttcatgttggtcggtctggtctggaactcctgacctcaggtgatccacccaccttggcctcccaaagtgctgggattacaggtgtgagccaccgtgcctggccaatcactagcagttcttaagaaaaaaatgttttggaaggtcgtgtgtttgccctcgtgttctgtgtatgcacgtgcactgaataggaggcagtcccagggtctcgcctgctgaagagatcctgcacacctactgtctgcttggctgtcatcctactgtattgtagaagcatccacatcagctccctttttatttgggggttgtgcccagatcctaactctcaacaagatgtttttcattatgctttatccaggacactctttctcactgctgttttcaaatgcctttgggttacttctgggaagtatagattcaaactcttccatcaggtaactgttttcaccaaataatgtacaggtaaatatttggaagacataagagaaaatcaaggggaaaacttaggaaagaaggaaaccgttgaactcaaatagttatcttctggacccatgatcaggtcctctgagggaaaaaacacagatccttttattcatgagaactggacatattcctgctgctggatttgttcttagccattagcctctcgaatgccaccatcgctgtcacagagaccaaaaaaaaacaaaaagctgctcctgttcctcctccttaaaaaaaaaaaaaaacttataaaatttcaaactgcagtgactgttttctctcttccctcaccttaaagaggtttaggtttgcctgctattggtagttctgatgggctctgttagagattgtgtggttggtgttcaggcccagatgaagaaagaagggaatagtttaaatttgctacattttgttttgcttgagaaagatgcagtaaactgaggggagaagggaataagcgattattgtaggcacytgccggagggagctttgccactgtatgaaggatttattttctccatggttggtttttgtcagcatagcccagtatttgcaggggcagaagatccaaacatggagcctttgttaggaktcatggccatacccacattttgcctagcacactgctgagggtaagcagggatgagggctgaggtggtcttcctcgttaaatcagctttgcactaggtgtctgaggcccaagaagggtcaagatttgctttttagcaacttgctgcccagagacccatcgttacgatacgtatacctgctcctcctggctgggggcttgactgcagttccacactggtttccttccggctcttcccaaggcagccatttctttaacatgtatttcattatcaaattccctttttcctaaattatatcttgcagaaatacctcgaagtttccgacttagatatggcattctttcctggtttctaatcataatagacatttttcccaagtttgttttcctttgttcatttcactggaaatgaaagtagaaagtcaaatatttgtgctaaggtctttatcttgaattttaagacttatatttaaataatgacagttttacaagttcaggtacatttccacttcgttttcttgtaatagaaattgtgtatctttatggatcaaggttttctttgtaaaaacagtgggagttacattattgataacattttgaatttaaccttttgaatctgcaaaaggttgctgtaatattttgtttcattgtgaacctctcccctgaaacaaagagaaaacacatcacaatatttggaagtttgcctggagtgaacgtttatttttttggggtgtttttctttttgactttttaaaaaacagtttttgttgtttaaaaaactgcaaatgccagccataaaaatattctctattccatctgcctaaggccaaaaagaaatcagaattaggcaaatgaaaatcaggagctgagcccagtgatcaattatgtccactctgcctttttcttttcctttctaaagtgttgtatttgttcactcacttgtgtaacaaatattytgagagtcctactgtgtgtgacactgtgccaagcaagggggtactaacttgtcataagcctggaccctgcttatgagtcaagtttcttacactatattgaagtaagcaccagaaagcgtgtacaggtctatgaaagctcagtttctggacatttactytcaaggactttttttttttttttttttttttttttttttttgttgagatggagtctcactttgttgcccaagctggagtgcagtggcgcaatctaggcttaatgcaccctccacctcccgggttcaagcgattctcctgcctcagcctcctgagtagctgggactatgggcgcgtaccaccacacttggctaatttttgtatttttagtagatatggggtttcaccatgttggccaggctggtctcaaattcctgacctctggtatttcgcccacctcagcctcccagagtgctgggattacaggtgtgagccaccgtacctggccccaaggactttttgtacagagacagtgacatgggtaaattattagtagctaccctttgtctactaagtgctaagccttatgctaagtgctcttacatatgtaagcttattactcatcatgactatgttattatctcattttcacagttgcagaaagtaagtctcagagcattatttatgggcatgccacagtcaaaaggcagagccaggtcttcctgccaggtctgctttccccgaaggcatgctgtttgtgggatggcacacggtgcctttccttactgccgtcatgtgctgtggaggcgagtaaaaggagggcatgctcaggttatcagttagaatcagattcggctgcatgtagcagaaaactccaaagtatcagtgaaaacttcaaaatatcagtgagatgcttggaaaagaagtctgggagttgtatttatagtctgtggctgttgtacaggccccacagtcattagggacagatcctgccgcatatgccatatggtcctgcctggtatctcaagcttcggctatcaactctgaattgtagtcagcaggaggaaagagagggtgttgggagaaaaagagcatccttcaccttgaaagtcccatttgtcagaacttaggcacaaggtcatacataactaccagggaaggtgagaaatgtggtgttgcggtgggattcatggcctcctgagtaaagttttctgctactaaggagaaagagagaatgatgtccagatgggcaaccagcagcctctgctgcattcagctcaaggcaggttgtgatttcagttggtgtcatggcctgagctgaggctggaggcccacgttgtgaagggtattgtatgtcacacatctgggatttgaactttattttgtaggtgctgggagttagttattgaaagactttaatcataggagtaacatgactagttctatgtttgggaaaggttgttctgccagaaataaggaggacaggctgtcccaagggacagccaaagaaactgggagtggaccatcccttgggaatctgatggattcgaatggatgagaaatgatgaccacttttagaaatggagaggatagaacaagttctgacatatgcagcatgtagagtctccaggccacttgaggctgttgagggacagtctggctttgccatctgcatgtcatgctcttaacctaggcaaagaatgcagaagagagaggagatgtagggggttgggggacacatagtgaatcccgtttgaggtggctccaggacctcccagaaatgctggtagatggctagttggatatatagctctggaggtcaggacataggagatattgattcaggacttgccagagtatggtcttggggtgtgccctgatattacaaacagggatcttagtggctaggtgatgaggccatggcaaatgtagatggaccaagatcartttgcctttctagatgaggttttctaggtgaaatgtttttgaaactattttgtagcctagtataatttataaaagtagagagaaactataaatataaatttggaaggggttagctaaaaggagaaaacagcagaatcttcatatatatagaaatggatattaatttgctagaattaagagactgcaggtaaagatagtttttttaatacctctttttgctgtagaaaggacaggataaaatgataaagggatgctggaatgaggaatggtaactttaggcaagatagtcttctgtgagggctgatatgatcaatgagagtaagacattagaaatacaagaattgtcctgctgctcacccatcagcattttcagtttctccttgcaaaagtagtaattaactttgtactttgagctgtatgttcagttagtgataaaccgtagataaaaagcagatttaattggctgaccccaggtaagacttgcctctctcatgtaccctttgaaggtttaacaaataaaatttgagggaaaggttgatgttacttatagggtgtgttagttagttttttgggggtgggaaggaggcatatttatgtgcaagctgccaaatatttgagataaggacatagtctttgaatgaaaaacagggatatgagaggattgattcagttagccgtcttggccaacccaagttaactgtacttcatcttagtctatgttggtgttagaaacaacaaaaaggaaaaaaaaaagccaaacagtagagcaacaattcattcattcataaaagtaattacatgccatctaactaatcacatggtaaataatttaaatggtttagaagggtatgaaagaaaaagtcccacccctcttcttcccagcctgttccccagatgtgaccactgttaacatacttgtgtatccttctagatatatatatttgtatccttttaaaaaatttatacagataggatcggagttcacattttgttttgcatcctactttttcacttgttgataaaccatagaactcttttcatagcaacacatatagatttagcatagtgttttaagtggttacatagcattgatgtgctctaagttatttaaccagtcttctgttgatagctatttgggttgcttctgttttttaggtattacaaataaaaataaaaaagaacatcctgatagatatttttctgcatagttatgcaagtaagtccatgggatcaacatctatccatgaaatggctatgaattctaaatttttataggtgtttctgtattgcttactaaaaaaggttatgccactttacgtactcatcaccaacacatgagagtatgttgacctctccctgagtgagtgaatggccgaaataacaaatgaacgtgcattaatgactaccagttgtgtggtagcctccatgtgatgccctggaaacaaaaagataaataaggggcagtggtgtctggccataggagttcacattttgttggggaagacaggtgtatggagggggacgatggataaggagtggttaggatcaaggttttggtcttaggtggagttgagtctagttactgactgctgcatactagctgagtggacatgagtaaaccccttcacctaagcctctgatcatttgaaaatgagggtaataatatctgcttcactagattgttttgaagattaaataggaaatttacataaagcttttagtacaatgccagtgcatataagtgcttgatgatgatgatgacgacgatgactattccacatgaactagtgatttcagtcctggtgctaaggatcccattgggatgtgcccagagtgctctgggaacacaagatggagatttctctttgcctaaagtgcatgagaaggcttcagaagggaagttgtaattaagtctttaactttgaatagtggtttgccatgaggttgtatcagaaggaaacataccccttttaataagtctctcaagaaagtacactgtaaccggaaacctcattaatatattgaaaaagttattctcagaagaaattcattgtgggcatctgtgtgaattttcaaccttggaagtaacttaattttgtcttatcagtatttctggttttgttttgaagtactaatcaaaaaaaaatccttaaattttaatttctccttgcttctttgaaaagttataatggttaaaatacactacttatgaaaatttcaaaatatatactaagctttctaaaatgttttttaacctttctaattcatcttttgtaaagtgctgttctttgccccatttctttccgggaatttatctttctcttggtattcatttatttttttccaggttggtaacaattctttatatattaaaagattaaccattagtctgtcatgtatgctgcaaataatttgtatccatttttttttttttgagatggagtctcgctctgttgcccaggctggagtgcagtggtgcgatctctgttcactgcaagctctgcctcctgggttcacgccattctcctgcctcagcctcccgagtagctgagacaacaggcacccgacaccacacccggctaattttttgtatttttggtagaggcagggtttcaccatgttagccaggatggtctccatctcctgacctcgtgatttgcccacctcggcctcccaaagtgctaggattacaggcgtgagccaccacgcctggccaatttgtattcatttttaaacctttttcttaactttttgtattttgagggcgaggatacagatgttttaaaatgttattagtaaagtttattaatgttttcttttaggatttttgcctttggctttatttttaggagttcttacttcacttgagtttatataaatcatcatcattttatcttagtattttgtgtttttaaatattaaagtcttaatcctttttgaatttttatttgaatccctatgtatacagggagagaaaataagggtttttttttttttttttttttgacatgtattctctctctgtcttccagcctggagtgcagtggcacaatcttggctcactgcaacctctgcctcctgggttcaagcaattcttctgcctcaatctcccgagtagctgggattacaggctcccgccattatgcctggctaatttttgtatttttagaagagacgggccttcaccatgttggccaagctggtctcgaacttctgacctcaggtgatctgcccgcctcggcctcccaaagtgctggggttacaggcatgagccattgcccctggctgagaatatgttttataaagaaatgttagccaggtgtccgaacacatttaatgagtaatctaccctttccctaccttttcatgaacaaaattcttatatatgtttgggtgtgtatctggatgtttttgtcttttccaaactatctgtggaatctgcctattttggcactagtgccatagtattttgatgaatatagatgtataatggctgttcaatggattttaatacctggtgggatgagtcctgccccattattctactttgaaaaatttagctgactattctaaatttattttttaagattaactgtaaaagaattttgttagtttcttttccaaaatcyccttgagagcttgattggaattgtgttgaatttgtagattaatttgggggaaatggatttctgtgcaatattcagtcttcttcaggaatatggtgtgcctccccatttattccaggactttgctgtgttcctttgtaaatgcttttgcttctagtcatgttgttactgcactggtcctgttaagtatattgttaagtgtattccggatcagtttatatttgttgttcttacaaatagaaatttgtccattgtgttgttaagctggttatttttgtcatataggaaagcgtaggagcataggcccaaatttccaaatggaaacagacgtttctgaagtaattttaaagttattttcttcacaattttcttaagtttgataaaataaaatattagaagatataatttcataagaaacttgcatctttgataacatgttttcaaaacaaagtattcaagactaggtttttaaaggctatttatgagatggattgaatagttttcttaatttccagcagatgtcagygttttacaaatttattgttagtccacagagacagatttgtcttcagtctcccaatttctgtatcctttagttatttaattggcacataggggattatctgaattggaagggatttgaagatcatctaagtcagtttttcattttgtagataagagaacaggcctaggtgggaaatgacttgtccgaagtcacacaaacagaggagggctaaaacccaggtgttcttgtttccaaaagacttttcctttctgaaagactcatcctttcgtggttgatacaataggccacctccctagtgaggttttcctgtgtttaactcccttctcaagggaatacaacttccttcctttgtacctattaccttggaacttacattattctaccccttattactattatttaataatctctttacagacaactgattagatgcatttttagctgaccaggttgttaggtcctagagggcatgaatagtaacttatctctgtgttatctgtagttccttgggcagggccttccataaagtgagtcattagtaatgactattgatttgaatccattaaattttgattsaaacttttttctgctcttttcctgtaaagctgttttagaaggttttagagaggattatgttttttttttttttttttttgagatggagtctcgctctgtcacccaggctggagtgcagtggcgcaatcttggcccactgcaacctctgcctcctgggttcaagcaattctcctgtctcagcctcttgagtaactgggattacaggcacgcgccaccatgcccagctaatttttgtatttttagtagagacgggggtttcaccgtgttggtcagactggtctcgaactcctgacctcgtgatctgtcttggcctcccaaagtgctgggattacaggcgtgagccactgtgcccagccggattttgggttttaagagcaagtttctcccccaccagaagaggacttattgaagcagataacaaggctagttgcagtgaaaaggcacttggaactaactggaaaagcacattatataaaatccatgtactattatttcaaagtaataggttactttatcatagacttgctgtaatagaatttgttctagatggcacaaggctcatattagctgggctatgagtcctcttaggcatgcaagaagagagcaagctgaagaaatataatgtactgtgtaattttattttagttaaatatactgaaccagagaggttgcaggactttcaagtgctcatttaacagttcagtaaaaaaatggtgaaagacaggaagaagtttccattttactaaactcttaaggcttggaaatcatactgtgcaataattaattaagaatagtgggccaggcacggtggctcatgcctgtaatcgcagcactttgggaggccgaggtgagtggatcacctgaggatcaggagttcgagaccagcctggccaacatgatgaaaccccatctctactaaaaaaatataaaaattagctgggcgtggtggtgcatgcctgtaatcccagctacttgggaggctgaggcaggagaatggcttgaacccgggaggcggaggttgcagtgagccgagatcgtgctactgtactccagcctgggcaacaagagcgaaactctgtctcaaaaaaaaaaaaaaagtgactttgcgagctcatcttctaaaaactgagaaaaatagaaatagctccaaaacaccgttgtatttctgtatctgaagaaattgttcttcactgcttttaagagtaagctagacttttttttcttgagtacaccctcacatgaatgtgagcataggatggactgccctctagactcttccctaaatgcctaatttctttctttctttctttctttttttgttgtggtaaggaaacacataacaaaatttaccatcttaaccattttaaaggtacagttcaggagtgttaagtatattcacattgctgtgcaacagatctccagaatttttcatattgcatatctgaaaatctatacccattaaacagttcttctttcccccctttcttcagcctctggtaaccaccattctactttctgattctatgggtttgactgctttcaagacttcatttaattaggatcatataatgtttgtttttttktgtgtgtgactgacttaatttatttcttgattgaatcacacagataaacaaggtattgtccttaaattctcagagtcactaagctttgattctaaagagatctgagatattgaatctataaataacttaaatttacaagaagaaaacaaacacattaaaaaagtaggcaaagacatgtgcagatacttttcgaaagaagacatatacatggccaagaagcatatgaaaaaatgctgaaattttttcatcataagagaaatacaagtcaaaaccacagtgagctaccatctcataccagtcagaatggctattggtaaaaagtcaaaaaataacaaatgctggtgagattgtggagaaaagggaacgcttatgcattgctggtggaagtgtaaattagttcagccattgtgggaagcaacgtgatgatcccacaaagaactaaagacagaattaccattcgacccagcaatcccagtattgagtctatactcaaaggaatataaatcgttcaaccataaagacacatactcacatatgttcattgcaggactattcataatagcaaagacatggaatcagcctaaatgcccatcaatagtggactgaataaagaaaatatggtacatatatactatagaatattatgcagttataaaaaagagtgagatcatgtcctttgcggcaacatggttggagctggagggtattatcctaagcaaaccaacagaagaacagaaaaccaaatactgcgtgttctcacttataagtgggagctaaatgatgagaacacatggaagaaagaggggaacagcagacactgaggcctccttgaggatggggagtgggagaagggaaaggatcagaaaaagtacctattgggtactatacttwgtacctgggtgatgaaataatctgtacaccaaacccctgtgacatgagtttacttgtataacaaacctgcacatgtacccctgaacctaaaatgaaagttaataaaaaagttattgaaaagttccatccacccattttacagatgagtaaaatcagacaagcagaggttgcctacagttagtgaaaaataataggaagttctaatgtcttctctgtttcatttttaggtccatctgattatcaacaactcagatgccaaataaatataatatttagaaatgccatttatattaagctactgctgatgtggatcctattttctgcagagcatttttacatatctgcagtaaagagagtttaaattatatttttttccagtaagwtttrtttttgtcagtatctgctaagataggataagctgatgtatagatttttttttgttaaaaaccttatggcagaagctgtaaagtagggattggcagggtgctttttctgcagagggccagatagtaaatatctggggctttgtagtccatacagtgtctgttgcagtgattcaattctgctgttttagtgtgaagacagagcatggctgtgtcctattgaaactttatgtacaaaatcatacagtggaccagatttgacttgcaggctatagtttgcaaaccccagtggtaaagtattgggacaccattcccacttttcagtctgcagcaacctagcttgcttctttcatatacaattgtagttgtttatggtgatggtgatgatgatgttgattaagaaaataatgtaaatcaaattactattatctgttgacatgattttagagttattttctagacaacgtagtaggcttaagatataaaaaacatacttaagaaaatagcatgtttgaagtacctcttcaaaaagaagactggaaatttttctgcatattgttaaaaatatttttttctaaaggaaaatagctttgttcttataaagataagacataaagaataaattaaaaataagcccaaatctccaagccaggagtaaccactgataataaccatattttggtcttttgctaggtgattttggttggccacctctagatccactgtctatcttttctacttgcttagtggcaaggaagaccagcctctgtggactacatcagcaggcagcaatgaagaccagaggctgcagggtgttacccctcgcccccagtgcacatccacactccagtcaggcagccttctcatcgcagctatgcgggttcttataaccatgccctccccagcccttccccttgcaccttcaggccaagttgttggtacagtcagctaccccagggactgtaccatctctcttgctttctctaagcatctccatctctttattaatcttttctagtttccctagtttgagtgtgccttctgtccctcaccatggccctgacctgactggtacagacgctgcatccagtttgactgattccaccaccaaggcaaataagcagcgctctccctgtctgctttaatttcgtagggaaagaacaaagagcttccacacttcactagagctacactaccattcacattcccaggcctgcatttcctagctgtatgactttgggcaaattacatcatcttgttgggaagattaaattaagtcatgtttgcaaagagcttagcacagtgtctagcacacagctgaatgtgctgaaagaaattataaaagagcaacttcatttttcttggtttgtaaacagatacacctcaaaggagccttttaaagagaaaggctatttctaacagaggaatgctttcctatcacacgtgtttcggagactgtatttcagtgagccatcacggctcctgctctgcctaaggcttgagcagtttcttacggaccgctctgcatgtttctagctgacaggaggtggcagtagagagctaggcccacccttgcacatggtttgggctgataggaaatctgcatgatagctcttgtagtgttagtattatgactcaagaaataactttcagagtcaacagaaggaggataggcattattcatatccccaagtataatacagctagaatttattgaacacttactagagttttatctcctttatttagtccctctaaaatagcattatttttatctgaagaagaaattgggtttcaaagagaatttcagtaactttactaatgtttcttagctagtaatggttgttatgggattcaaacctgggcagtctctgtaaaagcctgcacagataactgctgtgcaggactgcctccaaggctcttgtccttgatgtttgtgtttaaaaaatataaggatgatattttttaaaatttggttccatatgcacatgataaaaatgtaaaccatatagaagagtactatgaaagtgtaaaatagtcttctcatccaagtctcctgttctttaatactttgtttcagaggtagccactcttctttcgtatccttcctgagatatccttataggggtgaacctgtattatgggtagaaggattggtttctataacccattttatcttgactcctggcctcttgtccttgatatttttctaggctctttggattaggtaggaggaaagtgctgctgtgagatcttcagcagccaagtcactaaatattatccacatttcttattagctttttcagctttacttagaagagtctaaattcctgtcacctcctgcttccttcatttaaacacatagtgttcataagattgagtgaaagccttgaacccataatacacttgggttttaaatataagatgcacacagattgtcttatattctgaatacctcagtaactgattagcagaatgacccgtgtcatccagggatactaggagaagggccaccttacatggtgttggtacttatttctaatgcttttgtgacaaatatggtcgctgtattctggtgcaaatgttagtatctgtgttaaaagaaagaattttatagtaagaatgcagaagtgatcaattatggtggtcatgtctttaatagatgattctcactacggtgtgtttgattcagtgtgaatattcccagatggccaaaataggttgtgaccattcatagcagaaagagtgaaggtatgtttacaatgtaatttttaaaaattaacagtctataataataggtggctcagttaactcctccttaagtatgttatagatttgcagggaaccatgttttttaaaaacccaatttttgtatataatcagaagttgaatatattttattactgcagtcatgtaaatggttttgtttattgccttgtatgtgctgtactgttttatatgaagagtgattcaaggaggttgtgcttcagtctgttctttctaaggcaatcataatgagttcaaaacatatggtattgatttttgacagttctgcctcaagagctatcatgaattattggttctgtattttattttaggatttcagcttcttcatgttttagaagcatgtttgatggaagtacctgtgtctctctgtaatcagccacgtggcctgaggagtaggcatgcagcagttgattaagttgacatttggtattaatagcttagagactctttacatcataatatgcttatccattctagattttaggtgaaggtaattttgatgatgtttcatagctaataagtggtagtgctggattcagacccaggcagcctgtctagaatcctacacacttaacccctctcctgtactacctctragatgcttggccttgttgtgtttcctccatacctttacttaatctcatttgtatcttttggtaataggaaccatgtatattatccatctggaacagcaagccctcagcttcacctcttatgagctgagtctcttatgagttgaatgactttagggagtaatttgacctctctgagcatcagtttattcttttgtgaaatggggataatagttcccaccctcctgcctccctaggtagatgtactgaccagctggttttattcatccttctctttccaggatatggcatcttggctgacacatcgtaggcgctttacaaatgttagtttctgtgctctccttctcttctagaagcaggactttggttaagagttaggtatctcayaggataatctgaacaagtcactccttggatatagtcaggaagctaaaataaatacagcaaggggactactcattatatcccttatatccttcactgtcattctttttttcacggtaaacagaactgagctcaaattctctggggaaagacaaaagctctgttcctagaaggaagggagaaggattcctactacttaatggaccacaggcattcttacagtataggataagagctggtcacaccaaactgcatggactgggaggactcaatggaagtttaagatttgtgatattatgattgttatgataaataagttaacaaaaagagtagaaaacccttacaggaatgaaaaacaatgtcgcaggagcaaaggtgtgcagataggaaggtgcccacatacctcttgggctctaacacttattttcagccttcttttcagtattacagtaaagacagtccactagctgaactgattatattctgaaaagctcaggacagggagtctgagttcaggacatcttaggaggtgtcaggggcccaggctacctcgctgccagaattaataagaatgttttgtacggtgaactgaatcctcagagcctaatacttctgtcycaggaagtagaggcatttatagaatcttacttcttcattttttttcgaggcctactacctaggcttttttcctggtcaaygaagattctgcagctcagcatctgtccccatcwctccacttayattatccttgccccggtgattccctagttgccaaatctartagatatttttgtgtccttaccttacttgtccattctgccacatttgacactgcgtctacttctctctccctgaaactctctttccttatgttctatgatgggggttatcacattgcagccccacaggccaaatctggccctccacctgtttttgtaaataacatgttatcaggacacagccacactcattcatttacatttgtctttggctgctttcatactacacagcagagttatgttctaacagagaccctaaggcctgcaaagcctaaattatttactctctggtcttttgtaggaaaaatgtgctaatctgcattctataacctcattctcccctggttttcttcctctttttttggctctgctgaacccctttgctgagagaacatgtaagagccagttctaaggtaagattgtaaaagctctggtcaaaaaatacttgaaatattggagaaactatacccctttccctgctacctggttcaagaaatagtgcctgagatttctttttaaaaaaatagaaaggtatcctaataaatacaattgttgtgaacagatatgttgcattatctaatacagttttcatgaccagctccattttacggatgagaaaacaaatggaagcacagagattgcagtagctttcctatgatcacacagctaagaaatagcctgagggcccatgcccctaatcaccacatcagactgcctccagagggcactgctgtttcagagccagcaccaaatgaaaagacggaagatgtttttgagcaaataaatgcagtatgtggggttgggtgagttttccaaaggttagctttgtagttttggaatgcaagatcacattggaaaggtagcgaagcctggagaaaaacactcaacaaaccatgactctgcagaacaatcttatgacatctagagagctctgtgcccactaacacagaatgtgaagcaagtgcacacaggattaaaatcagagcaggttggctcttgcacattgcactgtcagtggacgctattaatgagtctttggygatttgaaaacagagcaatgccagaggcatatgcagaactgtgcacggactaaggtttttcttctgtctcccctattgaattctgaccttgtggtgtgtgaaggtgtctctggtgtctacctctattagtgggaccagtgtgtgtgagggaagcttgttgagcctctgcatgatttttaagccccactgasctgtcacctttgaggaggaaaaacatccagcatagtgttcccaaagtgtgaggagccccaggggtgtgtgtggggtgggtgatgcatgtggggatggtggtaaggcacaggaagagcttcaaggatgacaacaaataaagtcaagcaaagaatacatgatgtgtttcagggaaaacacttggatttaacaagtagcagaagtgggagaagactaggaagtatatcttaaggacctgaggccaggagcaacctgtgatccccgtggttgaagggagcagcaggaacagttctgtgggcagggctacaacaacaacaccgcatgtacgatgtaaggacctccacctaggaagggctgtttccgagccttagttacctgggaatccaaaaccattctcgtcttgcttctcaagtgtaaaactcattttgaaaaagcagccatacaaagttatatttttattattttattttatttttttgcctctttgagccaaatttatgtacttcggaattattaaaatagaggatgtcatgctaggattgatccattctgcaggcaaaatattcatttttcagggtttctttggcctaaaattctattaaaatccaaggatgaaagaggaattggaaaaattatggccctcaaagaaattttctgtccagtgagggagacagagacgtgtaccatcaactgtggtacaaggtagacttcagtgagagctgtgatcaaagtacagggagtaacaagaaaagagggagtagattaactctcgctcaagggatttgagaacgttgttttcttatctctgtttcatttcttcattcttttcctccaactacctaaatgtggatgttccaaacttctgccttttctttcttgtgtattgtatctggtgggaatcctgactattctcttggcttctcttttggtctctttgcttttttaaattttttattgtggtaaataacatataatgtgagatctaccctcctaaaagttgtaagtgtctgggaaagtattgttaactgtaagcacagttgtacagcagatctctagaactttttcatcttccatgaatgaaactctgtatccattgaatggcaactctctgtctccccctttctcctgcgcctggtaaccatcattctacattctgttcctaagattttgactactctagataccacatgtaagtggcatcataaagtatttgtctttttgtggctgacttatttcacttggcataatatcttccaggcttatccatgggttgcatattgcagaatttccttctttgatatggctgaataatattcattgaatgtatgtaccacatttggtttgttcgttcatccatcgatgcatacttgtttccatatcttggcacttgggaataatggtgcaatgaacgtgggagtgcaaatatctctttaagaccctgacttcaatccttttggataaatacccagaagtgggattgctgggccatatggtagttctacttttaatttgttgaggaacccatatactcttttctttaatggctgcattattttacacccccaccagcagtgtacaagggttctgatttctccacatccttgccaacatttgtggttttctattttttggatattggacatcctcatgaatgtggggtggtatttcattgaagttttgatttgtatttccctgatgatcagtgatgttgagtatattttcatatgcctgttggccatttgtatgtcttctttggacaaatgtctgtttaagtcttttttttttttttttttttgagacggagtctcactctgtcgcccaggctggagtgcagtggcgcaatagctccacctcccgggttcacaccattctcctgtctcagcctcccgagtagctgggactacaggcgccctccaccatgcctggctaatattttgtatttttagtagagacgggatttcaccatgttagccaggatgatctctgtcttctgacctcatgatccgcccgcctctgcctcccaaagtgctgggattgcaagcatgagccaccgtgcccatcctgtttaagtcttttgcccagtttttaattgggttatttggttttttgctgttgtgttctagggggtctctgtgcctttgaccccaaatctccatgcctgtacctggtgaactctacactcatgtcttctgctactcctcaggttgatccttctgtccaagcragtaaactgctccccactccctactccctcactcagctcttgccacctttcttttggtttctgaaagatacttagacccaactctgacacatcttaaaaatccaggtcaagttgagttttccatgaattcttccctgaccacccagcgtttgctctccccctgctggggtctctagtatttgtccctgttgcttttggggcatttggcagagactgctgccgtgcattggaatggaaattacatgcggttatattttgtactaactgaactgccatttcatgaagggaagagactgtgtgtcctccagaggaccttacagagcaccttgccatactgtaaagaggcaggaatccttagaaaggtttgcgcattgtgtgttctaggtakagaagacagaactgaacttcaagcctgatggtgctctggcaacagaaagaggacacgagggagtaaagtccaaattcacagtccactgtcaatcccaagagggacaaatgagctggacaggaacagggaggaaagacagaggtcagtgaccaggacctttttagaaagttgggattggaatagacaaggaggtttacaggggaaggtcattactgtaatctgaggcatgctttgctggattttggcaggcaggggtgaccaggtgtatgctgggagctagagagaagctgagttcacctcacagttctgcaggtagtcagaatatctgctgatagtgggggctagccatgttggcagtctgatcctctctactctgaacatgctgttctggagaattcatggcttccaaccctggtatatcttgccagcaaatgctatatgaatggttattccacaactaagctataggtcacccagaaacccccaggacagctgtcaggaggccaagactcagtataaggaggctacagggcagactactgggtttgacatgtaatgtggctcttatgctgacactggtaccccatgtttcttgccagaggctggagtaccattccctcatgraggttcttcacctagtgaccttcattgccatcttcatgggaatccccacacacccttactgcagttgggtttttatagcctccaggaccctgcctcccaccctgagctccagcattctgtcctgataatgtcatagccagttctggtcttcgtgttacttgagagggttgtagccagagaactagttgtgggtccccatcttgtacctttccttgagtaggtcaaagcctgctctcacacgagtctggggaagcccggcagcctggccttgcctctccaatgggaggggaaatgaggagggagtaggctgtctgaactgcttggtatgcctgacagtggactctctttctgctcactgaccctgagaaacagctttgtcctttatggctcctccttgactgtttcccgccctccaactgtcattatcctggggtattgatttccaaacctgacaggtatggagaatcaccaggatgctagaaaaaagagggccctatctctggagattctctgtatttaactagttatgaatgaggcctgggaatctggcacttttgtacagatatatgtaaaagatctgttgaggatgaataagagacttaactaagttgctgagtacgttttatttccttttttgtccaactctgtgctttttggatattaatggtcacacattgtttttagaaatcagagaaagaattgatgtcattacaaaacaaaaaacacatcctgaaatgatctttcagaaacaattaatcctcttaaatttgttcctcttttccrcagggggacttgatctcatcttcatgccaggccttgggtttgacaaacatggcaaccgactggggaggggcaagggctactatgatgcctatctgaagcgctgtttgcagcatcaggaagtgaagccctacaccctggcgttggctttcaaagaacagatttgcctccaggtcccagtgaatgaaaacgacatgaaggtagatgaagtcctttacgaagactcgtcarcagcttaaatctggattactacagccaaataatcagtgttttatatgagagtaaagcaaagtatgtgtatttttcccttgtcaaaaattagttgaaattgttcattaatgtgaatacagactgcattttaaaattgtaattatgaaataccttatataaaaccatctttaaaaaccaatagaagtgtgaatagtagaatattaattaaaatggaggctatcagcctgtgattttcagcttaacttcctggtgttaatgtgacaagttgatctgtctactttgcaatttaagttaaatatttatgaggaactgtgctccgactgagtgcgagaggaaggtaaacttgcgggagtgggcactgtatttcattacgcctttcatgacctggtctgtcctggcaggcacatggagacttggggactattaatttatttgttggtatttgctttggatacagaattccctaagaatattatctcacttcatcatgacttcctttacccactctagaattttatgttggacactttgtagcttttggtggttagtggagggaaaccttttatgatttaaatacttttactccactgattggttaccatcactgcatgtatcagcccttgatgagtttaagatctagtatcttataagttagaaattatttctgtttactcatggtttctgctttggaaatgaaatttgctgtgagttgaaagttggcagatggcaacacagctagggagcaataattttgttgtggggaggatttggtcatctccagaaacccrggagtcacgtggctctcttactcacactccatgtccatcctgtcaccaggtcttgttgattttgcctctgaaatgcctcttaaatctattctctcctttcaattttcctgtcactccttttgtccagccttttagcatttctaagctggactaggcgagagtgtcacacctgcttcccttggcttccatcttgcctcttccagtttatttctcaagctgcagtcaaactgatcttagaaaacacgaatctaatcatgcagcacccctgactaaggtcttccggtggctgttcagagcctcttgggtagcaaacagatggcttctgttgtatacaaagccccttaagagaggtctcctcatctactttttctagcctcttctctcccaactctgtattctcctgtaacactgactgagcactgcaggcttctgccctttgcacatagtaagcatgcatttctctctgtctgaaatgctctttctgttgttcatctagaagactgttttcccttgaagactcagccctagcatcacctcttctgtgaagtcttctgctactttcccaagcagagtgagtgttccttcccttgtctgagtggccttggccattgatgtgcttatcatgttgtcttacgtatcaaattatttgttgtcatatctgtccccttcaccatactgtgagctccaaagaaaagaagtgatctttatacttcttatgcttagtacacaactagacatatagtgtgtgtgtgagagagagaattttttaatgaaataattgaatacattggaagtgtttcattcaaaatactcatccattattctttggatagtagcataaatttgatgttttatgtacaaaagtaaaaacatttgaaaaatatcaggctgaatatgggtttgtacaatataatatgtatgatgaggaaagggaaggaaactgaattctcagaagctatgaagtcacattattgtactggttaaaaatattgttaagtattatttcgactataaggttaaagtgaatgttaatgtagctgacatgactgttggtgtgaaatggtagagcagtaaaattcctgacctgctgcaggtctagaaagtttggcattgttgaacttagtctatgttattcttctgttaaatgagagcatttaaaaaccactctaccagctcctcaagtgcagacagaatgccgagttaactggccagaaaatgcagggtgctgagattcaggaaagtcagagggccacaggatctcggcctgaaaagagaagcactccctagtgatcactaatgcacagtagtctttgtgcagggatattggaagggagaaaatgcccctatgatgtaggtgattacaacactgtaactctgattagggcatacacagaggctgaagacaaggccttagactcaggaggcaagcacttcagtagaggctaacatgaagcaagaatgatgagcgtctcagatgaggggacaatctgagtagaagagaaatagcaactagatctgcacaaaaacaatttcaaatattgggaaattggaaatatatcagggccccaacataggtctgtgtttgctgtatgtactatagaactgtgcttaatttaattagaaagtaaactatataaagttctagtcaagagcattatacacttaatcacaaagtcttactaactaggagattgataaatgtgactaggcgtgagtgtcttgctgcagacagttcctggtcccaatttttttttttttttcctgcagagatcattgaaattcagttgatcacactgctctttagtcatatgtttacatgcttaatttctccactaccctacaatctcctcaaaggcaaattctctgccaagttcatagtttattccagtatctaccacagacacaaaaaataaagagccaataaattctttttttagttgttccagcaacatttattgaatatgtaactttatgtctgttatagattaagttctccaatatatgtgaatctgtttgctggcttacttcattgtccctttgttatgtttttctgtctcagcaccagccccacattgctttagttctcatagttttaagtcttgatggctatgagggtaagcctccttcctaattcttcttcaggaatgcctaagagccaatcaattcttgatgaaggaatgaaccagtttgaatattgccctgcctgtgctgtgcacttgctcatttttatgttggttgctgtttgctgctgagattctgtccccttagcattgtctcaggcttggattatcccagaacaagttttctattactgcattgcgttgtgttgggcagtccatgtgtgtgtgtcacattgtctttctgtgctacttttccttcttagtgctctcttgtttgctttttagggttgtcttcttccctattcctggatgattgtagacctcctgccctttaatggtagttgccaatccctgtaagcacctacccccaaatatgtttatttatatgcttaaagtaataataaatttttctgagtaataacatacacattataaaatatacacacaagaagtatgagataatgttgaaatagaatatatgatatataatttataatatacttgtttatatatattttatacatatataaataagtgtaatatactcatttttaaaaagagcaatatgatcaagagcagcatgagatgatgttgaagtagaatatgttatatataatttataatggactttttaaaaaagcaatattttttaaatgaaatcttttggacatttactatttttgaaaaccttattttaacaccttttgaatgattcaaaattctggttctaatttcagtttatttcaatatttggtcttaagggctgttagagctgaaaaggataccttctagagaagcagattcagatggaaggaaaactatacctactaaaattttcaatcctatttaccaattttgcaaagataatttttttttaatttaaatctggctggtaaatatccattttcttgatgtgaatctgtcatttttgcatgttaatcagaaggtgctacacatttactttgttaaaaagtaggggctggagttcgaggttacagtgagctatgattgcggcactgaagtccagcctgggtgacagagcaagaccccgtctctaacaacaacaacaacaacaacaacaacaaaaacataaaaaacaagtaggttcgaagcttactgaaattctttcaaagattttaaatcaagttagaaaaattctgcttacaaatttttcagttgtgtagatgtgaaagtgtttgtaggtgtcacactattaatagtttttggcaacatagtcatataatgatgaaaatatttccaaatagccatttttatatgcactcttcatactacaagtctctgaaagtagttcctttgtgtctcagtgatgaactataactttcactctgaaaattcaaatgagatgtatttatttctttgaagtttactagtggccatttacaatctcagaaaggtcagaaatgtggcatacttgctctttgtgcgaaaaatacacataaaactcatatttgagtttacagcttgttttttttgagacaagaatctttctgtgtccaacccccccaaccccagctggagtgcagtggcgtgatctcggctcactgcagccttcgcctcccaggttcaagcgattctcctgcctcagcctcccaagtagctgggactacaggtgcccgccaccatgcccagctaatttttgtacttttagtagagacggggtttcactatgttggccaggctggtcttgaactcctgacctcgtgatctgcccgcctcggcctcccagagtgctgggattatagatgtgagccaccatgcctggccagtttgtagctcttttaaaagtattttaccttgagatgatcagagaaatttaagtgaatcaaagtattgttcatgggtacctcctattgcatcccaaagagttgtaaatattctactacatgttgaagttcttaattttataaaattcacatcagtgatactgttagcacatgaaagtcttgcctgtgaattatttagtaatgctgttgctcaattcttaatgtggaatctaccatctcatatttatatatatatataatatataatataaaatatatatatataatatattatatatattatatataatatattatataatatatatatatatatatataaaaaatatatatatatatttagagacagagcctctgtctgttgcccaggctggagtgcagtcgtgtgatcttgactccctgcaacctccacctcctgggttcaagcgattctcctgcctcagccacccaagtagctgggattacaggagtgtgccaccacacccagctaatttttgcatttttagtggagatggggttttgccatgtttctcaggctagtcttgagctcctggcctcaagtgatctgcccacctcggccttccatagtgctgggattacaagcctgagctgctgtgcccagccccatctcacctttaaaaaaaacatttcagtcaaagtagccattccatcagggattagacttagtttgctcataaaataaacttgttttttttttttaaggtagattaattttgagaaatatatcctcaccacttcatcgctaccttaatgtctttcttcctgcagtggtaccgtaagaggagacatgttggaaacatctctccttctactcagcctcacgccctgaaaaatttcttcctgtacttatttcttcagattgtcagcagtgttttctacttgtcatccaatagtacttcctgacaaaaagatgcgtcagggtctttttccccctaaattgtttcaccagtatttcatccacatttccatggtatgaagaagaagtaatttttaaatggtatgttactttttgtcttttgctattaagtgagaaaacttttgaaaggtttataaacatttatgactatatttagtgagcattgcttaacaagtattggagttagtatcttatgatgttaagtattgctgaacacatggtggaggttcgtcttatcttccggatctgtagcttctgctaattgtgatggcttcacacttttcattgtgtgtatctgaagagtgagattcatcattaaccatggcgaacacagatacctactttaaaaaatctttgtgatagtttcaaattttttggctgacttattggtaaaacttaatgttttttcctggctsatgaacagcttgcaccaggaacagaagtatcaactagtgttgtcatttttgcttgcattacaggctgaatatctcctctctgaaatcttgggaccagaagtgttttggattttggatttttttagattttggaatatttgcattgtatacttactaggtaagcatccttaactga

SEQ ID NO: 95220 - DNA, 102017 bp, Homo sapiens
  misc_feature (1)...(102017): n = A,T,C or G
ttctactgtaaggaaaagctttctctcttccctcattcattcatctatttatttaaatcagtatgggctcaagattcttctttaattccatgggtcacaatccatctactaccatactatcttgttcttcagactgtcccagaagagccccttcaggtcagccctggtgtctttgggacatgtccccatcgttttggggcaccacagatgctcccagctcatgttgtgctttcccaccctaaccctctaaccctctgagatctcctggttcctttaattggaggatggtatttagaataccaagacctgggaggtagatgcactcatttactttctttttttcttctagcttgcttgcttgtttgtttgcttgcttgcttttttgcttcttttgagacagagtcgtgctctgtcacccaggctggagggcagtggtacaatctcggctcactgtaatctccgcctcctgggttcaagcgattctcatgcctcagcctcctgagtagctgggattacagacgtgygccaccatgcccagctaatttttgtatttttagaagagacagggtttcaccatgttggccaggctggtctcaaactcccgacctcaggtgatccacctgcctcgacttcccaaaaggctgggattacaggcgtgagccaccgcgcccggcctcatttacttacttgcagtgttcatagttctctccgatgctgtgaatcatgaatcctttcacagttacatgcatgtgcgtgcacacacacacgaatggtctgagagcccatgccccagcaggtggggtttctcttgtcctgtccytctcagctgtggtgcccacccaggcgccccctcctcctcactcttcttggagaccagagcttcctattcactaccctggggcggttaaagcagcccctctctgctcccagctaaacaataatgatgataatggcaatgatcataatgatgatgataatggcaatgatcataatgatgatgataatggtaatataataatgatgatgataatggtaatactgatgataataacaatagaagcacccatttattaagctctccttgtgctgcatggacaaaacacaggctcaaagaccgtttttcacacagcataggaagggacccagcagggactcagacccatcccagatcccccagccttctggcaaactccaaggagatggggagcttgaggaggcggatccacaccacacgcgggccgtggcgtggggacagcccggtagtgggaacggctctggacactcacgtcggggatgtggcagaggccttggggtgggctctggactctcacatcggagatgtggcagaggcctcgggtgggygtgcacaggaaaggcattggcctcaagtactccgtggacctggctggccctgcccgccgcactccttcacacaggttctttattgccattgtccccgcccgcatcaaaggatcccagcatgcttcccacagcctggaattcctttgctgggaatgggagacaaagccatactttctatcatcagagaggaaaggcccaaaatgcaaacatgcagccagagagaggctgtggcaggcaggagtttctgagtagggagtgtcagatcccctcctactgagtgccactttcccttctgagacagcatgggagccgtcagcctacgaactggagagaactccaggaaggagcccttttcttcctgcaatgagggcaaccggaagctgtggccacrgcacctgctgtccccggagcctgggcaccgacgtaagggaggaaggcggcgcctcccttttcccctgccctggccacaggagcctcaggattgacagctcatctgcgggtaggtctgcccagggaggggtcgctgcataaggggtctgtagcccctggggccctggggtccctacccttggtcacctgcaggcataagtcgctcctttcctcttcagctctggggtgtggtccagaagtagtggactgaactaagcagcacaatggtcagcatcacctgggactccgcctagaatgctagaaatgcgcattcttgcccccaatccccacaagacttactcagttagaaactcgggaaacaatcagtgtgcccagccctccaggtgggtggttccgatatctgttcaggtttgagaacctttgtgctcaggacctccggttaccaaatcatgccacttacggtgaccattctcaaaagatggcagaaggaagaaggatgaggaagacttgagcctggccgggcaatccttggtttcctcatgaacccttgcaatcgggttacattttgaacatcactgggacatgctaagaactcctctggagcacagcagtgctcacatcaatagtccagcagattgagcacggagatgtcagcagacacacttgcaagtttggtgagtaataatgaaagtactcagttccgtgattcatactatagtgttgacaggtctgggaatatagtcttaatttaaaattgcttcggatcttttctccaggtctgaaaaccagagggaccgtgcccacgatccccgccgtttccctgaccagcacggctgtggcgagttcgttgttcaatcccggatggctcagcaaatccaaccccctccgccctgttctatcgccgcatggatctgcagaggcagccgttcctgccgggtggatttgccttccgcgaaggacaacacagaaccactctgagttatttgacactgacatcgatcctagttggctgactctggttggtggtgagaggacaaatgttcccagggactattaaacaaccacaaaaatctgagagggcggttatctgaacatggaacagaaacaagacagtaacgagttccaatgttcttttttttttctacacaggattcaaacgaactcagagtagcgagatcagaatacatgaatctgacctgtttttactcacaacacctctgataccaagtgcgtgggtttttttcacaccgaaaaccagttctcccaactctccagacaccaactgggtggcctacgattccgttcaaacgtgacactaactccacaggctccgaggctcagtccctcaggactgccctgagttcagacgccagcctcctgactccagcccagggtacccacacttctgtccaacttggctacaaagttgsgggtttcctacattccccccaccctccctcccagtttcacattcagtaatttgctagaacagctcacagaactcaggaaggcactttactggtactggtttattattaatataaagcattggactcagaacagccagatggaaaagatgcttaggacgaggtgaggggggtggaaggccaaggggcttcctcatcctctccaggctgccacccctcccaacacacctccatgtgttcaccaacccagaaattctccacatttttttttttgagtcagcgtcttgctctgtcacccaggctggagcgcagtggcacggtctcggctcactgcaacctctgcttcctgggttcaagcaattctcctgcctcagcctcccgagcagctgggatgacaagtgtctgccacatgtctggctaatttttgtacctttagtagagacggggtttcaccatgttgaccaggctggtctcaaactcctgacctccagtgatccacccacctcggcctcccagtgctgggattacaggtgtgagccaccctgcctggctcacattctgtcatttggggctctttttttttttttttttggattcattatgtaggcatgattgattaatcactggctgttggtgattaacttaatctccagcccctctcccctccccaaaggtcagaggtctgagctgaaagttctgactaattccagctcccagcccccatcctggagctgcccagtcctctcactgacattcaaaaaacactcatccctctggagatcccaagggttttagaagctctggaccagaaaacaggatcaaagaccaaatatgcagccacggccccatccacctctgagggcatgtgctctggccttactatgacggcggcggtggcgagtctgatacaggcgggatgatgcacgctttatctggaacccttggccttggataaaatttgtcttctgtagcagttacgtccatggagctaagtccaggtccacctgccattgcaattatggcagggaaaaggacagagggagctgacgattacacctaactttggatttggggcacccttctgttcccccacttcctgcttcgctgacactcacacccccaaaggcggtggcgcagaagctgaaatcagggctcaggactccatctacagccaggcccacgagcagggtctgttctgaaggctccaccagcagctgtgtcccaagccaactggcaagacaccgtcccacccgacagtggcttcctccccgtggcgtcatctcccttccaaagagggaggaatttggactattacccacgaacgatagcaggctaagaaacaaattatgattacgaaagattaaagaaaaaaaaaaccacccacacctactggctgtacctttcctgcatgatttttgccaccgcatgggaagcgggccaattgctatttgcctgggtgttttaaatatcaggagatcaggagatttgctcctgacataattttttttcgaagtgcaacagaaaatagcacttttcacaacaattaactgttaactggctccaaagaaggtctgcttgttagacattagggaggaatagaaggcatcttctcagatgttggcctttgcggaggcaaggtcagtggtgccgggaggtgactccctgcatttccgtatgtccgtttcttaagtcgcactattacttcccttgagtaagggacgtaatattgagtaatatttattgagctgtgtgtgagagactgtttcaggctccgggaaaacagcgaacaaaataaaaacaaattggctgctttcatagaccccacacactaataagcacatagggagtcggtcaggcggtgacccgtgcggtggagagaaggcagccggcgggacgtggaagggtcgaggttaaaccgaggtagtggggaggcccccagtgaaagacgcgagtttccggggtgctccctctagccagcagttaattgcaattctgccgggcgcggtggctcacgcctgtaatcccagcactttgcgaggccgaggtgggcagatcactttaaaccaggagttcccgaccagcctgggcaacatgacaatacccgtttctacaaaaacatttagaaaaattatctgggcgtggtggcgcacgcctgtaatcccagctacttgggaggctgaagcaggagtatgggttgagcctggggaggtggaggctgcagtgagctatgatcgcaccgctgcactccagcctgggcgacagagtgagatcctgtctcaaaacacacacacacacacacacacaccccccaaaacaacaaacaaaaaaaaaaaaagagagaaagaaaaaattacacaatttcagtttgttcaatttgagtcagctggtgattcgagcgtgtcccctgtgcccgtaggacataaaagtaaaaataagatggaattccctcaggtctcgtccttcgggaaggatggctcggaacagcccgaaagagaaaagggagttggtttcttcccggaccagttttcccctgtcccgtggagtccacaagacaggcggcagcttcaaggccggcaagttccgcgtctggggggctgcgggccgcccctgcgggaccggggggatctgggcgggacagggcggcccggcccacgccccggcttcccccagcagcccgagggcgcccggagctcacggctggcgccgccccgcgcttcctgcctcgccgcggatcctcctccgcgccgtgacgcgccaggctttgaccaaatatgtccctttcccctccctcgcccgccccgccgcccgcaggcgccccgagtcgcggggctgccgcttggacgtcgtcctgtctgggtgtcgcgggccggccccgcggggagcgcccccggcgcgatgcccttcaggaaaggtaggagtcccggtgacgcggcccacgcccccagcgcgcgcggggacctgagcggccgcctgtgggtacccgagccttgggtcctcgccaggcgcggaagcactgtgcacccgggctgcggcggtgccgcccggggccaagcgagacgcgctccgccttgtcccctccgccctgcgctgcgccccggacccgcgtgtccctccagatccgcactgtctcctccggtcctgcgtgtcccctccggccccacgcgtccccctccggcctcgcgtctcctttccggcctcgcgtctcctttccggccccgcgtctcctctgcagccccgcattgtgcctccagacccgcgctacctcctccagacccgcgcgtcccctctggcgactccggccgccaccacgtgcccgagccgggggcggcacttgcagcgaattcccgcttsccgctgcgctccagccccgggccgcagatataccagggctccggacccggagagacccggagggcggcggggcccggggtcctgagggcgggattggtgggctcgggggcacggagaggggcagcgcggcgcgggaggtgggcagctctggcctgagtcccacctttgcccctcccgccctctgacccccgggcagtcatttcakcccccagccccagttgcctcctgggcaaaaccgacagatggctagggacggccgcgtgaggatgggagccgtccccagaaaagcaaactcaggcccgctgatgagcgcggcccggcccctcctgcaggggctgccctccgccttttccgccctgcgtgccagaaaggcccggctacctggtgttcctacccgcaccggggggtcccagcgcaccggaccccggtttacaggccgggtggttggaggcccagcactgcccagagccctgggcccctctcagctcaaagacccgggagagaagtgggagctgcagaagtgtggggaggggggcctcgatttgactttcaaatcagagttgtgtgactcctgcgccgtctgtttgggttrggaggggttgagytctggtgatgattgtcactcaacacccgagactcccccactgcgacctgggcacactaaggacgttgaggactgggggtgtgtgtggggggagcctgscctcccctggcactgggcctgtgctgtgccgtctctcccttcccgcacccacccatctgcctctcttctctcataactcagaggcacggccagcgtgatgctacggttgcctggaggctgtaccggacttgtttttcaaacagagggtgcctaggtatcagcgtgggctcctggcggtgaagggggtggctgctgactctcctgtcccgttggggtagagagatgggggagggtggccagaaggaaggtgacagccagcaagcaggggctctgccactcctctgtcagctggacacgtttagtcccaaggccactgtcttcggtgtctccattaatccaggtatgattcggccaccttgactctgtgggttctctggaggctctcagagtgtccctccccccctactcattaactgcaggggayaatcatttatctctgacttcatcgcttctgcccacttttgtcgatgtrggctctggttgggaaactcctaaaagggacagacttctgtttacttgtgcgctcagtagagagccttatgcggcaaagtattaaatagccaagctgctaatgtattgtttgcatatgaagattttgctttatgacagcgtattttastgcattattagatcacacaggacaaaacatttgcaaactgccaaccaaggtaagctttggttttttggttattatcattgtttaatctgaagagaccttgctgcatgaagaggaaaatgttatccttgcatttggcagatgctacttcctggaggtcccagagtgtaagaaactgttgcttggcataagtgctgtctgcgtttcccggtcrccctggtgtgagccagggcacaggctcttggaggctttatcgaggcagagcttccccagttgcaggtgggacctctcacttagaagtaagcacagcaagtgggaactgcagggagccaggccgcggctgggtttggtgctgagccgtggtctgaagctgcctggaggggacaaggtcctcctgtgagggacagcacggcacgtcaaccctgcactgacggaggtgcaggagacgccagtgcagctactcttctgtattttttgacctttgagcgatctgaatgtgttaactattcagaaaagtaatttaaaaattgggaaatgaaaagactttgccgccctgctcccaaaaccaagagaagccatccggagaaggcgtccatcctctgcgggctggaagctgagcagggacarctgyggattccctccccaggctgtgcttctgcctcttgacaagcttcagactttgggatcagctccgtcaggggcccagcgggtaccaggcaagtcgaggagtttaatgatggggagatttgggtaggagataggaaaaccgtaagggatagtgcagagccctgggcattagcaccttgaggtttaaaatgtcaagtggcagagccaaaactagggacagcctgacagggactgtggcctctgttggagggggcgggcagtgtgtagcctgcagagagggagctgggagaatcctcaacctagacctcactccttcctccctctgatctcatggctttggcagccagagggccggggagcctgacggggtggtccatacaggggacctgacggggtggtccatacaggggatcctgatggggtggtccatacaggggagcctgacggggtggtccatacaggggagtctgctgggacacagagctgggtggatttcccttttggaggagagagggtcttcagggtacaacagagaagcaaccaaagatcttaggtgctggtcctgtccctcacttatgggaggaactagtggacagctactgaatgtagttatgggaaagatgagtggttgtgtaccacggcattcattcattctctagattgggcacttgctatgcaccagcacacgctaggtaccagctgaacagcaagacatggygtctcctccctggagcccacctcctgtgctctccagcaagtgccagggaggggagtcagaagtccaaatgtagagcagttctcagtaggaagccccacctgaggaggctgaactccgcatggagagggtgtggcactggttgacctcctggactgtcacacaggctgtggttaggttggtgccatggtgctggctagaatggagccagagggacttagacctcatattgcacctgtccaacatggaccgcagtggtatggcaygtggcaggcaggaaccatatcaagtgggtggtggctgcatctgggccatgtcccctatgctcagcgtgaggctggagcagcagctgacagtggcagtcctggcccaggtgggggaaggatggtgcaagcattgccttcagggctcacagctcttcctgtgggtctccagggtgacggtggttagagtgggaggaaggtctgagtctttggccaatctgtctagaagaaggagaagttagtatcttgacgtgaaacataaaagaaattcatgagacgaaaaggaggcaggaagcacttcagctggacacggagaggaaagtcatgcatatcatgactaactttgggaaccacaatggagggacgctggggcagttcttcctctgcaagaacttctctccttagaaatcgaatagatgggccagtgtggtggctcatgcctgtaatcccagcactttgggaggccgaggtgggaggatcacttaaggccaggaatttgagaccaggctagacaacatagcgagaccctctctctaccaaaaaaattaaaaatcagctgggggtggtggcgtgaacttgtagtcccagctactctggagtctgagatgggaggattgcttgagcccaggagttcaaggctgcagtgagctacgatcacaccactgcactccagcctgagtgacagagcaagaccctgtctctctaaagagaaataaataagacagatggtgtagacggtgactcatctcaggtgatggaggcgtggctctaagagactgtggtcttgaataaatcgttgaggtccttttcaagtctagaatcctataacaatgtcttcagacagcagtgttccaaggatttttgtacgttccaccttcagagggacaagggaatagcaggtgaaagttctaataataaataacaataaggccgggtgcggtggctcatgcctataatcccagcacttgggaggccaaggcgggtggatcacctgaggtcaggagttcgagaccaggctggccaacatggtgaaaccctgtctctactaaaaatccaaaaattagccaggggtgggggcgggcgcctgtaattccagctacctggggagctgaggcaggagaatcacttgaacccaggaggcagaggttgcagtgagccgagatcgtgccactgcactccagcctgggcgacagagtgagactccctctcaaaaaaaaaaaaaaaaaagatacaaaatgcactgtgtgggatgtgagggcaatctggctgtgacatctgtcaccccagtaatcgtcagggttgatttggctgatctggctggctaggtgggtgtccccttcctccctcaccactccatgtgcgtccctcccaaagctgtgtgctcggtccaagaggacgaccatccccaatagaggaggactcatcttcagtcaagggtacacgagtagctgcactcccctgctagaacctccaaacaagctctcaaaatgcactgtgtgaccttactataatatcctccagttccatcccaaggatttcactcttttttatggcygagtagtattccatgttgtatatgtacattttctgtatccattcatctgttkttggacacctaggttgattccatgtcttggccgttgtgaatagcgctgcaataaacwtggggtttggatgtctcttcacgccttttaagttcatgccttttctgtcaccttttccattgattctatgcacatagcacctcttgcaggcatatcttgtcccataaccagaccggaacactcatttgttctcagaatgctttctgcatggtaacttggagagctatttgagttacggtctatacctcatgcttatattggacctggtggtagcaagtgtttcataaattcttctacttggttaatctgtcattttcttttggaatgagtagttgcagagccacattaagatccttataggccaggcacggtggctcatgcctgtaacccagcacgttggacggctgagtaaggtcagaggattacttcagaccaggcgttcgagaccagcctgaccaacatggtgaaaccctgtctctactaaaaatacaaaaattaactgggcgtggtggtgggcgcctgtaatcccagctactcaggagactgaggcacgagaatcacttgaacctaggaggcggaggttgtggtgagctgaaatcgtggccactgcactccagccggggcgacagagcgagactgtctcaaaaataacaataataataaatccttataaaccctaaatgctgaaagatgatggcatttccccatgcgtaatttaaaataaagacaatacccaggctgtgcgtggtggctcacgcctgtaatcccagctcttcgggaggccgaggcgagtggatcacttgacgtcaggagtttgagaccagcctgaccaacatggtgaaaccccgtctctactaaaagtatgaacaattagccaggtatggtggcgggcacctgtaatttcagctattccggaggctgaggcaggagaaccgcttgaacctgggggggcggagattgcagtgagccaagatcctgccactgcaccctggcctgggcgacagagccaaactcagtctcagaacaacaacaacaaaaagcaaaaattgcctatcattcatgacggcaggggaagagttccaagatttccagctgggcggttgagacggtggaccaggacagcagggagacggacacagggagggagccccagtctgtggaacaccatcccacttaccgtagctccccactggcagtgtgtatgagtcttggtggtatcttgtgtgcgggtctgagctagggggcgtggccccaggagcgtccaaggttctggttggggcagccacaaggtgtctgaagagcagcggggtttggtcgtcctggcacttccgcaagcagcctttccagctgtagctccggaaggtgctctgacatgacagttcaaaaacacacttccccctggcctgggcttcaacactcacttgtcagaaagtgaggtcctgtatgccccagtcctcggccagagaagcaagaagcagatttcccagaggctgtggccccttgcattggtgaggacactggggtgctacctctgtttgaggggtgactgacaactgtgctttcttagggtggagttggtctgctgtcgtgactgtctgcttgagatactgacccctggcgatcagattctggaagtcctctcctgaggctgctgaagtcgtcccagaggcttgtccagccacagcagtggagaaagatccaatcaggcaggcaggggcaaacgggaagtcgggagggtaccctccccgctccctgagaagtgtggactttcaaaaggaagtgagaaagaggaaggtcttgcctaggcatggggtagacctgtttgatgcaggcggacttcagggaaagctggtcctcagtgccacagtgctgtggctgtcgggcggcaggcactggctcacagccgtggtggggacgccttgtttctcggaaggacagaaccgccctcctgcagctcctgttcctggcttcacattagaattaactggggagctaaaaaaaaaaaaaacctgatgccccagaaattctgatttgatagtttctgccttgatgcctagacaaaaaatgtcctgaaacaatacttcacctcagacaatactgtacatgctgatgttttctagtctgttccatttcattaagaaagattctggtcttattccagtaaattgatttcaaggccactaatgggtggtgacccacacttttgagatgcctgttccgggcatcacctcccactgcagagcctggggagccggacagctcccttcccaggctctgcagtgggaactgatgcctggaacagttcctgcagccggtctccagtgtgattcaggtcctgcggcaagttctaggtggtccaagtgaggcagaagccttgctggaggctttacccgtccacactgctgtggagcctctgagcctccatggaggctycccaagccaggcagcaggggaggaagcgtctggtaggagggtggaaggcatcacgataactagccacctgcaagggctaaatctctctgggacgtttgcacgaggaacattccgaacccatgaatagaggagggctgcggatctggtagctgaggaaattcagtagaaaagcgagaaatgtatgccaggtgcagtggcacacacctgcagccccagctacttgggaggctgaggtgggaggattgcttgagcccaggagagtgagaccagcctgggcaacatagtgagatcctgtccctacaaataaaaaattaaaaaattagctaggtgtggaggcatgtgcctgtagtgccagctacttgggaggctgaggtgggaggattgcctgagcctgggaagttgaggctgcagtgagccttgatcgtaccgctgcactccagcccgggcaacagaaagagaccttgtctttaaaaaaaggaagaagaggctgggcacggtggctcacgcctgtaatcccagcactttgggaggctgaggtgggcagatcacctgagctcagaagttcgagaccagcttgatcaacatggtgaaaccccatctctactaaaaatacaaaaaaattagctgtgcatggtggtgggtgtctgtaatcccagctactcgggaggctaaggcaggagaattgcttgaactggaaggcattgagccaagatsatgccactgcactccagcctgggagacacagcgagactctgtctcagaaaaaaaraaagaaagaaagaaagaaataagaacagagaaaagcaagaaatgtaattgaaaggccgatgggctgccctgtcctgcgggtgcctaccctcatttgtgatgcaactgaagtcacttccataagctcttcggtcctttcagcagtgcccagtaggccaggggcggatgtaagtgcagaggctgcggcagtgaacaaaacagacaaacctcggccatggagcttacatgtgaatggggtaagcctgtgtggcttggtccttggtagatgctttgagtggctggtaggaggtcatggtgacctccctgggttggtgagcaggtgaacgctgcatgtgtcaatggatgtgaatgccaagaagaaaataactcaggaaagaggagggggaggggctgggcgaggtggctcacacctctaatcccagcattttgggaggccgaggcaggcggatcagttggggtcaggagttcgagaccagcctgtacaacatggtgaaacccctgtctctactgaaaatacaaaaattagctgggtgtggaggcaggtgcctgtaatcccagctactcaggaggctgaggcaggagaattgcttgaacctgggaggtgaggttgcagtgagctgagatcgcgccactgcacgccagcctgggagacagagcgagactccatctaaaaaaaaaaagagaggggagagggagtcagggaccgggagggaggattgtggttgcacacaggatggtcactccaggggacatttggaccaagactgaggggagtgagacagcctgaggggagtgaggcagcagacagtaccattagctcaggagcatgtccaaatagggaagtgcgaggcaaaggtcctgtggccagagcggctgagtgcaggaggaacctgcgggccagcaccgcttctgcagggtgagagggtggaagccaggtggacgcaggcttaggaagggagtggcrgctcagcacgtcctcatctcccatggtagggccttgtttggcctctcagctggagacaggaaggcctgggagggttttggtggaggtgtgggctgaattaatttttttttttttttgaggcagggtcccactctgttgcccaggctggagtgcagtggcgcgttctcggctcactgcaacctctgcctctcgagttcaagcaatcctcctgcctcagcctccagggcagctgggattacaggtgcatgctaccgcgtccagctaatttttttgtatttttagtagagacggaatttcaccacrttggtcaggctggtcttgaactcctgagttcaagtgatttgcccgcctcggccttccaaagtgctgggatcataggcgcgagccaccgcgcctggtgggctgaattaacgtgacaccataaaacgtctccgccacgggtggctactatcctgagagcagactgtggggtggcgggggaggcaggagaccaggtgggagtctctgggcctgctgcaggtggctgcgatcagggtggtgttgggggtggctggattctgaatatatttaggaggcagaggcggcgggatttgatggatttgctgtggggtgagagagagtgaatcatgggtagctcccccagctgccttctgtctgatctggggagacgctgggagccaggtggccgaggcggtcgaggcctgggttgtagtgagctgcggggagcccgcactgccacagcagctgcacctcctctaggccctgtccttggtagaggctgtgagtggcccgtaggaggtcatggtgacctccatgagcagctctgtttctgtctgtggttcaaaaggatgggacccagtaagcagccttccagaaaagtccactgtgccccagstcagtcatcagacagagccatttcaagaagaaaatgacttggacaatgggggctgatgcttactgccactggcaaagaattccgaaaggttctgaggggtttactccgggcactgagcatgctctcttccaagctgggagaaaagcacttacgagtttttttctttttttttttttttttttgagacggagtcccgctctgtcgcccaggctggagggcagtggcgcgatctcggctcactgcaagctccgcctcccgggttcatgccattctcctgcctcagcctcccgagtagctgagaccacaggcgcccaccaccacgcccggctaattttttttgtatttttcatagagacggggtttcaccatgttagccaggatggtctcgatctcctgacctcgtgatccgcccgtctcagcctcccaaagtgctggsattacaggcgtgagccaccgcgcctggccgagttttttcactttcccagggtttccgtgtaaatactacacaattaccaaccaaatgtctgtccttcctccgtttccataaatgtcaagggctccactgtaagggggaagcatggacccccactccaggaagacttcctggacagaccccacccaggcacctgctgaccgggttcacttccaaatcaggatactggcttgtcctggtttgtccatatttccccggtttcaacctcgacagtcaggtcacccctacctccagctaaccctcgtgccacaggcttgttgaaagttagatggcctcattttagaaaaacagatttaaaaacctcattcgtgtttgaacatggaaagaaagaataagaaagtaggctttatggccctgggctactggcttgaaactttggaagatatttttctttcttaaaatgtttttatgtttaggagatatgttctacatgcacatagcgaacatcctacccaataggcagtttttcaaccctcacccccgctgccatcctcccaacttttggagtctccaatgtctattattccatcctgtgtgtctgtgtgttacccattgtttagctcccaaagaagagatattatatatatgtacatatatatgtgtgtatgtgtgtgtgtgtgtgtgtgtgtgtgtgtgtatttttagaggcagggttgtgatctgtctcccaggctggagtgcagtggcacgatcatggctcactgcaacctccacctcccaggctcaagcaatcctcttgcttcagcatcctgagtagctgggaccgcaggtgtgcgccaccacagtctgctttttttttcaaactttttgtggagacaaagtctccttgtgttgcccaggctggtgtccaactcgtgggctcaaatgatcctcccaccttggcctcccaaagtgctgggattataggcatgtgtcatcacgtccagcctccaaagaagagcaaattcactttaaattaaattaattaattaattaattactttttatttatcttttttgagatggagtctcgctctgcggcccaggctgatgtgcagtggcacaatctcggctcactgcaacctctgcctcccagattttaagtgattctcctgcctcagcctcccaccaccaccatgcccggctaatttttgtatttttagtagagatggggtttcgccatgttggccaggctggtctcgaatccctgacctcgtgatccgcccaccttggcctcccaaagtgctgggattagagttgtgagccactgtgcctggcccaaattctctttttaaagtatctgggctgggcgtggtgactcacgcctgtaatcccagcactttgggaggctgaggcaggtggatcacctgaggacaggagttcaaggccagcctgggcaacatggcaaaccctcttctctactaaaaatacaaaaattagctgggcgtggtggcaggcacctgtcatcccagctacttgggaggctgaggcaggagaatcgcttgatcctaagaagtagaggttgcagtgagccgagatggtgccactgcactccagcctgggccacagagcgagactccatctgaaaaaaataaaaataaatgataaaaaattttaaaaagcaattctgccaggcttattagaaaatggaaacaaggattttgtcatcaacttgctgcctcatagtaacaacaaaggtgtctgaatctgtaaatagttgtgtcttctttttttttttgagacggagtctcgctctgttgcccaggctggagtgcagtggcgcgatctcggctcactgcaagctccacctcctgggttcacgccattctcctgcctcagcctcccgagtagctgggactacaggcgcccgccgccccgcccagctaattttttgtatttttagtagaggcggggtttcaccgtgttagccaggatggtctcgatctcctgacctcgtgatccgcccgcctcggcctcccaaagtgctgggattacaggcatgagccacggcgcccagccaatagttgtgtctttggtgaaaacattctagaagttgaacgtcatctgtttataataaatgagtcagcatgtggtcctccaagaatctcgtctgctattgtcaccccatttcccgggtcctgtttataaatggggtatgacaaagggaacccacttcaagctgaaatcatctgttgttcaaatcctggattatagaaaggctttttcacttatgatttcagtgaagcaaaaggtcatgttatcatgactgctttataggaaatggatttcttaaccttctaaaacttttgaaaattcatttttgaatgagtaatatgtaacacatggcctgacagtaaatcccaatccacgttatggaaaaaccgacttgactgaataagcaggcagtccattgtttctctgtggttgtgttcttttctctggcttctgtgagaaataactgaatgacgggtaaagccttttaaaagtcaggcagtgtggctgggcgcggtggttcatgcctgtaatcccagcactttgggaagtcgagacgggtggatcacgaggtcaggagatcgagaccatcctggctaacatggtgaaaccctgcctctactaaaaataaaaaaaaaaaattagccgggcgtggtggcgggcgcctgtggtcccagctacttgggaggctgaggcaggagaatggtgtgaacccgggaggcagagcttgcagtgagccgagattgcgccactgcactccagcctggggggacagagcaagactccatcttaaaaataaataaataaataagataaaataaaataaaagtcaggcagtgtgtaacaaaaggaaataaagaaacttcacctctttagtgatcaggaaaatgcagattgagaccaaaatgaagacacgtttcactctgtgtgcccggtagaaatgaggaagcctgatggctttcagtgtygacagaatgtggaccacaaaagcccctcacacattgctggtgggccgataagtggtacaaatgccttggaggcagtttggtcttttctttggtgtaaagttgaaattcacatacttcggctaggtgcggtagctcacgcctgtaatcctagcactttgggaggcctaggcaggcggatcacctgaggtcaggagttcaagaccagcctggtcgacatggtgaaaccccatctctactaaaaatacaaaaagtcagccaggcatgayggcatacacctgtagtcccagctactccagagactgaggcaagagaatcgcttgaacctaagaggcggaggctgcagtgagctgaaatcgcagcgccactgctctctagcctgggtgacaaagcaagactccatctcaaaaaaaaaaaaagaaattcacctactcgaaaccagcaataccgttcctagtattgctgatgttcacacaatcatgttcatagcagcactctcatagaaaaacctttacacagcacaaatgcactttgacaggaggataaattattcttagtatattcacacaaggcaatattataaataagctacactcaaatagacagcaactctcaatattgttgatgactattaaaaaatcccaaaacaggccaggcgctgtggctctcacttgtaatcccagcactttgagagacggaggtaggcagatcccttgaggtcaggagttcgagatcagcctgcccaacatggtgaaaccctgtttctactagaaatacaaaaattagccaggcgtggcggtgggcacctgtaatcccagctacttgggaggctgagaagggagaatcgcttgaacaagggaggtggaggttgcagtgagaggagatcgcgccactgcactccaacctgggtaacagagcgagactctgtcttaattaaaaaaaacaaaaaaaagcaccaggcatggtggctcacacctgtaatcccagcactttgggaggctgaggcggggggatcacctgagatggggagtttgagaccagctgtcaagaaacccgtctctactaaaaatacaaaaaaattagctgsgtgtggtggtgcatgcctgtaatcccagttacccgggaggctgagacaggagaatcgcttgaacccgggaggaggaggttgcggtgagccgagattacaccattgcactccagcctgggcaacaagagtgaaactccgtctgaggaaaaaaaaaaaaaacaaaacaccaaaaaaccaaaaaccaaaaacatcaaaatcattacatatggtaaggtactttttatttatttacttattgaaacagggtctcggattgtcacctaggctggagtgcagtgactcactgcagctttgacctgccaggctcaagcaatccccccacctcagcctccccagttgctatgactttaggtgtgtgccaccatgcctggctattgtttttttttttaatagagacgaggtcttgccatcttgcccaggctggtcttgaactcctagactcaagcaatcctcccgcctsagcctctcaaagtgctgagattacaggcatgagctaccatgcccggcctacgatactttttaaaataaaattaaaacaactaaaactaaacaatgctttttaggaatatatacataataaaactatgtatttttacaagattcaggataatggttacttccatttgaagggaggcagaagcagaggatgggggaatatacaaatacatgtcacttaatgtcaataattgagatgtcaattggctgatggggtcatagttgtctgttatattaaacaaacaaatacaaaagagggccattcagggatcagtgatgagagcctgagatgaggcgaggactgtgattgctcccaccctctctacctgaggtccagaaagcaagaaagaatgaagagttcccttttgacctgttacaagatcagcagtttcctgggtgcggtggctcacgcctgtaatcccagcactttgggaggctgaggcaggcagatgacctgaagtcaggagttcgagaccagcctggcaaacacagtgaaacactgtatactaaaaatacaaaaaaattagctgggcatggtggcacgcacctgtaatcccagctactcaggaggctgaggcaggagaattgcttgaacccgggaggtggaggctgcagtgagctgagatctcgccattgcattccagcctgggcgacaagagcaagactctgtctcaaaaaaaaaaaaaaaaaaaaagaggatgaagcaaatatggtaaatatggtaaaatgttaataactagtgaagatatatggagattctttgtactacttaaaaattttctaaatttgaaattacgtcaaaatgagaagttaaaagagaaatgacaggtcacttctccagtcatctcccaaccttgatgcatttggcctttttttaaatttttttaatttatttttttatttttttgagatagagtttcactcttgaagcccaggctggagtggaatggtgtgatcttggctcactgcaacctccgcttctcgggttcaagcaattctcctgcctcagactcccgagtagctgggactacaggtgcctgccaccatgcccagctactttttgtatttttagtagagacggggtttcaccatgttgggcaggctggtcttgaactcctgacctcagatggttcacctgccttgkcctcccaaagtgctggaattacaggtgtgagccacrgcgcctgacctcatttggcctcttctttctgttgctcaaacactcaagacttacgactcagggcctctgcaagttccccctgcctggagcagtgatagggtgactctttaccagcaatatgaggatcccatttgtttggatcatttgtaaaggtaacttttcccatttgtaaytaaaaagttatctgtggagggatcctttgcagtcactcacaaagtgtgaataaaatatcctgttcccaataatctttataaaaaatttaaaaaattattttatttcattttgtcatgtccttgagtcatagatatatacacacatatgtatatatatacacacatatgtatatatatacacacacacatatatatatacacacacacatatatatacacacacacacatatatatatatakagagagagagagagagagaatctcrctttgtcacccaggctggagtgcagtggtgccatcaggacttgctgttgtctagaattcctgggctcaagcgatcctcccacctcagcctcccgagtgggtgggattacaggagggtgccaccatgcctggctaattttttaatttttaattttgtagaaacagggtttcactatgttgcccagggtggcctttaatttctaatgtaaacatttttaattgtggtaaatacacttataatttaccatcttcaacatttttaagtatacagctcagtggtgttaaatatattcagtgttgtacaaccatcaccaccaaccatctctagaactttttcatcctgcaagactgaaactytgcacccattaaacaataactctcattcttcacaatccccagctcctggcagccaccattctttctgtctctgaatctgactattctagggaactcatgtgagtggaatcttacaacatttgtctgtttgtgcctggcctatttcacttagcatcaagtgctcacggctcatccacgttgtagcatgggtcagaatttccatctttttggaggcggagtaatgttctgtgtgtttagtcacattttgtgtatccattcatctgttgwtggacacatggattastctaccttctggctgttgtcaataatgctgctgcgaacatgggtctacaaacatctctttgaaaccttgctttcaattctttggggtgtgtatatacaaggaataatcttttatttcatagctttagcatctattgatgattcttgagtgaaacacttatcagagtgtccgtaaaatggctatttaccatttttgtcattctttccacatttattagttggcattcttttgtaaagaagstctttcctgcccatcctcccttttactagctttaatttcatcatcattattaatagtagtaatagtaccaatgtggactccgggatttttaaaattatgactgcatgtgttagaatccattcctgacatactcaattgatgctcaagccactcccagtttgggtgagaaccctttcaggctggctgctgtgtccttgacacgcccccttcagcttttgagctctgtcttaactcctgttccaggctccttgtgtccttcccagtctcggccttgggagcagccactcctccaaggatccctgggtactttcagtggaggatggtccttagaaggctggatctgggcttttgtgtgcctcttcttgctaccggagtgtccgtgtttccagggcgtttttcatggatggagctgggaaacattttaaaattgtaaattcaaacggatcagttattccagtccagcagcacagagttcttcctctccttcccccgtcccataattgtatctttcatttgctttctgtgttttccccaggaatgttgtcttcatcttgaatctcctttgctactggctgtactcattagcaacataaaattcctcgtgataacctctgacccctatcccatgtgtgatgacaccgagttgagggagatcagacattcaatgcagaggtgggggccaagaccaagcctcctggggcttaagaaaatatctccagagacgggaagtctggaagggaactccatcacgaatattttatgttccctccctctattgttctcaatcactgcacaagtgtatattactttttttaataacaaaaaggaacttttaaggtaaccccccacaaccctatatagactggatgtcaactctttagtcctagatacacctggagcctggcgtcgtggggacagaggcaggtccctgtgctgagggcggtaagacagggcgggtaggtggggacccagctgggaggtaggggggccagacgggacatcagctcccgggagccccgctctgggcacggtgcgcgccyccaccctccattgcaccccgcgcctgcttcctcccaggtgcacctcgggcgcctaagccagctgggtcccgggccccgggagcagctgcgggcccgacgggggcgtggcgggaccggcgggggcggggcctgggggtggtccgcgcggattggctgctgcctgcggcgcacgagccggtcagcgcgcaccccgcccttcccgggccgtgcggcacgccgygttcacgtgctgtcgcgcgccctcccggcgtgcgccgcgcggccccagcctgctctgcggsgactgtccggctcgtgagctccgcgtggatccggcgctgggccccctrcgctctggggacctggggttstgtttccggcaaaggatgttttccgwgaaggcctgggagcggctgtaaataatacccgagaggaaataggcccggcaggtgtttttgcgcgtcccggcgttgggtgtggctgcggcgggcgtgcaggccgcagatgaggaaacagactaggagggatttaggcatctggactctgcggggcggcccgggcgcgcagcccgtttccctgtgggttgagggcgcgggagaagtgggcggcccaccccaccccgcgcgtggatgcggggctggggcaggtccgcggtggaggcgccgccagtgagcacccggggaccgctcctagcccccagtgtgggacacagactccctgaggacctcgtatgcgttgggtctgtggctccatccgaatcttcatgaacagggcctgcggtgaatttggggagagtgagtgagcgggtgaagggtcaggaaataagtcacaggaggcatggttgaagaattggggatgtttaacccagacrtggcaggactgggcacacttgacccctgtctggaagtatttgaaagacttctgaagggggccagcccctccacacctgtgggtgtttctcgtcaggtgggaggagatactgagaaaagaaataagacacaaagtataaagaacagtgggcccaggggactggcactcagcatacgaaggacccgcactggtggccgtctctgagttccctcagtattgatcattatttttactatcttggcgaggggagtgtagcagggcaacaggtggggagaaggtcagcagggaaacatgtgagcaaaggaatctgtatcatgaataagttcaaggaaaggtactgtgccctgatgtgcacataggctaagtttatgtttccctttactcagacatctcagtgtagcaaagagtaacagagcagtattgctgccagcatatcgcctacagccacagggcggttttctcctatctcagaatagaacgaatgggattggtctgctttacaccgagacattccattcccagggatgagcaggagacagaaggcttcctcttatctcaactgcaaagaggccccctctctttcactacttctcagtacagaccctttacgggtgtctggctggggcacggtcaggtctttcccttcccaggaggccatatctcaggctgtctcagtggggggaaaccttggacaatacccaggctttcttgggcagaggtccctgcagccttctgcagtgcatggtgtccctggttaatcgagaatggagaatggcgatgacttttaccaagcatactgcctgcaaacatattgttaacaaggcacatcctgcacggccctgaatccattaaaccttgattcaatacagcacatgtttctgtgagcatagggttggggctacagttacaggttaacagcatctcaaagcagaaacaatttttcttagtatagatcaaaatggagtttcttgtgtcttccttttctgcatagacacagtaacaatctgatctctcttttccccacaacttccttatgaggaagaggctagactttccttctccctgggggcacaaaacagattttcccaggtggagaatttcaggtcagttacacagagccggcagggatgaacatgtctggcgttctttgcaggagccagatgtttacctatgttagtgggagaatagtggagctcagatgcaagttctcatctgccagactccaaagcccttgccttttctcgatgcgtctatttttttgtaaatgttttagttcagaggtacatgtgcaggtttgttatataagtaaactcgtttgttgtagattatttcatcacctaggtataagcctagtacccagtattttattttcttttttctttgtctttgtttttttttttgagacagaacctcactctgtcgcccagactgaagtgcagtggtgctatctccgctcactgcaacctctgcctcccgggttcaagcgattctcttccctcagcctcgtgagtagctgggattacaggcgtggatcaccaggctcaactttttttttttttttttttgagacgaagtctcactctgtcatccaggctggagtgcagtggcacgatcccggctcactgcaacttccgcctcctgggttcaagcgattctcctgcttcagcctccccagtagctgggattacaggtgccccgccaccacgcccagctaatttttgtratttttagtagagataggctttctccatgttggccaggctggcctcgaacacctgagctcaggtgatccgcccgcctcggtctcccagagtgctgggattaaggtgtgagctaccgtggtagagatggggtttcgtcattttggccaggttggtctcaaactactgacctcaagtgatccacccgccttaggctcccaaagtgctgggattacagacatgagccaccgcccggcttagtatttttttttttctgagcctcttcctccttccactcaatgcatctattttagtggaatgggttcctttgtgaacaatgatgttgcagttattcatgaagtaataaagygtttgtgtattgattgatttctttggactggagggtttgcccagccctgttgagctttgtcattgtctacctcaggggaagagggagattgtcgctggtcagaggagaatgccagggcttctctcagacggaggcagcctcccatctcaccgcaagtcggatcttgagtagcacctgtttcggcccattgcccctttaacaaggggcccaggtgcccttggacttgctagaagaataatcatgactttgagtttaacaaatgtggtcacagtattccactgcagtccacctttcccacttctcctagcccttcttcttcttttttttttttttttttttatttgagacagagtttggctcttgttgcctaggctagagtgcaatggtgcgatctcagctcaccgaaacctctgcctcccagtttaaagcaattctcctgtctcagcctcccgagtagctgggattacaggcatgcaccaccatgccctgctaattttgtattttcagtggagatggagtttctccatgttggtcaggaactccccatctcaggtgatgggcccgcctcggcctcccaaagtgctgggattacaggcgtgagccaccttgcctggcctcctagcctttcttttttgcaaatctgacactcctcccctccaccccatgtgcctagacaaggccagcatgggactcacacaggaagagctgaggactggaggagtgagtaacttttacctgagtacgtttcagcyctccaggtggtaccaggtacagtcctctgagaagtcgggaggaaaacgcctgtgcsggtctcattcagctctgcggtcctcagtgtctgtctgatactgagtctgtagtgaggatgcataacggggtaaccctttctgagctcctggattcatttgctgaattaatagcttcatactctctgaagagaggaatactttaggagtctcttttttgtttctgccacatttattaaattgtcacattttaacacattttaagccattttaacatctcttgagagaaggtaggggctgtggaatgtgtataaagagacaatatcttgtttttcttggatccctagctagcagatgtgattacagtttcttatcaagaactcagccagaaaataccagccaaaccctcttcctccattggattatctgaggcagcattcgtatctggtggcctctctgctctgagcagtttgtggagctccagaagatgtctctgatgatcctcttttcttcctttcaagggatttcctagattattcatcctaaaccttggtctcattcctctcctacgcccttaggtgttaaggaattggatatctatggagatagccagcccagccctaagcgacactgtagagaaggttaaattttgtttctctttgcctgtttctggtcctttgtcccttgctaagtccctaggtcsttcctgcttttttctaggtcacatcctcagmttcttcatctgcgtcatctctaaatgacagatagtagctcagtttgcattttaactgatagctgagatctttaactccagagatgctatctaaccatttagggacaggttaaatcacattgtcttctttccctagcctgccccactctccaaccccagcattttcatacagaggggcagcttaggtaggggtgactagaggtagtgggaggctggtggaagatcatgaggtagtgagtcctggaatcctccactttgctcccacttgctgagcgagggccctggccacccacactgaccatgcttgtattcatcagctgtcctagaatgtcctgcctcaggctggaggctgaggatgccagtgagygaggcagaacggtggcttcagtcagccttcctgggttctgatgcyacctccaccactgagtagctgtgtgaccttggagaatttcccaaacatctctgtgcttcagttccctgatgtgtcagccttatgcagttgtgaggattaacacgagcagctaagcacaaaaggcttctacatggcctggtagaaaatcaggatgccaccctgctggtggccactggaaaccctattacaatccagagtgcttcctaagtgggccttattattcctgtcttaaaggaactttctgcccagcaatgacaacttggccattgctacgaccattatgcatgagtttaacggrccagaaaatgggatggggtggtctgcacagcagctgcccactcgcaggtgccgagtgtatttgcaggtctgtttgagcccttacrttcaggcctggggatggatgtgggtgaatgtgygcgacaggagcgaggcagccccagtggtctgacttacattcaaagcacttcacggaatccatctgcccagacaacctcctaaagtrgtccttcgttgaatgcctctcccgtctgccccccgaaaagttatctaaaagtccccactccttatgctttctctttttgagccagagtctcgctctgtcacccaggctggagtgcactggtcactgcaacctccccctggttcaagcaattatcttgcctcagcctcccaagtagctggggctacaggcatgtgccaccacgcccggcaaattttttgtatttttagwagagacggggtcttgccatgttggccaggatggtctcgaactcttgacctcaagtgatccccccgcctcagcctcccaaagtgctgggattacaggcgtgagccaccgcgcccagtcttcttatattttcttgtcacagtgcatctgcttgggtggcaggtgcacctacctgggggagagcacattttctgttcttttcttagtcttacgcagggaggattgtgattgggactctggcggctgtgagcagggtagggggtcttaattttagtgagcaaggggcacgaatgctcagacctgggccaccatggagttgtcggggtgtgggtaggagactggcgtcacccataaatgcagagtagacccacttcctccaggatatttgactgtgatcttgggccattgtgtctgttccccaggccctgagggttctcctgggataagatgggtatgaacttgctgcgctgatggtgaaggcgggtggctgaggaacaggaagagtgcgkccagtactgcttaagaattcggtgatgtmtcctgggctctctagaggcttacaaacatgtggaatctaaaagtcactcagaatttggaactctctaaatgtttatgtcccagggygaaatcccagccctgagctctatmtatgggagtggccaggagggtctgagcaccgaggaaggactggcttctgcctggctcccggttttatgtttccctaacattgttatgtcttggatgtgtatttccttaaacctttcccaggttccttttggttctgggtctaggayactgagaagattgaaacattgggagtgcactggccttgctctctggaaaggctttacttttcctcttgcctatttgcagttcccttaaattagtcacattttgggaccctcttttgcattgaatttctgggacttctstttgtggttattttgaagtgggggtgggaggacatgcctgggcccaccccgtggttctttaatgaagacgatggttttccttttaagcaaaagaaccttgtttaccattaaccagaactctggaaatagatatttaatccccaaacagaggtgatggtgtgtctagaagcaatttaaagcctccatagcttgactagtcactttatcctgggcaactttttggattgtttggtaatctagaaacgagagagaacgctaattgcttcaacattaaagaaacccaccttctagactcactcgttcccccacccctcctttatgttttctttcttgttcctctaagaaatgaaatatagaagacgaaaatataaactggactacagcagggtgcagtggtgcatgcctgtaatcscagcactttgggaaggaggattgcctgaggccaggagtttgagactggcctgggccacatagacctccttcctacaaaaaatttaaaaagtatatttaaaccagactagaaactttcaaccacaaaaatccatggggtcattgaggtgcaaatggaaagaccaggagcaaaagtagagggagcaaaagtagagggtggggacagtgtggaggtgaggacagtatggaggtggggacagggtatggaggtggagacaatgtatggaggtggaggcggtggctgagcagagcaggaaagctgctgggggctgtgaggagctaggtttggctgggtgacagcaagggctggacagaaagtgctttcagaaaagcccaaggataaagtccaaagagattaaaggttaaaaaaaaaagaaaagctcaggaagaggaagatgacaggtccccaggggaaatctgcctaatccagcagctgggaagacaggataccctcaggcccttccttagggcaaaaggattactccgtgcaggaaggaaatattacaaagtctttcttctctattttattattattatttttttatgagacggagtttcgctcttgttgcccaggctggagtgcagtggtgcaatggtgcaatggcstgttcttggctcaccgcaacctccgtctcccgggtgcaagtgattctcctgccccagcctcccgagtagctgggattacaggcatgcaccaccatgccaccacgcctggctaattttgtatttttagtagagacgggatttctccatgttggtcaggctagtcttgaactcccgacctcaggtgatccacccgcctcagcctcccaaagtgctgggattacagacgtaagccaccgggcccggcccttcttctctatttttaactcatcttttaaaattgttctttctttcttttttttttttttggagactgtctcgttctgttgctcgggttgaagtgcagtggcgcgatcttggctcactgcagtctcaacctcctgggctcaaggaatcctcccggctcagcctcccaagaagctgggactataggcgtgtgctgccacactcggctaattttattttttgtagagatgaggtccctctgtgttgctcgggctggtctcaaactcctggactcaaaagattctcctgccttggcctcccaaagtgccaagatgacaggtgtgagccaccactgctggcctagatatctattttttatatgaaatttctatcatgtacataatgtgttcgtgcaatagcacatgtatattagatatagataaacaggttgttgggggtagaaaagtttggatatcagatcagaaaagtttggatatctcagctcagagccaygatgagagtggggagggagcccgcgcttctcaagctcaaatgcctaggagtcctttggagatggcgttcagatgcagattcttgttccatagatctggctggagcccaaagttctgcagctggcgggctgattcagaaaacatgagttggtgyttttcctctttttgccgccrtactccattgagagtcttagtcatggagggaaacccgaaaaccaccggtgtccgggacagatactctgacgcattctccyggaacaccctggggactgcgagaaagcccctgctggctcactcgtttgctgggatcagttcccatcaggcatgcggctgtgcttcttggtatcgatttgcttcttggtcccatggcttctgcagcccacgtcgggagggcaaggtgtggtgcagcctgagagaagcatgctcctttgcaggaaggagagggaggcgcacaggcgggccttttggagcagaggaggcagaggagtccaagctgggtgcagttcctctgctgcagccctgagctgggcagacaggacacttcgctggcctttcctggcctcatacttgtcactcggtgacactgcgaccagtgtgagcaaacgttcagaaagcacatttaaacactgttacttaaaattgcaacttcacagggccagtattctttttaccatgttccaaatgaggaaaccggggtgctgaatgattaagtgacttatccaagaccacagggcttgcaaatggcaagtgggaggattgtttgagcccaggaatctgagaccagcctgagcaacatgatgagaccccatctctacaaaaaattaaaacattagctgggtgtggtggcgcatacctgtggttccagctacttgggaggctcaggcaggaggattgcttgagcccagtaggtcgaggctgcagtgagctgtgattgtgccactgcactccagcctgggccacagaacragacttcatctcagaaaaaaaaaaaaaagttcacccaaggcagacaacttgtccagggagggcagagctagatgttcctgtgactgcagtgctggggcgcatctgtcstctgtcctgaaagcaggccgctccatgctcatctcccacaccttcacctcctgttaggccagcgtccactgcagtggcccagctcttcccagcatccccttacacaggatctgtgttcccttcatggtttggcctgcatgtccttcaacctgggacgtccactctctctcagttctgtcctcattgtgccctacttgtctacttcgggaamtctccttcaccactcacctcacacccttcctccaggaagccctccctgactttctaggcagagttggagccctcaccctgggcatttccacagcagaaactgtcccaccacagccgttgctggtggtcatgtytgtgtttgccagcagcccacaagaggtcgaggygcaacctgtagtcctcagctgctggggccrggcagtggtgtgctttcagcctggagggggcgctcaggaagaggttgtccacttgtgtgcagcttttatgtgtcctgtgcatatggttacagcaccgcttcctgtgaaggagttgagctaggggttgtgctgaatgcagagaacaagatacaaacttaaagaggcctagggtgtggcgggaaacacacaccccttcccccacctatatatgctcacgtgaaaaggtgcagacaagtatttgaggtagtgcagaaaataaatgcttggagaacagcaagggagggatgttagtagacacagagggaatagacagaggcaaagggggtttctgggtctccagagatctggggggctaggtgcaggaaggctttttttgggagagaagcagatcagctgcgggggtgcagagagagggaggggaaaggttgcttgaggcctcattgtagaggaccttccgtgaagcctaaggaggttgaacttggtcttagtggcagtcgggagccagtgattgtttctgagcaggggaagaaaaccaaagtactgtcttaggaagatgagtccctgtcagcggaatgcgcagtggacrcaaacgggaggcggggaggaagagatggggagtgagggcctgtggtccaggtgcggcatttagaatttaatccgcacagatagtaggcacggaaagaacatagatgatgtgtgcgggagttgagatttggggattgaccaggtgtggggattggagcggcttgaagaggcaagttccagtagaaggagtcattagtccttacacggtgctccttactccaaagcctgtattttttctgctgacttctctgagccttagtctcctcttctgtaaagtaacgggcttggatctcttgttatttgttctggactcctggcacagatctgctggttccttcatgccaatgacccaggcctgtttaccaggagaagcagacatcgtgacctttcccgtccagccttacagcctagtttatcaatccaggacaggggttcttagaagagtcctctctggtaaacaataaacaagtgctgttccgtctgcctcgcggtgcccccacacctgcctggccaygtcacactggcagatgggacgcgggcatcagctcaagttctgtggagcgagagattccgtggcccgggctgacctgggcttggaggcctggagctgcctgcggcccccgccgagaaagccaggagctggggctcgcttgtcaggcgtgtttctgtttctgtggcactgggcctgctgcccctggactgtggagacccagtgactggcgcagggtgagagccagggttgggaccagtgtgcgggcacaaagccccagaggaaggtgcgctctggtggctctggccctgtgatctccgtgcagccctcccacggctctgctgggggaagctctggggtccctgtgtgtgtaaaaactctgggcctgaggaatagcttctactttgtttctttctttaatttttttttttttttaatacggagtctcactctcatgtaggctggagtacagtggcacgatctcggctcactgcaacctccacctcccaggttcaaggggttctcctgccttagcctcccaagtagctgagattacacctgcctgccaccaggcctggctaatttttgtatttttattagagatggggtttcaccatgttggccaggctggtcttgaattcctgaccccaagtgttccgtgcgtctgcctcccacagtgctggggttacaggcgtgagccagtgcccccagactgttttgtttcttttctttcaaaattaaattgtccccagcttctctcctcaaacctcagttttaccccctctttggttcccatgcacaagtagagagaatatgaggttgtcatttcaatggccattatgaccagaaaattgtgagattgcatctctcagtcttgctccgtcccctctcttctttccctcctttccatcatggcactttggggcactttcaggtacacagagtgttggcaataacagtaaatatcctgaggtggggagcacttggatttgcctggcatggattgcgtgtttgtaggtgggaactcatccgagtgtggggaccacagtgctgttgtcatccccgtatgacagatggcacagctggggcaccgcaggcgccaactagcccggatctctcactgaccagcgctagggctgcaataggaacctggctggctggctccagggcccgggctcttatccgggaacagtgttgttcttatttgcctagatcaacaaagtcactgtagagaaagacaaaaacaaaacaaaatccaaaccaagtaagccaaaaaaagcttagcctggggacccagttctacatttggtggtggtcataaaagaggctacccaaatggcccrtaagcatagaaagcacttcaacctccctaattattcaagagatgcaaattaaagccacggtgagatactactccacacctgttttagttagagtggctaacaagaaaaagaccacatgttggggagactgtgactcacaccaactctcatatcagagtagaaatccatacaatcatcttggcagcatttaccagagccaagcatctgcacacagaaggatccaggaagcccccgccttggygtagacgcatgcactcaaggtgcacagaagaatgttcactgcggcaccccaacgggtgagagcccccaaacggaaagaatgcaacgttccatcartgtggagaagtcaagtgtggtgttcgtgcagtggaatactacagaaggatgaagaagaamcagctattgcaggaagggacacggtggaagaatcttatggggaaaatgctgagggaaggaaaccaggccaagtaaaacagatagaaagttcaagaccctgcagatcgtctgtatccgatgtcaagacatgggttcccttgaggtggtgatgggagggggcacgggggtttctgtagygacctggttgatgggtgggggttgcataggcatgctttcctgtgaggatcgtcgagctgtgcattctgaatgtattctatacttctcatttacctgtttaattgtgcaagagatggggtctccctctgttgcccaggctggagtacagtgggcccatcatcgctcactgcaacctcgaatcctgggctcaagtgatccacccacctcagcctcctaggtagctgggaccataggtgtgcgccatcatgcctggctaatttttaagttctttgttgtccaggctgttcttgaactcctgggctcaagcaatcctcctgccttggccacccaaagcactgggattacagacttgcaccaccacacccggcctccatgttatatttccataatatgtttatttgaaaagtgacttgggtgccaggagacatgggccctccctagtcctggctgtctctaacttgtgagtgactcaagctgtctccggttccactttctggaagactaatggcttggatgagatcgtggttttcagatctgtcctagccacagaaccctctcttcaaacaagcccttacctgcaatctgaacataaaatgctacctgrtgggactcacgagtgagttccggacaggacaggagacggctgtcactgggctccaggatgtgggtggcagtgcctgacttcccgctcctgcctgctgtgggagacgagcttcttgcactggggcctgatttcccaggctggcctctcagatccygtggcttcaagttctcctggtcatgcagtgtcctggttcagcactgaattgttccctaatggtttcctgtgtggcagattccttagctctacagtgaactctaacagggtaggcttgaccggcttctgtggtttgcttggagtagttaggatgaaaattcagaacctgcctgctgactgaaatgggcgttcatgtcttagaatgctcaccagattgctttttctcttacacatagtagaggtcaataaaacggagtttgtgggatgtttcttttcttttctctttctttctttctttctttctttctttctttctttctttctttctttctttctttctttcttctttctctttcttcctttcttttctttctctttctttctttctttctttctttctttctttctttctttctttctttttcttttctttctctctctcgctctctctttcctttctttttcttttttttttttgagacggagtttcactcttgttgcccaggctggagtgcaatggtgcgatctcggctcactacaacctctgcctcccgggttcaagcaattctcctgcctcagcctaacaagtagctgggattacaggtgcccgccaccatgctgagctaattttgttttgtatttagtagagacggggtttcaccatgttaggctggtctcgaactcccgacctcaggtgatctatccgccttggcctcccaaagtttgggattacaggtgtgtgccaccgtgcctggccaggatgtttctgatgcagggataaggtggggaacttgggaaatggtgtacaccactgacggcctggggcacatggggtggacacactgggagtggatacctgaggtgggcacgtggggtggacacgtgggtgtgagtggtcacctgaggtgcacacgtgagggtggatatcatgagggtggctgtcaagagggtggatgctggttcagggctggcatgaagaccctagtcaggagggagccaaggcgtccaaggaggccctcaggctgcaagtgttggtttggccccagtcttggtgatgacaggacctttgggaatctgaagcccggtgaccttgggctgtggggagctggcgggctttatctgcccagcgtctctgccccagttttgggcctgtctgtgatgctgggcacctgctgatgtgcgcagcttcattcattcctcctccactcacccacctgaccactgtgtggggcgcccctgctgtgggccaggctggttccagggtccatcagcaacagaaacaaaaatgccctgtcctcttggggagacacaaccagcaacaagagaacagcraaggaggcgtaggacatgcggctgataygggcttaggggaaacgcaggcaggagagggggctgcaagctcaggcgggagctttggggccaggaaggcctggctcagaggggactygggtcagggtcacaacagggrggtgaagccactgaccyggagctgctggagagcttctggggatggacagagtccgccccacgggtccctcctgccctccctcggtgcctgccctgggccgtggagatgactggggagcagctgggcgttattttccccggggccagggtgggcatctyggcctcgagttgatctgaaaggatttactgctgtcagagccaccccatcgtgtgcagcacggactggggggratttgaaggcagagggcctggggtgtgtccagccccacctgcccctcggccccaatctgcttctggagagtggcctggctgagccgggacgcagcgcactggtccctaccttggaggcctgactcccttgagaagtgtccccaacccagttcccgtctcactaccagccaccacctccccagcacggggtcctccgcaggtgatttcatctctgaggcggctttcttatctctggaagagcagtactatctccctggtggagtcgttctaaaaatgaaaggcaatgtgttcaaagtgcccaacacgtgcctgccgtattcaataaaagggagctagtattcatttaacagctgagaagaaaaacagtgaacacttcttgagctctgtttatctgccttgttttactggaggagaaagtggggcacagagaaattcagttattggtccgaggtcacacagcgtgtgagtcgggaaggaaggggcagctggaatttgaacctggcagtctggcttccctctggggaagagcagtggatgagggcgaagccgacaagagcccaaactcatctgcgctgcgctgcttttgagccacrcaaatccaaataagggatcatccaaatcctttattttctctcgaagttttgtgatcattaatcagttaacagcttgttcccttctgtgctggacaacccccagctgcaaggggcaggaatggagcatgggggaggctgtaaaatagatcactcaggcgtttccctagcgagccccccgggaatgaacagaagggtttctctcctatggtgggatgttgctgtccatgggggtcgtcgaaggacgggtgtggaggcccaggaggactgcaggcaagaggggagaaaaggaagaacccgtctcccctcaactggatcatcatgggctgtgttgcactggtaaaccaaggtgccaaggctgcggcagctcagatgggaaggggaccctgttttctgagcakscagacgccaggattataggacattctgccaggcacagaaaccacgagagcccaccttccccaaaggctgctggctccaaagtggggagggagtggttgttcccaggtgataagtgatgagaagaccgttgagcccccagagtgacacccaagcatgtaactaactcgagaccaggagcatccactgacaaacgcccggtgaggtcgatcctggtgrcaggatccaggtgctagtcgggtcctgagtcgagttgctggactcgcagcatttaaccattcaaaataaccagctttaaaaatgtgtgtgggccaggctcggtggcgctcgcctgtaatcccagcactttgggaggccaaggcaagaggattgcttgagcccaggagtttgtgagcagctgggcaacatagtgagaccctgtctctaaaagaaaaaaaaaatgctgtaattgacattctttttaatggatggatggatggaggaatgaatgaatgattgctttgcaagacagcatgaacctcaggttccagagtcaggcttaaagcaatcagattgagggggaccatgtaatattttttcctaacattaacaacaggcttattgtacaaaggacaggaaaatatgaagaaagaaatcattcataattacatagcagaatagccattgttaacatttcaattttcttcaagttttttcttttctttcctttggttttgttgctgttttgttttgttttttgacagagtctcccactttgcccaagctggagtacagtggctcagccgtggctcactgcagcctcaaactcctgggctcaaacaatcctcttgtgtcagcctcctgagtagctgaaactacaggtgtgcttcaccacacctggctaatctttaaattttttgtagagatggggtcttgctatgttgtccaggctggtctcaaacccctggcctcaagcagtcctctcacctcaccttccaaagtgctgagattacaggtgcaagccaccgtgccctaggttattttaatatagtttatcaccaatgtatgcaattctgtgttctgagtgctttacttttaatgacccaaactaagatgttctactctgtgtgttagttctctggcaagtagcagaattgtggtatgtgttcctaaaactaagatgtatcctgatcacgtgacagaggctgatacctctttaaaagataaagtttggaagtgaaacagagactagaacagatatttgtcacacccatgttctattttattttcatttgtaattattttagagacagagtctggctctgtcgctcaggctggagtgcagtggtgcagtcatagtacactgtaacctcaaactcctgggctcaagctatcgccccacctcagcctcccaagcagccagtactgtaggtgtgtgccatcacacctgactagtatttccaaaaaaatgttttgtagagataaagtcttgctgtgttggctctgctggtctcaaactcctggcctggagtgatcctctagtctcagcctcagtagctgggattatagtcatgagcctctgcacgcagcccacgcccatgtttatatcagcattattcacagtaacaaagaggtgggagcaacccaagttccatggagggatgaacagataagcaaaatatggcccatccacacagtggaatattatgcagccttaaacaagaaggaaatgctgacatatgctacaacatacatcagccctgaagacaatgttctgagtgaaataagcgagacataaaaagacaaatactggctgggtgcagtggctcacgcctgtaatcccaacactttgggaggctgaggcgggaggattggttcagtccaggagttcaagaccagcctgggaaacatagcgaggcctcactgcagggtgtggtgggacacatctgtgggcctagttactcaggaggctagggtgggaggatcacttgagcccaggtgctcaaggctgcagtgagccaagattgtgccactgcactccagcctgggcgatagagtaagactccgtttaaaaaaaaaaaaaaaaaaaaaaagacaaatactgcatgattccactcatatgcgatctctagaagaatcacactcacagagacaaagtagaatggaggtggccaggggctggggagggagaatggggagctggtgtttaaatggggacacagtttccattggagaagatggaaaaattctggagctggatggtagcgatggctgcataacactgtgattgtgcttactgccctgaactgtgtgcctaaagatggggaaaatggacaattttatgtatgttttgctacaataaaacaaaaagcaaaagataagagttggagctgaggtccctggcttctggcctcctcagtcttggcggattcttcctccctgtctccccaagttttctctctaatccctcacctggcttttctgggcaaaggccagcccgcttctcaccacccccttctctcttgcatatgcatccccccaacattcacacagaagcacgcacacacacaccccttgaggtctagactgggggtctgggtgcaggagggtctgagctgggagacctccccactgcagcagcagtgtcacaaacaagttgtcctgcacctaagactaatctggagtggaggctgggaaggaagcggtcctggtgctgccggcagcctttccatcctagggccgagctggctggggagaatgaggggcctttgaagtcccaggccgatcccttcgccagacctcccaggccaggtctccacgccagcactgtgtttcatcacaagtgcaaagcttccagcagagcagtaggtcccgagcgggagtgccgggatgtggcctcgaggcccccgcctgtcattgtctcccagcctcaggccctgttccccttctaggcttgtgccacaccaggctaagaatcagagcctgggtgtgggggcagggggagctggaggagcgggcaggactgcccagtgctttcctggcttagctgggcgaaatccaaatgcagtgaagttcgccttgcagtccagtgtccatggccagggcaggagggcagagggctgagcctctgccagacagagcagtgcccttcccagccccccagggtcttcacttgcttcacagagggtcagctggaaggactatggggccccacagacccacctgtcgccacaggttgagaacatggatggggcggtgcccagcacggtccctggctccaggacacagtgcacagccacagcccatacacrccccagccccaaacctaggagacttggtccttctgtgtcacacctctgttctccctggagttgcaggggattttctctggaaactacctagtagtttagggtcctaagaatttatccaatcttctttcagaagatcacccagttcttcattctcaaaaacaaagcacaaagactttgaacagctgcggaatggcttgtcataagccacacaggagaaaagtccgcaggcccagcaccacgccaactttggggttggcttattctagaatctagactatttttttgctcacaaattatctctaaaacacctccagctccactaggattctgtttactaactgcttcctgtgcacctgtctcatttcctcaacaaggaatagaatgcttgcagtcaggtgccccagccccaccagcctgaagctgggcttgtagctggcaccatggtaggtggcagtgaaaactggagtctggcctggtgtggtggctcatgcctgtaatcccagcactttgggaggctgaggcaggtgaatcacctgaggtcaggagttcgagaccagcctggtcaaaaaaaaaaawatatatatatatatgtatataaataatatataaataattacatgtatagttttgaaagcaggaattttttttttaatttttttttttgagacagagtctcgctctgtcacccaggctggagtgcagtggcgcgatctcggctcactgcaagctctgcctcccgggttcacgccattctcctgcctcagcctcccaagtagttgggactacagacaactgccaccacgcccggctaatttttttttatatttttagtagagacggggtttcaccgtgttagccagggtggtcttgatctcctgacctcgtgatccacccgcctcgccctcccaaagtgctgggattacaggtgtgagccaccgcgcctggcctcaaagctggaatctttacatgacaggcatgagcatcactggagatgctttttgttttttattttattttattttatttttgagacagaatcttgctctgttgcccagactggagtgcagtggtgccatctcggctcactgcaatctccgccttctgggttcaagtgatccttgtgcgtcagcctcccgagtagctgggrttgtaggtgcccaccaccamgcccggttaatttttgtatttttagtagagacggggtttcgccrtgttgtccagcctggtctcgagcttctgacctcaggtgatctgcctgcctcagcyccacaaagtgctaggattacaggtgtgagctaccacacccagcctggagaagctttttaaacattgcacccccaaaagccccatcctggcaattctggtttaatcggtctgggatggggttgacacaatgggtagttttgaagttccttggtgattcttttttttattttgtattttttgagatggagtctcactcttgtcacccaggctggagtgcaatggtgtgatctcggctcactgcaacctctgcctcccaggttcaagtgattctcctgcctcagcctcctgaggaactgggattacaggctcccaccactgtgcctggctaatttttgtattttcagtagagacgggggttttaccacgttggccaggctggtttcgaactcctgacctcaggtgatccacctgcctcggmctcccaaagtgctggaattacaggtgtgagtcaccgcgcctggccttttttttttttttttttttaagagagcgtgtttagctgtgttgcccaggctggtcccaaactcctgggctcaagtgatcctcccatctcggcctcccaaagtgttggggctacaggcgtgagccagcctgccggccttcctcatggctcttacgtrccacaggtattgaaagccactgatctccaccatggtcagacttagccatcagcttcgcacgttcactctttttctctccccagattatttaacaagttagcctggatctcaatttattgaaacccgacacaaaaaccctgatttaaataaccaggaggcccagttatttccatgaggacactagaggaagaagcactagggtgaccacggcacgccccacgagggcctctgtggccttgagacacatcactctctgcccacaaggactctcagctctttctctgctcctctcctttgatccctctgctgggggtggattacagaaagaactgctggcttcctccgtaatctctttacaaggccccttggggtgggccgttccgagctggttccactcatccgcttactcacagtggcaggagggttagccactaagctgtttatcagtcattgataacttcacatgaggcttacattcttttctgaaaacacrttttcacaaggatggagagaacacaccatagaaacaggccactgcgggggcgaggagacggcagagggacgccagggtctcccatcggctcacctctggtctcgcccctcttccaccgggtgctgctggacctgtggtccagccaggggctcatctgggtcactacctggcactcaggccctcacccagttataccagatcagtacttcctccccgctcctttttttttttttttttttttgagatggagtttcacttttgtcaccaaggctggagtgcaatgtgagatttcggctcactgcaacctctgcctcctgggttcaagcgattttcctgcctcagcctcccgagtagctgggattacaggcacccaccaccaygcccagctaatttttgtatttttagttgagacagggtttcgccatgttggccaggctggtcttgaactcctgacctcaggtgatccacctgcctcagcctcccaaagtgctgggattacaggcatgagccaccgcgcctggcccctgtcctccagttttaagaactcgagcccctctcccagtggtataaagtcttgctgatagggaagagcaggaaccttggtggcccagtagaactactggtgaccctggctgtcagagatagagcaaggccagaataggaaggtgattggtggtgttttcggtggtatatgatggagaaatgattagaaataaaactattttgttttttattttawtattaatattctaattagaaagtttgtattagcattttaatgatattcataatatacttcatagttagggatgcttttggctgtaagtaactggatactggaccagcrgtggcttaactccatggaactaatcacacgaccacatcctgtggcatcctcagcaaaggggtagatgggcccagtgatgactcattcctgtggatggaatggaaaataactttttctgaaactgggagtctctgtctccctccattagccaatcaaggttcattcagctgagcagtgtggagtggtygcaggtataccagtgaacagtgcccccacataaagtgaaattcaccttcacctttcttttactattactacatgctatttagttatcaggggaaactgaatttgtcacagatcatttcaagaatggcactgtgtatgtggattggagattaaatgtataaacatcatggtcttgtctggctgcamagtgtagtatcttttctcgctcttaaacaatttctcattttttgtagagatggggtcttgctatgctgcccaggctggtctcaaactcctggtctcaagccatcctcccacctcagcctcccaaagtgctgggattacaggtgtgagccactgcacctagcctttattcgttctttttrtaataaaaggctatgttttagaaggtgcttgttgaaaaagtatgttwtaggaagaagatactgtggctgagactgctagcatcccccaataccccttctcyttgcttcctcagtagcagaatcccaggcagttgcccagctcagaggctatgttgcctccctgcatttgcggggaggtgtgccgccacgactgaagctggcmrgggagaccaatgtggaagtgcrgtgtgggcttctgaaaagttgtctcgaaagtgaaaaggcagccgggcgcagcgactcatacctgtaatcccagcattttgggaggccaaggcgggcagatcactgaaggttgggagttcaagacyagcctggccaacatggtgaatccctgtttctactaaaaaaaaaaaaawtagctggacatggtggtgggtgcctgtaatcccagctacttgggaggctgaggcaggaggattgcttgaaccagggaggtgggggttgcagtgagctgagattgcaccactgcactccagcctgggccacagagtgatactccgtctcagaaaaaaaagtgaaaaggcaagggcctttttgtcctatctcacttcgccttactgccagtagtagcttggtatttaaatagtgtaacaggtgcagtgtggtttatattacgctgtctcatgtacagtaagtgatgagatgggagaagtttagacaactgctctaggctgcgtctctacaaattactcatttcacgttgggcaggtctttcgttgtcagcaaatggaaagtcaaattaaatgtatttgtcrttatctttcagcattggtgtttgaaatattagtgatgtcttgattcattgtttattcaaaatagaatttttagctgccatgggtttaaaaaaggtaagaattttgctcagaagtrtgcaccttccgaaactgaggatcatccttttgaggtgaatgtgcagaattattagcatttatacttctcatgaactttaacatttytgagttttagctgttttgaaataattccagacttaatagaaaagttgcagaaatagtgcaaagtgttccatagcactctcacctagattctgcaagtgttaccatttgactcctctatcattctctccctctccatttctatctatctatctatctatctatctahccatccatccatttacctacctacatatatatatatawctgcctcataaagaggaagagaaaatatatttatatggatatatrtgtgtacgtgtgygtgtgtgtgtgtctgaakacagagagaaatatatgtcgtgcccagcccctatttttttttctgaaccatttgagagttagacgcagacatgatgcccttttgtccctaagtacttcagggtgtatttcctcaaaacragcacagtatcatgattgaaatcaggatatcaacactgatacagttctgttatctaatatgcaaacttcaagtctcaccaattttcccactactgctctttacctttagcaaaatcaagaacaacatttagagtgattcaaggtttcatccaggctcacaagcctttcatctagtgtgtcctcaatctttgctgcctctcatggcctttgtatttttgaaaagtgcaggcactgatttttttttaaacattttttttcaaaagtttaaaatgcgataaaaatgtgtgacacaaaatctaccatcttaatcatttttaaatgtgtacagttcagtagtgttagatgtattcacgccattgtgcaatagatctctagaaccttttcatcttataaaactgaaactctgcacccaataaacaacaattcctaatttcccccacckcctgcccctgacgtcccccgttctgctttctgtttctgtgaatctcttgtagtgaccttgtgtaagtggaatcatacggtgtttttctttctatatctggcctgcttcgcttagcaaaaagtccttaaggttgacctctggtgtagctctgacggatttccttccttttaatttttttttttttttttttttagacggagtctcgctctgtcccccaggctggagtgcagtggcgcgatctcggctcactgcaagctccgcctcccaggttcacgccattctcctgcctcagcctcccgagtagctgggactacaggcgcccgccaccttgcccggctaattttttaaaaaaattttttagtggaaacggggtttcactgtgttagccaggatggtctcgatctcctgacctcgtgatccgcccgccttggcctcccaaagtgctaggattacaggcgtgagccaccgcacctggcgatttccttcctttttaaggctaatattcaattgtctgtaaattccacatttggctcatgcattccatctgtcgatggacactttggttgctttacctgtttgctattgtgaatgatgctgcaatgggcatacgtgtgcacgtatctcttccagagtcaggtcacttattttttagaatatccctaatttttttagaatatccttagtttttagaaaataaggtcacttattttttagaattttttagaatatttagaacttgggtccatctgttgcttcttcctaattagctttaggttctgtgtgtttgkcagggatgctcgagtagtagtgatgtgcctgtcacagaccagactgctgatggtgaggttcacttttttttttttttttttgggagacagtctcgctctgtcacccaggctggagtgcagtggcgcgatctctgctcactacaaccaccacctcccaggttcaagcgattctcctgcctcagcctcccgagtagctgggactacaggcatgcaccaccaagcccagctaatttttgtatttttagtagtgatggggtttcaccatgttggacaggctggtctcgaactcctgacctcaagtgatccgcccgcctcggcctcccagagtgctgggattacaggcgtgagccactgcacctggcttgagggtaactttatcacttgcttaaagatggtgcccgccagttttctctactatatggtcactattttgtccctttgtgataagtaaggattctgtggggagatattttgagtctctgcaaatatctgtttttattttttatttttgagatggagtctcgctttgtcatccaggctggagtgcagtggtgtgatctcggctcactgcaacctctgccttccgggttcaagtgattctcctgcctcagccttccgagtagctgggattacaggcacccatgaccacgcccagctaatttttgtgtttttagtggagatggagtttcaccatgttggccaggctggtcttaaactcctggcctcaagtgatccacccgccttggcctctcaaagtgctgagattacaggcgtgagccaccacgcccagctgcaaatatcttgtttgttatcaagcttccacccactcggtgattcttgtgtgaaacaattattcctgcagtgattacccagggatgacctacagattccgtcgttccttctgtacttatttgttgatattctactctaaggaaaagctttcccatctcctacatgcattcattcattcattgtatccacagttgagtggattcatgtgttcctatgtttctctgggttttagtctattactatcattattcattttgttgttcacattgtacaggattttgggtgcagtggctcatgcctataatccagcactttgggagactgaggcaggggggactgcttgaggctgggaatttgaaaccaacctgggcaacatcgtgagaccccatccctacaaaaaaacaaaaacaaaaacaacagattgtaccagatttggccagtggggaaccctttagaataggctcgtgtgtttcttgatatatccacatcatcttcccattaacttctatttcaacatcagggttttctgtgcctcatgtctctatttatttcggagatagggtcttgctctgtcacccaggctggagtgcagtggtgcgatcttggctcagtgcaacctccgcctccccggttcaaggaattctggtgcctcagactcctgagtagctgggattataggcgtctgccaacatgcccagctaatttttgtagtttttgtagagatggagtttctccatattggccaggctggtcttgaactcctgggcttaagcgatcctcccagttcttcggcctctcaaagtgctgggattacaagggtgagccacgacacccagccaacttcctgtctttcaacagtgatcaattgtgggtatacatgacatacgaaataacaaagattaaatctatttcaagctgtcaagtggccgaacaccgaaggctgccacaggaaaattatttaaagatacatttgttaaaaatacgttgattgattaagaagttagaaattgaaacagaactatttctacttagggtgtgaaccccatatcacactctgaatccccaccagcagggaccgctcaagacccgttgcrtgccaagggtcttgacaaaggaatgtcccacccaatctagggctcctagcccctggactacccaacttggtcaaatgtatgcctcactgttccatcagcggtttcacttaatatagcagttctagactcagagacttttacacagagaaccccgagatcattctgaacttgaggtgcaggacagtgcattgtgcaaagtcacagagttgctgagaggtagagctgggatgggggctcgggccccccctagaatcacaggatccttacgtccagggctagtcagaagccagcgagtttgagtcgcagctgttggrgaagtccctctggaatggtttcgacaggtaggatctggctgctgcatttgccgtccctctggcccaccgctgtccactgtacagagaaggcatctctttctaccttcaaatcagcatctggtttctgttcacaggagcaacgcgatgcacgacaacccccgcgccttcgtcagtggctctaactcctgtcacagccttgttccttctccctgtctcgctctttagccgtttctcgtagggatggtgtccaggtggctcggacaccctggtcgccgttctctgggggtagatgagtttatgaagaccaaattggatatgagcaaaagcactcttggtaaaaytgtattcaatcaatccctagatgagtatttttttaactatccaggcccaccccagatgtctgaatagatttcttctgatcttggctactctgtgatttggccttcactccttgatttacccagcagagtcaatgacattccccaatacacacacacacacacacacacacacacacacacacacacacacacagctttctgaggaggagtacacagaagggaacacgatccagtctcaacactggcgatgacagaccgtcccattctctcatwtgaaccctacacattgatccagcccagcctggaggtttcctaacatctcgtcagcagctagcatcgctgtccaaaacctgcccgttttttttttctttcttcttttttttttttttttggcttgatttggctctatttttagaatgttttccactgggagaaggaagaaatatgaggggaacagagcagggagaggtgccagctgtggcttgccagcctagggttgctcygtggcatgtgtttacactgcagtcatgggccggccttgcctggcccctgcgggtcacccgggcatgcttcccatacccagcagaacgtgatctgggttccagtttctgttctccctagtcctgggttaggaaactcagttgttttgacattgactcttcccctcacccgtgtgtgtgtgtgtgtgtgtgtgtgtgtgtgtgtgtgtgtgtgtgttgggggatgtcactgatctgctggggaaaccaaggggtgaagaccaaatcatagagcagcccagatcagagggaatctattcagacatctggggtgggcttgcacagttacaaaaagtgctcatccagggattggttgacctaatactttatagtttttccaaaagtgcttttgctcatatccagtttggtcttcgtaaggacctcttgaggtagatggggctgctgttctcattctacagatgattttactgtgaatggctgtctgtccacctcagagccctgcaggatttatggaagctgcttccagcttcttatgtgagccagtactcgctcctacttaggattatatattgaggttggacatggtggcttatgcctgtaatcccatcactttgaaaggcaggagatttgcttgaggccaggagtttgagaccagcctgggcagcataatgagaccccctgtctctacaaaaacaaaagatagaaattagttgagtgtggtggcatgcgcccataatcccagatactcgggaggctgaagtgggaggacagtttgagcccagaaactctaggctgcactagagtttgtgtgattgcaccactgcactgcagtctgggcaacagagccagaccctgtctcaaaaaaacaaaacaaaacaaaacaaaaaagkattgtgtatccattagttgaatcgctgcaaaggtaaacattcattcattcattaagcaagcatagattgaacaccttctccatgtcggacactgtggtaggatctggtgattcaaagatgaacagctgtccctgtttctaagttgcctgtagtccagtgattactctcaggtttctgtctcaggtgtccgtgtggagagactgccaaacaggctttrtgtgagcaacaaggctgttgatttcacctgggtgcaggcgggctgagtccaaaaaaggagtcagcaaagggtggtgggattatcattggttcttataggttttgggataggcggtggagttaagagcaatgttttgggggcagtgggtggatctcagaaagtacattctcaagggtggggagaattacaaagaaacttcttaagggtgggggagattgtaaagaaccttcttaagggtgggggagattacaaagtacattgatcagttaggttggggcagaaacaaatcacaatggtggaatatcatcagttaagtcgattttcacttctgtgaatcttcagttgcttcaggccatctggatgtatatgtgcaggtcactggggatatgatggcttagcttgggctcagaggcctgacagtttctattaatatttgtatttcattgagaacaatgggaaccattggtgtctgccatttgggaagtggaagagatgcttagacagataagggagcagaggtctagacgaggtgtagagagggtcagaaaccaggttggggttcctaactcccaagccacgtccccagccacctaccgcagtcactgtcttgccctcccattcctattggataagctttggagataagacaagcctggttcatcacggttgagtctctaaacctagatatgcagaggttccctggaattgcttcttgagtccctgattaattcagctcttgacatcacaagatgaactcactctttrgtgaattgcacagacttttgaaaactatgtttccgctgcgctaaagtctaggagcgggctccttagcctgaaggatkcctgtttcaatgggacgtgacagctgctttcaaacatttragggcgagcacctgttgttggagggggatgcaggcttaacccatgtgcagcaacagaaagagacaagggggcatttccaggaagatcaactcagcttagtgtaagcaatgtctttctagccagtagcgccatctgataatggagyaaacagcttggagccaaagagccagaggtctaagctgaggatcccaggactcttcaacaggggtttgtggattcagtgggaagctggcccaagagctttcaagggccttggagtgaccacctgatttgtccctttgcacagtttgcctggtgctgcacttagagcttcactctgtgaagggcatagaacaccaacactcttctcatggcaaggatgggcttttgctcctgtttcttttcttttttctttttttttttttgagactgagtcttgctctatcacccaggctggaatgcagtggcgcaatctcggctcactgcaacctccgcctyccaggttcgagctattctcctgccttggcctcccgagtagctgggattacaggcacctcttaccatacctggctaatttttgtatttttatagagatggggtttcaccacattggtcagtctggtcttgaactcctgagctaaagtgatctgcctgcctcagcctcccaaagtgctgggattacaggcgtgagccactgcgctcgcctcctgttcctttttcatccacgctttggaagaagatggtgtcagggtcatagaagacccttagagaggagacatggggtggggtggtttaggcattagtagtggccatgtttcccctaccctgaatggggctttgcccagggctgttccatcgggtttatctgggcctcacagacgtctagagttttcttcatcttgttgtgtctgggtctgcacaatactgaggaattgtctggcaagaaacaaagctactcatgttctaggacatagttccatggctaagcatgaaaacaagcaagatccaagtgttcaagggcccctgcaaccctgacatgcctcctaggtggctggccatgtctgcatggggtcactgcggcccaggactcagactttcctctagaagttggttttggcagtgtacccagggagactgagtcaccaagcaaactggtaagagaatgcagataaacgtggttcacttccaggaggatcacaactgccagcagagagtattcggggggctccccgcagaattctcttgggggagaaggtaggtgggagttaggggccattgtgtgtggcgaggcagagaagggagaattcgggctactgtcctggctgctctggcagagccaaggtggtgtgatacgtgagtttctcagtccattttccattcacttattctcatggcagatggtgatctcctttggggaggtgaggcccgtcactacttaatgtggcaaggttgcgggttccaacatcctgctctttttctactctacccctccccttgttttcaagactttgagaggaattttccagaatcaagctttctggctctccttcctcttttgctttcataaggacaaacactattcgggggagagggcgggagagatattgagagccaaggcacatgagacagcacgggcagcagggtgctgcctcgtgagcttgccttttttttttttttcttttttgagatggagtctcgctctgtctcctaggctggagtgcactggtgcaatcacaactcactgcagcctccacctcccggttcaagcgattcttccacctcagcctcccaagtagctgggaccacaggcgcctgctaccacacccggctaattttttgtattattttttgtagagatggtggattagtcagggttctgtagagggacagaactaataggatagatgtatatataaggggagtttattaaggagcattgactcccacgatcacaaggtgaggtccacaataggccgtctgcaagctgaggagcaaggaagccagtccaggtcccaaaacctcaaaagtgggaagttaatagtgcagccttcagtctgtggtcaaaggtccaagagtcccaaagctgaagaatttggagtctgatgtttgagggcaggaagcattcagcacaggagaaagatgtaggcgcagagactaagccagtctagtctttccacggtcttctgcctgcttttgttcgggccctgctggcagctgattagatggtgtccacccagacggagggtgggtctgcctctcccagtccactcactcaaatgttaatctcctttggcaacaccctcacagacacacccaggatttttcaatccaatcatcttgacactcagtattcaccatcacagatggagtcttgctatgttgcccaggctggtctcaaattcctgtccttaagcaatcctccccccgtcacgctcccaaagtgctgggattacaggcctgagccactgtacctggcttgttttaatcttttatactgcatttttactgtacttattattattattattattatttttgagacagagtcttgctctgtcccccaggctggagtgcaatggcgtgatctcggctcactgcagcctctgcctcccaggttcaagcgattgtcctgcctcagcctcccaagtagctaggattataggtccccgccaccatgcccagctaatttttgtacttttagtagttttaccatgttggtcaggctggtctcgaactcctgaactcagatgatccacccacctcggcttctcaaagttctaggattacaggtgtgagccacagcacctggccttacagtacattttctatgtttagatatacaaatacctaccattgtgttacagttgcctacagtattctgtagagtcacatgctgtacaggtttgtaccctaggagcaacaggctataccatgtaacctagatgtgtagtaggctctgccatctaggtttgtgtaagttcactctgtgatgtttgcacaatgacggaattgcttagtgatgcatttctcagaacatatccccatcattagccaacacrtgactgtatttcttttcttcttcttttgcttgaccaataaattargacatcttaaaacttttgagaaatacacaaaaagctcaagccatcctccacatcttttattttttttttaaggaagataaaacatattcattattccttaagtggaagtgaatcctcataaaggtcttcctctctgtcgtcttcatgttgagtagactgggaaggaggaagagggggctggtcttgctgtctcaggggtggcagaggcaggagaaagtaggtgtacctgtgtgattcaaatgtgttgttcaaggtcaactgtatatggttggctctcacgatctaatattttacataggaatcttatatctctgtctgtcataaataaaatgaacttaaaatttccttttcttttactttttgttttaccaatcaaggttatgctagcctcagaaatgactagagttgcttttattcttttctattttctggaacaatttacttagataaatcatctgaggtcaggagttcaagaccagactggccaacatggtgaaatgctgtctctactaaagatacaaaaaaaattagccaagcatggtggcacaagcctgtaataccagttactcaggaggctgaggcaggagaatcgcttgaacctgagaggcggaggtggcagtaagccgagatggtaccactgcactccaaccagggtgatagcatgagactccgtctcaaaaaaaaaaaaaaagaaaaagaaaagaaaagaaaaggaaatgcccacaggagatggagtgacagggtcggggcagagagaaatggaaacttactggagggtttgccgggacttaagttgagcaatttgagtcacttcacccagagccaggctatggctgctgtgtattctcctcacatccacttaatgagacactaagtccactagattggagaaaaatatatgatatttgtagaaaaataataattttttttgagacagagtctcgctctgtcactcaggctggagtgcagtggcacaatcttggctcactgcaacctccacctcctgggttcaagtgattcttgtgcctcagcctcccgagtagctgggattacaggtgtgtaccaccacacccagctaatttttgtatttttagtaaagacgaggttttgccatgttggccaggctggtctcgaactcctgacctcaagtgatctgcccgccttggcctcccaaagtactgggattacaggcgtgagccaccacacctggcctctccatgtcttttcatgacttgatagctcatttctctttagaacggcatcatattccattgtttggatgttccatagtttatccatttacctaccaaaggacatcttggttgtttccatattttaacaattaccaataaagctggtataaacatctatgtgcatgttatgaattggtttttcgaacccccaacatgacattgtgtggatagtctcagtctctgttctcaatcatgtgtgagttacaaataatttattgaaataagagccccctccccgtgtctttggctggtgatgatggaagggtttgtttcagtgttttgtttggtgtctcacttctctccctcatacatgggatttttctcaagagcaaatagtgacacttggtgtctaatgagcaacttctgattgctcccagactaccatgcttgtcacctcactctctctggggcagcgggtaggtcctagcttggtttgaacgttttaacctggctatggctggcacaggatcacggaaaygcggttgcttgtgtttgttgttacagcagcatttggaagcactggtaggagttagatgacattggctggcacagaagtgtgggaacaaaggtgatcctggagaaaaaccactccactgtcctctcaaggctggaccgagctcagtgaattcagctatgtgagcacctcaccaggcacttgcttttttttttttctttttttgtgacagggtctcactctgtcacccaggctggagtgcaatggtgcaatcacagctcactgcaacctctgcctcctgggctcaggtgatcctcccacctcagtctccaaaataactgggaccacaggtgcgagccaccatgcccagctatttttaaattttttttttttttttttttttttttgcagagatggggtttcatgttgcccaggctggtctcttaactcctgagctcaagcaatccgtccgcctgagccacccaaagtgctgggattacaggtgcgaaccactgcactggccaggatcattttcaataattgccctgctaatgtctcattctactcacggaaggtccttctctgacctttccttcccaaacagctcaattgttctaggtgagtctgaatcacagcctgatcagcggctaaattaggattccactcagcaccctggggttagggtggccctataatgagtctcctagggagctagctatctgcgtccgtgtcaagcagaagggaaaaacaaaaacaaaccaacaaaaaccccagcaaactctgctcctaattggctttcttctttgatctctgacctggttccttgactactctaatctcaactccctttacttcttcccataaagcaagtggggttgactaggtagtcttgaagtttccttctatctttcatagtttctaggaccaygacctaggagaaatcatcaatctgcgctagccttggtgttattgtagctgtaaaagaatcatcgtattagaggaacatttacgttattgggagcgttttctgaagggccgcctttgtgatacccaggttagtaggagggaagttggccaagccctagttggacatttggggtgaagatggggcattagcagagctagggaatgagttaggaggatgtccaaactagtaaactcggaaccagtaaattaccagaatacagttgcagttgggttgtttataagtgattttgtagtgaagcagtttcatctctcatgagggctctaccctaacttacctggggctgtaaaggctgtcaggagttctagctggccattaaaaaaacaaaaacaggtgtgcattcgtccttgctcccacgcactcccagttggcacttagatgtaaggagcggggcggggggggcggggggtggtggtggggcggggattgagttaacttccttttgcctgctgcagagcaagtgcaggaggcgaatgggggaagaacatagtcttccctctagactcggaacgcgttattgacagacaggaaaagtgcccggtctgcgaaagttcagctggacctccgggacatcaactccctgtgccctaagagctgaccgctgtcagatgcgttatctaggtcaagagatgaatgatgtgccgctgctggggcagacgccgtctctctgctctccctgtgagctgaaaccagcagtgtttgcaagcttgtagggagtgtggaagaaggccccctggtccgcttgcctcgcctgtacgtgtgcaaaatcggtgggcaagcagcgggcgcgcaggtgcaccgtcattccccaggaaccgcgggcgctctttgcaggggtgcagccgctctccccgcgcgcagcctacagccctccccgacccccgcgaaccccagggcgggaactcgtcccggtggcgcgggcgctcgctgcctgctgtttccctcttcgggtcagcccactcttatttcaggagtggagtgggactctcccctgggcgtttagggtgtcgcctctggcatgtgctcccactgcagaaaacaagtccaaatgcaacgcatcgggtttctgaacagccgccagagcgcggaaaccagaccgtcagcaaagctgtcgcgggaacaggggctctgagagggcggcgcggggggcggggtgccggagtgggggtcgaggcgggagggggagtgggggtcgaggcgtgggggagggtggcggggcacaggccaggtggccgatgttgcgcgttccggggcccctcggcaggcggcgggtcgggaggagtggaggcccgggtggggcgggcgcgcggggcgggagcagccccggtcgccgcctgggcgcgggcgccctccctgtggagcatgcgggacgtgagcgacgtgtggcagcctctgcgcagacttttccgccgcggtgtaggtttcagcgagcgccgccttccctccaatcacagcccagcctcagcgctaagtgtgcacctctctgcaaggcggcgcagcgctccygtactgaggcttcgtttgcaaaagttacatccgtcccggcgcgggcggcggttccccaccaaaagcaacccagatcttccccgcacgcctctgacctgactgcacgactgtcacaagtcgcgagctggtgcaaactgcgagggccgggaaaggagacggggcacgcatgcaccaaaaagtggggaggcagagctgcagggtgtgcaggataacggagtgaattttaggagtctscctaataaggggccgcccccaatagttttccctcgacttaggtaatgaattgcagatcgaaatgggtctagttttattcattcttctactcggggcgataaaggtttattgaatggtgtacatggtgagtgtgaaaaccagatgccagctgcccccagccccagtccacttcagtccagctccccggggctttcccgccccctcctcgtacccagcaccgcgggcctctcaaggttcccagtctttgggctaggggaggggagcaaggctcagttcaagtccaggtttytaagggattcagsaaagtggacaaggaygaggtgaggtgggaggatcagggaagcctcctccccgcggstcgcccrggtcgtggcgrgggatgggctcacgggtattatcagggagcagcctggcccatgtccttacctggactgcgyctgccccacagcgcgtgttaggaatgcagagtattggggctccatggccctaaaggagctgcattggtaggatgcactttaagcagcttcccaagggattcggctgcggggtccacggtctacactgggcaggactgcgtctctgctctcctcccggccagcacagttgaggtgaggsgccggaattagtcggggaagctgtgccagacgtcccgaggggacaacgggacgaggggataacagcagccaggacccttcagcagggctgggcgcgctccaggcccggggcagggcggcgggagctggtgcaccgccgtcgccggcccgcagggggagctcgcaggctgcttcccggctcgcccaccctcctccccacgtggaagggggctgggacccaaggaatgcggcccgccccgaggctgacgtacgcgtctgcggccagcccggactctttaaaagccggcggtgcgcggggcatcccagccaagccggagaggaggcgagcrgcagggcctggtggcgagagcgcggctgtcactgcgcccgagcatcccagagctttccgagcggacgagccggccgtgccgggcatccccagcctcgctaccctcgcagcacacgtcgagccccgcacaggcgagggtccggaacttagcccaaagcacgtttcccctggcagcgcaggaaacgcccggccgcgcsccggcgcacgcccccctctcctcctttgttccgggggtcgsyggccgctctcctgccagcgtcgggatctcggccccgggaggcgggccgtcgggcgcagccgcgaagatgccgttggaactgacgcagagccgagtgcagaagatctgggtgcccgtggaccacaggccctcgttgcccagatgtgagtgcagctgcgcggagccgggttgcagggcgggctgcgccgggccgggccattgtgtggggcggctttgtgccgacgcccctctrcggggggcgcgcccgtgcgggtcgcgccggcggggcggggcggaggcgcgggctgcgcgtccttggccgggcggcgggggcgctgtggcccttgtcccggtggctgccccgccggcccggaaacggcgagtgcgcccggccgggctgcgtaccccgagacggagggacgcgcgcgcctgggcaggccagggaggggatccacatcctccgcgatccctgtcctcgacacccgtctcgggcggccgtcgccggagcgcagcccagggacccggccgctcgcgcctccgccccttttcaccgtccggatctcctctctctgcatgtttccatctcctctcccgccttgctatgcattcctatcccctcgcttcacttaataacctatttctctgtcctgttttctctttcgatatatatgtctctgtttttctctgtttctacctccttcctctcccactgtttctttctgcttttatctctttctctctccttctctctcttccgtgcatctccagtgccatgggggcgcccgtgctgggggcgccaggagagccacctggagccacgcctgtgtccccggctttggggagggtcggtgggttggtgagtgcacggttggcgctgctccacgcgccccgggcgcacgcacyccccggtgctcggaattggctggcagtaccctgccccgccccgccggtcgccgcccccgccaccagcgatcgcttgggagagggttacctcgagctccacctcagctgcggagcgccgccgcgkaaaagggcgggtgggcagcgcagaggggcgacgctgcctctccaggtaatgcgccccggctcccatgggctggacagggagccgcctggtgcggttttgcccaggtcaggtcgtagcctgagtagtgaccgtgggatccaggtgcaaactctygaggtggcttcgggtcatccgaaggcgcctgagcgcaggcggctggcaggcagggttgcccggctactaygtttcttaggacggcccccgcgggacttggcagctctcctggagccctgctcggtctgaatcaccggcctsgtccagacctgcscctctccccacacccacccccatggtgtgccctgggtggggacgtcagcagatccaccctggtggacttcagggttctggggtagccctcaggagaggtcttgttccccctctttgtgaggtagcccaggactgggggatgtgggtgtgttgcccagcccagtcagatgcgcttgaactggggtggcccatggttctcttgtctttgtktaaaacctgtaagtggagtggaatgcagctcttaaatccccagggaggtttggccaaggccaaatgcagaaacaacttttgcataaagcaagtattatctctatagcactttgtaaactgcattggaggctagtcccacatatgtaaatacatgtgattgtatacgaatgcccacgggtctgagaggagtgtcccgtgacttccagggctctgagatctgttggcatcagctcagttgtgatcttgagaactccagcgtgcaccaaggcgtcctccctccaggcttggatcctgatccattagaccccatcaacctgcacgtctcacacgcagtgagagatttgcctaagaatccctgtcagaatcattcagagctggagggtgggaatttggctaaagccaatggattaattcttttgtcccgcctactgctggtatcctcctgtgtggctttgaggtatagtctcagacacattccttcttgtaaaaagatccgcagcctgggtatcgcacatccttatttcaagtggtggtgtctttctcagtttatatagtcacatttaactcttactggaatggagggaagaaggtgtttctatttggtatctttcctgacaccctccctcgattctctaatggcatttgggacattgggtgggtttttctttcttccttttttttttttttttttttttttgacatggcgtttcactctgtcaccgaggctggagtgcagtggtgcgatctcggctcactgcaacttctgcctccgggtttcaagcgattctcgtgcctcagtctcccgagaagctgggattacaggcgcacgccgccatgcccagctaattttcatatttttagtaaagacggggtttcaccatgttggccaggctggtcttgaactcctgacctcaagtgatccgcccacctcagcctcccaaagtgctgggattataggcatgagccaccacgcccagctgggtgggttttctttctcctaaacttgttgccacctttataagtggccttctcattggaggtctgcagcagagttccctgaggtttattatttatttatttatttatttatttattcatttttgaggtggagtctcacactgtcacccaggatggagggcagtgnnnnnnnnnnnnnnnnnnnnnnnnnnnnnnnnnnnnnnnnnnnnnnnnnnnnnnnnnnnnnnnnnnnnnnnnnnnnnnnnnnnnnnnnnnnnnnnnnnnnnnnnnnnnnnnnnnnnnnnnnnnnnnnnnnnnnnnnnnnnnnnnnnnnnnnnnnnnnnnnnnnnnnnnnnnnnnnnnnnnnnnnnnnnnnnnnnnnnnnnnnnnnnnnnnnnnnnnnnnnnnnnnnnnnnnnnnnnnnnnnnnnnnnnnnnnnnnnnnnnnnnnnnnnnnnnnnnnnnnnnnnnnnnnnnnnnnnnnnnnnnnnnnnnnnnnnnnnnnnnnnnnnnnnnnnnnnnnnnnnnnnnnnnnnnnnnnnnnnnnnnnnnnnnnnnnnnnnnnnnnnnnnnnnnnnnnnnnnnnnnnnnnnnnnnnnnnnnnnnnnnnnnnnnnnnnnnnnnnnnnnnnnnnnnnnnnnnnnnnacccaggctggagggcagtggtgcgaccatagctcactgtaaccaccaactcttgggctcaagtgatgctcccgcctcagcctgtccagtagccgggactataagtgtgcaccaccacacccggctaattaaaaaaaatttttttttttttttaattgatcattcttgggtgtttctcgcagagggggatttggcagggtcataggacaatagtggagggaaggtcagcagataaacaagtgaacaaaggtctctggttttcctaggcagagtgtttgtgtccctgggtacttgagattagggagtggtgatgactctcaacgagcatgctgccttcaagcatctgttcaacaaagcacatcttgcaccgcccttaatccatccaaccctgagtggacacagcacatgtttcagagagcacagggttgggggtaaggtcatagatcaacaggatcccaaggcataagaatttttcttagtacagaacaaaatgaaaagtctcccatgtctacttctttctacacagacacagcaaccatccgatttctcaatctttccccgcccctttcccccctttctattccacaaaaccgccattgtcatcatggcccgttctcaatgagctgttgggtacacctcccagacggggtggtggccgggcagaggggctcctcacttcccagtaggggcggccgggcagaggcgcccctcacctcccggacggggcggctggccgggcagggggctgacccccccacctccctcccggacggggtggctgccgggcggagacgctcctcacatcccagatggggcggcggggcagagacgctccccacatctcagacgatgggcggccgggcagagatgctcctcactgcctagatgggatggcggccaggaagaggcgctcctcactttccagactgggcagccaggcagaggggctcctcacatcccagacgatgggcggccaggcagagacactcctcactttccagactgggcagccaggcagaggggctcctcacatcccagacgatgggtggccaggcagagacgctcctcacttcccagacggggtggcggccgggcagaggctgcaatctcggcactttgggaggccaaggcaggcggctgggaggtggaagttgtagcgagccgagatcacgccactgcaccccagcctgggcaccattgagcactgagtgaacgagactccgtctgcaatcccggcacctcgggaggccgaggctggcggatcactcgcggttaggagctggagaccagcccggccaacacagcgaaaccccgtctccaccaaaaaaatacgaaaaccagtcaggcgtggcggcgcctcctgcaatcgcaggcactcggcaggctgaggcaggagaatcaggcagggaggttgcagtgagccgagatggcagcagtacagtccagctttggctcggcatcagagggagaccgtggggagagggagagggagagggagctggagcttaaaaaaattttttcatagagatggggtcttgctatgttgctcaggctgatctcgaactcctggcctcaagtgatcctcccaccttggcctcccaaagtgctgaggttacaggcatgtgctaccattcccagcctccctgaggtttattgctgaagagggtgtctaggacgctgctttttatagacaaagaacagtaaaacaacaaaacaaaaattactatatcaataagctgcattatattcttgccttggaggcaccttaacgggatgccctgttgctacatcaacatgatggtaaatgcttcttacaaaacctgtagcttccttcgcatgcatcctgtaactcctgctgacttactgaatttgtgagtcagcataatggtcaagaagtacctttttgactggcaaggtctagctttcctttctgttcatcgtcactaaaattcaagagcctgtgtgttctgagggatcctgggtaccgggctgagtcctaagatggtgcttgggacttggcattacatcagaagttgccatgatcagtggagcaaaggagggggtattagtactggtcaggccagtgcaggtttgtaagcaacaggtaaaagacagccttttaaagcaccaaactttsttttttgagacagggtctcactgtcacccaggctggagtgcaatggtgcaatcacgtctcattgaagcctygaactcctgggctcaagcaatcctgtctcagcctcctgagtagctgggactagggrcatgtgctactgcgcccagctaatttttaaaaatatttttgcacaaacggggtctctctatgttgcccaagctggtctcgaattcctggcctcaagcaatgcccccttggcctcccaaagtgctgggattacaggtgtaagccagggtacctggccttttttttttttttttttttttgcctcttaaaaacagtggaatgagacaaactgccagcttgtctttgctcaggatttagacaccatgggaaattgagtctgaagaaaggttgatgtggcactcaaatacggatagaaagactttcatctcagtagcgagttacgcckgctgctggtgttctagcttaaggaagctgggtgggtgatgtcctagagaaatccctgccttatccctgggtagcccctacagtttatttactggggatgcattctgtgttagggtttgagtcagtgggggatacaggctgtgcgggctgctgcctgtctgtctgtgcattgcacaccatcagagaggttagtaacttaatctatccgggagagcaggagtaggaacccgggggtgccagcctctcactgtccaggtgggggattcaccatccatctggctgctgctttccataactggctccttgtgtcactgtatcccacggctgagtgttcaccagccagccttcagttttcttttggcttcctgtgtatgtttgcctgcagggaacgggccccagtaggcagtctccgttgtacactaatggtactgcgggcttgtagacagccagggcttagcccaaaggcactactcagccacattgaccctgtatcccccaagtagcctctgtctcacgggtacccagtgcatgtacctggtgcatgtgcccagtgagcgagcgtgtcatgaacgtagcaaccttgcagaattgaagttccgtgcctgggacttggtgactttctgggaggacttacccacgtggccatggttgtaaccatgacaacactttgagctcgagtcccccagattcaattcgggtgtttagtctgttacccagggtctttacacagttgttccttcccctgtaaccyggtgacatctgtgttcccccaggcatgtttcagttgacctctaaagtccacatctaaacacatttaagtttcacaactttcaaaaactttaggtgtgtgaaaaagaagttaaaatattgaacatttacataaaatgaaatgagacacaaatactctttggaaaatcttgtgttaaactcaataattttttttttgtttttttgagacagagttttgctctgtttcccaggctggagtgcattggtacaatctcggctcactgcaacctctgcctcccaggttcaagcgattctcctacctcagcagatgggattacaggtgcctgctaccacgcctggctaatttttgtatttttagtatagacggggttttgccatgttgaccaggctggtttcgaactcctgacctcaggtggtctgccctcctctgctgcccaaagtgctgggagaccatgcccagccaatacttaccttttctttttttttttttttttttgagacggtgtctcactctgtcacccagactggagtgcagtggcgtgaccttggctcactgcaagctgcgcctcccaggttcacgccattctcctggcttagcctcctgagtagctgggactacaggcgcctgccatcacgcctggctaatgttttgtatttttaatagagatggggtttcgctgtggtctcgatttcctgacctcgtgatccgcccgccttggcctcccagagggctgggattacaggcctgagccaccgcgcccggtgcgcccctctcttgttctgcagtcaaatgctctacccctgagctatatccccagttatagcgcccctctctttgaatcttactatgcgacagagcagtgcatagggagaatggctctgctttgccaagaagggactggcagtttatttgggtttgaaatccagtctgaccttttgccctgtgtatttactctgctgtctttattgttattgttattttccctccctaaatgtctactgccagaggacatttgttcctatgattagtgggtagacataatcccctgttggataaatcaatcagcctctgcttccttggcgtggttccgacagaaatattctgcgtatgtgcacagctgagagtatgtgtgtgcgtctgtctctgcatatctgggtgctcttaggagcagcggtgcrgtggggacacctggtaagaccaggagggacccttggcctaggggaagggtcagtggatgggtattgtttccaaggagttgctgctactttcctgatatggcagctacagctgccagaatgaccctgggcacggtggggtgtgcctcactggctttcggggaggccaccatctctccgtgtgcccctggggacacaagaaagcccctgggtgcttggtgctttgtgcttgtttgttccactcatgtgctcaggatgcccggctcmccctgggcagtgaaaagcatctgttttcgaggaactgtttgttctaggtcactggacatcaagagcatggcagcccagggcttttagcgtctcctcatctgctgatagcctgtctgtctccttactctgcctgctgagaaggccactaatggtctccaaatagcatggaggggacaaaggcccggcatgccatgcctgcttccctgcccccacctccaggcctagcggcagatcctggacattgacttcagtttggagccctgctgggggctccggcttacagaggggcttctttcctgagctgcggcccgtctgaggggtggtggctcccrcagcataagcctgctcagctcggacatcagggcctctgtccagtctgacatctgcctggttctgtgtgcggctttcagaggttttcctgcaggccatgtgggctgtgtctgggaatgatgaggacagccaggctaaccacgtggcagtgagtgctgggccgtgccgcccaggcgggagctggcgggtatcatctggccctggagcttgcatgtcggcaggatgcgggagttgcctgagactcccagggccaggcgacagccggggagatactgggccctcggctcccagaacagggggcttctggctgctttctgaaaaacccagcaaaaccccccttcctgctgttttgtcttactgagatgccaagaccgtcatgtagcagcggaagccaggagggagctggcaggcaagagcatctccaggtttcctggagacagtggtggagccggcccctggctgaggcttcgtgaccggcccttccctcggcagggccccagcattcatccgagcctggcaccagaagagggggtcagacagggcgtgagaggctcgggtggaggatttacctgtccactggggtaattttagcattctgcctccctgacctactttcatttgataaactcttttcttctaattattttttaatttatttgtttgtagaggcagggycttgctatgttgcccaggctggtctcaaactcatggtctcaagtgatcctcttgcctcggcctcccaaagggctgggatcacaggcatgaaccaccgcgcctggctgtaaactcctacttttaaaaattgcctttttaaagattttttttagaaactctgcccatacctctgtgtggaggtttggatattgatggtgggcctctctgtctcttgacccctgggccccagcccctgcccctctgtccccatgttgtattggaatccaccctcttgactcttagccccactctccctcgggagaggaatcctttcctcccacccgcaggagcatttccactttcactgtggtgtcagtcactggttccctgctaggtttagcgccctgggtatcagctcaggaatttggggttgggactgtctttgccaagtagaacctaaaggcaggactgagggacagggtgtggctggggggctgtggccactagggttgcctggtcccactgtggtacaatgccaggggcttcaggatggggagatgaaatgaaaatttcgatgaatgctgggtgtggtagctatgcctgtaatcccagcactctgggaggattgtttgagaccaggacttygagaccagcctgggcaacacagcgagaccccatctctacaaagataaaaaattagccagggatggtggtgtacacacttgtagtcccagctattggggaggctaaggccggaggattgtttaagtctagaggtttgaggctgcagtaatcatggtggccaccgygctcccgcctgggcaacagagtgagaccctgtctcaaaaacatttttggtgaaattctkcagtgttattgttgggtgtggcctctgctcctcttctccggtcacttggttgatgacacacccttcttgcttgtttttccagcctgtgggccaaagctgaccaactcccccaccgtcatcgtcatggtgggcctccccgcccggggcaagacctacatctccaagaagctgactcgctacctcaactggattggcgtccccacaaaaggtgagactgggtctcraggccggacccctgctbgtgcaaaaacttgaccttccatctcagttgctggtttcacaggcaggaccacccctgggcgcctctgtccccyggtcggggagtctgatcctgmctcccatgcagctgggtccccttcacactgtgtctacaccctttttcttctgttggggttttctcctcactggccattctctttcccactccyctaagtcctgccccgactcagatttcacctccttcaaagccatctccagccacctcagtcctttacattcctgtcgcactcagtcctagctaacattcctctgctgatagccctaagcactgcctaccgtagatcaagggtcttcaacccccaggctgtggactgctatgttgggtggcctgttaggaacctggctgcaggaggtgagtggcagtgagtgcgcattcctgcctgagctccgcctccagtctgatcagtggtggcattagattcccatgggagtgaaccctattgtgaactgggcatgtgatggatctaggttgtgtgctccttatgataatctaatgcctgatgatctgaggtggaacagtttcatcccaaagccgtacacccacaacctccctgtccgtggcaaaattgtcttccacgaaagtggtccctggtgccaaaaaggatggggactgctgttgtggatgacacatttaagaatctctgcttggtcttcccaactagatggggaacatcttgtggataggcactgggtattttttttttttcaattaattttattttagattcgggtacatgtgcatgtttgttacctgagtatattgcatattgattggggattgggcttctagtgaacctgttacccagayagtgaacattgtacccaactggttattttttaacccttgctcatctcccaccctcccctcttttgaaaggatggtttttatgtttaccatccccgctgtgcccagctcagtgcccaggaaccatgggacacatgtctccggccctggccctggcggctgcaccagcagaagggttgacctagatctggcggtgggcatgaggccccactcgctttctgataccattggtggaaatgtgttgtccctatttttgctagacttggggcctccccccacccatcctcacagtctcagtctctggtttaggatattgtgggactgagattgtagacttggctggaggggacagtgtcgcagagcatgcggcaggggcattgcagctggactggggaagccgggcagcctgtgccctgctgtcctcaggagttgagggtagcgtaggactgggcgccggcattgcttccacaccatctcattcaagtcggtgtggttggcctggtggctcttcctttggtcgatcctatggtcccggtgtgagctggccccttcctcctgctcgatcatccagactgttctctttccygtccacagtgttcaacgtcggggagtatcgccgggaggctgtgaagcagtacagctcctacaacttcttccgccccgacaatgaggaagccatgaaagtccrgaagtaaggctgggccgcgggcgtagggctgggctgtgggaataaggctgggcygcgggcataaggctgggctgcaggagtaaggctgggccgcgggcgtagggctgggctgtgggaataaggctgggctgcggggctgcgggtgtaaggctgggctgcgggcttgggcttgctttgttctgagccaggctctgtaggaggcagagaaagccggcctgcgggtgggtcctgctggtggcttcagggctgtgcagtgtgggaacaaggttgctgctctcatctgtyccctgagggtctcgctgagctgaccctcactgggacagagccgcagaagcaccctcactgagaattagcaagtcctgttcatcgggagtgtctgtttatgtttggaaaggatttcttgttaagtgcgagttgattgtgaaaccctagtgcaagggtgttcrgccccggctgtatgctggagtctcctgggggatgctaaaatccctgatgccaggccccaccccagaccagttagtgcaactctgtgggtggctctgggcagccatttcttagcagctccccaggagtggttcccgcgtgcagcccggkkygagcaccgcctcccgagggttcctgaggccacccgtgtggggccccaggttggaagcctctgggcctgaggggtgctggccagcctgcccagcgctaagcagtgtagaatggaaccaccagttactctgcttgtcggggygyrtcgggarttgcttgggctgccccrgcggatgcaccrgygctgacattcgggcaatgtcttgtgcattccaggcaatgtgccttagctgccttgagagatgtcaaaagctacctggcgaaagaagggggacaaattgcggtaagtccaggcaatgtagccggctcggtgtccagtcccacccatgagggtgtcctcaccggcctgggktgtaccgagacctgtgcctctgsccctgagggtggaggaaagcaggtggccagggcagcccaatggctcaggaaggmggatgtggggyggactcagggacccaccccctctgtggccagtcccacacctccagggcgggcaggactcgagttacccacaggaccactggcccttccttgtacactgtcccattgcacattactgttttgsttgtttgcttttggggtatttcccccacgctaccacccctgagtgctgttggtagttgcgggaggcctgcctcctaagcactccctggagaggactgtgggcaggcacaagctcccctgaagcacttttggggcttattcctggagatgatgggtctggcatctttgctgttctggtaaacgttgttaaactcaaacttagagttttcttcctggccctttgctctccatatcaggttttcgatgccaccaatactactagagagaggagacacatgatccttcattttgccaaagaaaatgactttaaggtgagctgagcgtcttgtgttgtgctagagggctcgggagagaggmaaaggcytcaggaagcggcctgagtcctgcttggtccttcccctcctgctgccatgttccttagtcctgctcggtccctcccctcctgctgcccacgttttgtggccttaaatttgggcctttgtgtggtagggctcttgggggccrtggggcrttccagaggctgcagtgaggaggtgggctttcctgtgtttgggagttggtgggtggcgtgcttccgccttgtccgggtgatgacatcgcagtgatggcaaggttgatccttcgtggtgtttgttttctaacatccccacctcacttccaccaggcrtttttcatcgagtcggtgtgcgacgaccctacagttgtggcctccaatatcatggtaagacagccgggagccccgtgcttctgcggcagcgtagaccacaagggcatttgcagtctgaggaagtgggggaccgggtccrgctcggaagcgcagctgagcccttaggatgagcagcccccagctgrctgttgatygggaggtcagacctacagagcggtttttaacccagaggcctgtcctgtgagrgactagctccatccagggcagtgggcaggcttggatgggacgtaggaaataattcagggagataggattagtttctgttggtggcaggagcctgacagctagtggtgatggagctgctggggcagagggcmgctcactgcccctaatgggacaggtggcagcaagtggatcacttgctgtgacagctccaggaggtaagaatgcttgggcattggcaaaagtccatagggctcagcagcctcctgagtttgggaggtaagactctcctcctgctgmtgcatctcgtgaacctgccacaaaccctcctgtctgtrctgtgcaggggagcttgcccagataaattgagggcacttggcatcataacttgatgaatttctccagtgttaccacttgatagcaatatatataaacaggaatggttactatggagacttactacaagctgccaccctgtgttggagataatttcctcttcagcttaaacatatcagaatatgacaattctataaagaaaagcagttctgaaaacttaacactgggacgctgtggtgctggcatctttgcacctttagaggggatgctaagcatgtgttagccccgktatcttccccaaggtggtggaagtatttctagatatctttaggaaatgaattcctgtttcaggaagggctatttgaattgtgaaaagtcagtttagatttgtccagtgggagcaggaggctcagagtatgagggtttgccacctttctttggctgggcactcsttgttccccttggtagacagcagggtgcagctgtgaagtcatttttcccagtgagtggtcaccaatgtgcttagcaaggagtttagcatttgtctggttgtccactagcagatagtcatttgccccaacccaccatgttcagaaatctctttctgatgaaatctcaaagcagcttggtagagccaggcatttgtgaacttagatttttttttttwaattgtggyaaaatatacataatgtaaaatttaccatcttaatcatttttattatttatttatttatttatttatttatttattgaaacggactctccttctgttgcccaggctggaatgcagtgacacggtcttggctcactgcaacctctgcctcccaggttcaagcgattctcctgcctcagcctcccgaatagctgggattacaggtgtgcgccaccaygcccagctaattttttttgtatttttagaggagacgggggtttcactgtgttggccaggctggtctcaaactcctgacctcaagtgatctgcttgccttggcctcccaaagtgctgggattacaggcgtgagccactgcatccggccattttagctattttttaagtgkgcagtacagcagcaaattatattcccattgttgggcaaccgccacactctatccgcaggactttctcatcttccccggctgaaactgtgccaggacacaggcacagctcccgactgactcgatctttgaagagtggctgcctctcagtgacggcagtggttgatgagaaaaagagcccaggcattcagaaatgctgagtttccctaaaatccacctggtttctggggcctgtgccactgtgggtgttggtagacctgtgttgttgcctaggagagcgagccctgcaaaggagccggcacagccctagttggagaagcagttaaccacggactggtcacactggggctgcctcaggcagtggggggtggaggagaaaccacacaaggccagaggcatctctgggaactcctgagcataccttagaaccagcagcctcctcccggcacggggagcattgcggatcctcacgtggagctcggttgagttcagcgccaggctgtctggcggtgactcgggcacgggacagatcctgacttgctggagcattcagaggtgttcattatggaatccctgtgggtttcctgtctctgtccttccggcttcagttctccatctccccagggaatcctccccatgtaacatcaggctgtgactcagcccccagcatctttctccctttctcttacacgctgggccggataatctttatactgagccttctgtgcgctccccttttgaaagccccaaatcctgcttaatctcagcagaaagccttccagcgtgatttatcagccacccctttgtggtgttgcaggaagttaaaatctccagcccggattacaaagactgcaactcggcagaagccatggacgacttcatgaagaggatcagttgctatgaagccagctaccagcccctcgaccccgacaaatgcgacaggtgattcccgtggctggccgtctctgcaagacccacatgagggttctyactgaattcttgatgttcccacaaaggatttgctcctggatacctttaaaaaaatttttttaagacagttttttttgtagagatgaggtctcgctatgttgcccgggctggtcttgagctcctggcctcaggtgatccacatacagccgctggatacctttatcaactctctttgaaaatatcttttaaaaacaatccttgatgacaaatcatattcagtgggaatattttgaacactgtgtagaagyacaggaagtcaacatagagttgagcctgattttgctactgtccctccgatagttcctttcttttttctttcctttctttccatttatttatttatttatttacttacttacttgcttgcctgcttgcttagagacagggtctccctttgtctcccaggctrgagtgcagtggcatgatcatagctcactgcaggttcaaacttctgggctcaagtaatcctaccgcctcagcctcatgagtarctgggactacaggtgtgggtgtccacgcccagctaattttttttttctttagtagagatgaggtcttgctatgttgcccaggctggtcttgaacttctagactcaagcaatcctcttgcctcggcctcccaaagtgctgggattacaggcatgagccactgcacaggcccctttctttttttctccattttctttcttttttctcccccttttctgggaggcaggccagcctcacagccagacaccagctgtgggagttgtctyacgcatatrctctgccccttagaaggattcagtctgtgccctggaggggcctacggtcccgccttgctgttctctggggatcacatcttcggagacgggccaggtgcatcctgctgtgggtggtggcctgagctgtggttctcggtggggtctctctgcagggacttgtcgctgatcaaggtgattgacgtgggccggaggttcctggtgaaccgggtgcaggaccacatccagagccgcatygtgtactacctgatgaacatccacgtgcagccgcgtaccatctacctgtgccggcacggcgagaacgagcacaacctccagggccgcatcrggggcgactcaggcctgtccagccggggcaagaaggtgcggggtgtgctgcygcatgggccgttctggctgtagggcggttgcagggtctatagggtgggtggggagctgtgtgctgctgctgctgctgctgctgctgbttggtgtgcttgctgtgtgtgttatctgtgtgtgcgcctgcacgtctctatgcatatctgtgtgcatctcdggctctgtgtgtgtgtgtgkctacgcctatccatgtggctttgtgtgtgtgtgtctttgtgttactttgtatgtgtttgtatgtgtgtctctggtgtgtgtatctctgtgcatgtgtgtgatgtgtgsgcggttgtgcactaggaagggaaggggcaggaagagctgagcctggtctctgggtagggtgtgtgcggctgtggctgtcccagtggcctggggcccccacggtgtaaccaggtagtgcacagccctacgtgggctgcctgctccagccctggctcttggaggagctgcgggcatctggaatcagtggtccccctccaccacctctcagtttgccagtgctctgagcaagttcgtggaggagcagaacctgaaggacytgcgcgtgtggaccagccagctgaagagcaccatccagacggccgaggcgctgcggctgccctacgagcagtggaaggcgctcaatgagatcgacgcggtgagtcctgggaggcgggcaggcagcctcaccctcgggcatggggcggcttcccaagaggccctagacacccctgtggtttgttcccctgagtgaccactgggtccccgcagggcgtctgtgaggagctgacctacgaggagatcagggacacctaccctgaggagtatgcgctgcgggagcaggacaagtactattaccgctaccccaccggggaggtgagcgcaggctggggcgggctgacggtccccagcacacatgaccactgctgtgcagggctgggccacccctccagggagttcacttccgtgtgggttctgggggctcctacaccctccaccttggaactgagtccccccaaactgaaccttctaacagcctggggtgaagtgcattttcccataagcagaagtgagatgtgyttccctagggacatagaactatatgggagaggaggaaggtggtgtgtgaaggtccactgggcagggtggtgggcaggctggcaggaggggtggctctatatcccctgggcagcgtctgtgcttccccgtgcacggtgcccgggtggctgtggctgaggacgctgttgcctcctctgccgatgggatcctcctgggccyggtgtgtcctccctgcccgtgccctgctgagcagtgtcgtgcctcaggcccctgcaggcccactgtcctctggcctcagactgagccttacacaccggggccctggttagcacagcagagagcccacaggagcaggagcttttctggtctttttctaaagtcacagccctcctgcttctttttacatttttaaattgatagaaaatacacataacctaaaattgaccactttcatcacgttaaagttatgatttagtgcatgttagtgtactcacagtgctgtgcagccatcaccacaaattccaggcctttccctcactgcacaaagaaacccagacctgttaggagccgctcccgcctgcccggcccagccccggcaccggcccgtctgcttcctgcatctggatctgcctattctgggcattccatgtcagtggagtcagatgccacacgtgccttttgcgcccagttctttcacacagcattgagttttccaggttcccccgtgtgggagcggagtggggagggcttcactctttttgtggctgagcaatagtccacgttaaaccctgctccttctcaaccactgctgatgatggatgattgattttgcgtggctctctggccggtctgatgcagtctgtggccagcggcagagcccctcccgagtgccctgagctcacgtgggcccggccctctgtgctcagtcctaccaggacctggtccagcgcttggagccagtgatcatggagctggagcggcaggagaatgtrctggtcatctgccaccaggccgtcctgcgctgcctgcttgcctacttcctggataagagtgcaggtacctcgggcaggtcgtggccccgggatggagggaggaggggactggcactcggcrgggggtcagccgcagacctgccrtggcctgccctgtgttggctgctgtgccatggggtgttaggagaagggcacaggtgtcggctcccggctgcttcaggtcctctctgtccagcgcttccttgaagcccttgggaaatgctgtggagcccaggttgatgccggggacttcattgcttcataaacagctccctgagacccgcccctggctccacacatcccagggtcttggcttggggtgggggctgcacttctcttcagtgccctctaaggaacaaacagcccggaaaactctgacaatcccattgaaatgttaagtcttagcatgtccagtccagtgcagctgaatccctagacagacctaaattgtttgggagtgactttttcccaactctaagtcaccgtgagggcgagtcttttggtttggtttgatggcactctttgggctaaagtcttcttctggggccagctgctgcccgggacagcttgtggctggggacagatgcccctgcccgacagggcttccgagggtccttgttggggggaccgtaaaggtctttccatgcctcccccaccctcatgtctcatttcttttttttgagacaaagttttgctcttcttgcgcaggctgcartgcaatgcatgcrctcactgcaacctccacctcccaggttcaagcgattctcctgcctcagcctcctgagtagctgggattatacgcatgtgctaccacaccctggctaattttgtatttttagtagagatggggttttgccatgttggtcaggctggtcttgaactcctgacctcaggtgatccacctgcctcggcctcccaaagtgctgggattacaggcgtgagccaccacgcctggccgtgtctcatttctaactgtgggtgtayaatttcaatttcagaggagatgccctacctgaaatgccctcttcacaccgtcctgaaactgacgcctgtcgcttatggtgagtagcaacccctgccaagccctgtccccctgaaggtggccacagtagcttcttgtggccgtgggctgtaagcggtgctgtccctttaacagcagcttcctctgcccccatcccacgccctccaggctgccgtgtggaatcyatctacctgaacgtggagtccgtctgcacacaccgggagaggtcagaggtgagtggaggccccaagcctcatcctggccatcatcacacgatagccctagtgggtgatgggcgctcaggaggccccggggccgcttgcctgcaggtgctggcctgtctggggccatgggcctgctggctgccttcctcagcacctctttgttcctgcctgtctgttctgtggcttctggggccttctcattttctttcttyctgtgtcctsttcctcccatttctgctgagctcgagatatgaatattagtgaggaagatacattctctctttttttttatttgagacagggtctcagtctgttccccaggctggagtgcgktggcgcagtcacggctcactgcagcctcaacctcctgggttcaagtgatcytcccgcctcagcctcccgcgyagctgagactacaggtgcgcaccaccatgcccagctaattttaatttattcatttttttagataatggggtctcactgtgttgcccaggctggtcttggaactcctgggctcaagtgatcctcctgccttagtctcccaaagtgctaggataaaggtgtgagccgttgtgcccagcgtctcttctctttaacatcagcatggcacagttcttgttgcctttcctttctggcagctaaaaccagtgctttcagtttccagagttactgtttcaaacaggatcagcaggtcagcgccgccatgtgcytgtgattaggctcagaaccaccaagaacacggtgttgagagacgggaggcgtggagagcagaggcctggggggtggcggktggggaggcgcttcaggagacctcgaggcctggccgtgcagctgctgtctaccttggggggaggcctgacatttggaggtgggccaggctgcctctgactgagtagagtgggcctctgctcaggtggacgcgtgttgtgaaagtgagtttgaattcaccgtgtacaggctgccaaaagtacaacactgtgctagtactagtcagacctttctcttagamcgagcgtgactttctgtcatggcgttcccgaaacaggtgactgtctagtcccaggaagcttggccttcggattttggcatgaagggatgaggtgtccgccccagtcgctggcagttgcctggctggtgggctgacctgagagaggctggggtyycttggccgccttggtccctgtcaccccctccacttcggaatgtgggtcaccggatgctgtcctgcctttagccatatgacaacagccctggtcagggagccactgcccccgctatgggattgggcctgagccggtcctggagctcttccctgcagggaatgggggcagggccatgatggagacagatcccggttctgaggctggaggcccacaccccatcacgctgtccctctcatgggagggctgtgtctggtcctggccgcagaacctgcttcctgctgcacattttctgcgcctttggtctccaggcttgttttgcagcctccgtgccccatcctaagccagggtgccctttgtgtagtagagatggctcttcagatcctgcctcgggtcagcggaagggagtcagcacagttgccttcccctccccagcctgtgagcctcaggcccagcctctccctcctagatgcccctcctcagctctcaagagaggctggaagcaaagctcttttctccgacctcacgctctgctgtgatcatcattctttccctccttgctttgcaagcaccgtgtttgtctgtgtggggaatcctttggtaccatccgaggaagggggcatgggagggaattgcccccattcttgctgcctggcagtcaccgcacactcagcagcccatggtccctggcccgtggtcccggccactcccctcggtcagtctttttgcctctctaaaatccaggagcagagaaacttttttggggctaattttcctccccttctttgtaactgtcgcctttctctcttttgtctttgtcttgcttaggatgcaaagaagggacctaacccgctcatgagacgcaatagtgtcaccccrctagccagccccgaacccaccaaaaagcctcgcatcaacagctttgaggagcatgtggcctccacctcggccgccctgcccagctgcctgmccccggaggtgcccacgcagctgcctggacaagtcagtgcactcccctttccttcctgcctgggggacgcatgccgggcgtgatgccacagatctgggattgcgtgcgtgtgtgtttgcaagaatrcgtgcgtgggtgcgtgtgggtgcgcgtgcgtatgttgtaggtgtctgtgcacgtgtgttgtgggggcatgtgcacacactcacgtgttgagggagaacataggaagcaccctccgaagttaagatcctgggggctttccttgctggtgacaaccgtgactgcgttcgcctcctttctgaggatggggtctttacagggcagaagcaggcagtgcagaaggaagagtgagatgtccaagacccgttcacgttcgtgaatggttatttctaaaacaaagaaagtggctactttctcacataaataacatggttatcccagcaggtagtaaaaaacctaacaaacaaggccaggcgcggtggctcacgcctgtaatcmcagcgctttgggaggccgaggtgggcggatcacctgaggacaagagttccagaccagcctggccaacatggcgaaaccctgtctttactaaaaatacagaaattagccaggtgtggaggcgggcgcctgtaatcccagcttctcaggaggctgaggcaggagaattgcttgaacccaggaggcggaggttgcagtgagccgagatggtgccactgcactccagcctgggtgacagagggagactccgtctcaaaaaaaaaaagcaaaaaaccccaacccgatttcacttatttcattaattttgaaggttacaggcctggaagattttggttgtcagacattaagatttgttttcagaaaactgtttgttttcagaaaactggtcttttcctttacagcctggaacccttgcaaatatgtgagatgtaggaatttctgtgcttaaattcaggtaccacccaagggtctgccctacctccaccctccaggcctgcccccacaaatcagcccagtgcagcttccggtcaggtttgttgatgagccggatgctggtgctggctctgagcatccttttcagcctgccacctcttcccgccttttccgagacttccttagacctcatgatgtctggaatgtgacctgggagatgctgcagcctccacaggtcacttaacctctccaggcctcagttttttcatccaggcaatgggggaataatggcagtgcagaagtcagatcagatgaggggattcatgccctgcatcaggcccagtgtcgggcatgtggtggggacgcgtagacacggtgaggtggctgtgattagcggaagcctggaggcctggctttggtggtagctccacactaacatgagtgcagcaatttaattgcccaggttccttcccctcccaggccctcagtctccttagctttgcacatgataggagcaggactgggagagctctcatacatattcccttgcaggtctcagatctgagggtttttatgaaaagccagcagaactgaaatggtgtccctgtggcatccgttctgatggaaaygtgcagttgtatttggaagttcagaggccgctgctttgatgcttggggggaccaggctggggaagggggttgatatcctgagctgcacagacctccgtcgtggaggacgcagtggcaggggctgcatcctcctgtccgcttcagagctgcccctggcgttgggaggacagtccttcagggtggccaggttcttagggacgtctgaagctgctggctgggccggcgtggggtttttcagggcttcgtccctgcagattgcgccctgcctcctgactgacttctctctctgcttctcctccgcagcctttgctagggcaagcctgtctgtaagtatctctccgatcatcgctgctgcttgcactgctttcttcctgcttgctcatttggcctcctgcctgttaaaatattgaggatgagagcagttttgtgatgtgaggtcttccgtgggggaaggaggagatgggcgtaggagtagggaggagagattcctgaatgtttttggaaaagcgtgcaggcggtcatggtggctgcactactgttgggtgtgttccgacaccgccgcacgaccgctggcttctcccctaccctctcagggctgcaggtcgtggtktgtaatggccgtggtttagggctcggcataaatccacatttccttrtcagaatcagatcttggtggcgagctgcatctgtgccaggtgccattagccttaaagccccctcctgccccaggagtgtcctttgttttggaaggaaaacttactcagagcctaatctgtaaaccaaacctatggggaatagtgggagtgtggtggggcctgagctctgagcctctccctccccatgaggaccccccacaccccaaaagagctccaagtggagacccttggggatccgtttgtcctgggttggagcctgctcagcgtcatagtcacgcccggggctgggtgcagcctccatctctaacccatgtggtcacttctgctcctcccagagctctctgcagagtttcaggttcagccttagctctggcagccactgggtagctggggctgtgttcccactgctctgggatcccttccccaccaggagcagaggccttcctgccacagaactttaatgacagccacatgaagtgtcatccccttgcccccccaaaaacacacccgcccctttatttcctgtttgctccttaagttaccttaactactttatgcagaaactggaaaggtgtgatgaggaatgcagcctgagatgctgaaaagaatgactggctttggaaatgggagaggtttggcatggcgctcagattttggtggcaaaggggtgaagggccagaggatgtaccagtgtcctccatgtccacgttccttaagaccaccctgggaggtcggcagggcagtcagtcccccgtttaatggttgaggggctgagtgaccggcccgtgcttccagcaggtgagccgcagagccggggcctgaaaggccccttgcttcagaaagccggccgcctcctctctgcggcttctgggagtgggctgggtgcccgttccctgctgctgtcctgaggcccctgccctgtgacccgcaaggcatgggcagctgttggaccctcgtgtacccccacagccacccccttgcagctgcttcccacagccaggctttgcttacctaaggtgggcctgcccttaacttccagcttctyggggcgcaccctccatcctcagggccagtgtctgtgatgcgcggggccagcgtgcagtgcttcaggatctgggcttctccttgtgtgaaactttttggacttggagcctgaaggttttacatctgtgcatgtcctgatcctttagaccagcagtccccgacctttttggtaccagggacccgtttcgtggaagagaattttccccaccatggcagggtaggggatggtttggggataaaactgttctgcctcagatcgtctggcattagattctctgaagggaacgcacagcctagatccctcgtgtgtgctcctccgagtcaggtggtaatgttggcccacccaccacccacctcctgctgtgtggcccgcctctcagtgggctatggactgggtactggtccacagcccaggggttagggacccctgcgttagacacgtggcctcatgttgccaggaaagaaatctttctactgggaggagccattcggggatagtcccccacccgctaaagctgatcttacctatctccaagatgaacataatagtgcgtttgctagaatccctcctgttcagcaaaaatacatccgatggacccatcacacctgactcaggttggaatttcactctggagtcccattgtcccgtccatcctgggtgcgtgaccccacatctaggattgtagccacatctgattctaggagtccacctgggctctgtgaccagaatttatgatgaaagtcagaccaagccaggcctgcatcttggttctactcctcctggcctctatccttggcactctgggcaagttaaagcaattctaggacctcagcttcctcatctgtaatatggagataataacttcataaagttgtcataatgagactatagatacagcacttagcacaatatctggcccctaggaagtgcgtgggggatgacggctgctgttgttatcagggaggawcttggtgccctgggcctgtggagacttctgggcttgctggcattgggtcagcctttggataccctcctgtaacctgagggatttcttctctggggcagcaggaacacccagacttggggaggggaaatccctggggtctcaaggccatggcctgaagtctttttttttttttgagatggaattctgctcttgttgcccaggctggagtgcagtggcgcgatcttggctcactgcaacctccttctcccgggttcaagcgattctcctgcctcaacctcccgagtagctgggattacaggcgcccgccaccatgcccggctaatgtttgtatttttagtagagatggggtttcaccatgttggccaggctcgtctcaaactcctgacctcaggtgatccacccgccttggcctcccaaagtgctgggattacagatgtgagccaccacgcccagcctagagtcttcacccctgtgatcttggtttcccagtaagatggggacgaacaactgtccggacctggtgctctggggtgccttcctgggggctgtgccggctgcttgggatcgagagatcacctggcatttgtgatgcaaccttcatttttaaaatttcaaatgcacactagaaaatcctactaaagattttcttttttttttttccttttccaacctgtttcttcctctcccccactctgcttgaaagacgaactgtctgtcacattttctcaaagttttctccttactaactgtggaaggtaaatgcctgggtgcatgtccctctgtcccgcaccgcgtcacggcatctgggtctgtgtgcagactggccatcgtgcaatgcggggctcatctgtctccatgccgaggttgttaagtgcaacaccattgtcgtgaggtcctttctagtctgtctctcaccccccacgtgtcctgagctggggcccctgggtgaaggacgtggacatcacccggtcttgcaggctctccactgttattgttgcatcgccatcacctgtgggtgccggaagctgtgggctggtggtgttgaggacaggttggagccagcagatgcggagggaaatgtcagccctgctctgtgatcccacagcccggctggggctctccctagatatgaggacccagggctctctgaagagaattgccccctcccagtgggcacccatcacttccatcatccttcggcgggcacccatcaacccccgcaggcagccgtcatcccctggcaggcacctatcacctcctggtgggcactcatcacctcccggtgggcacccatcacctcctggcgggcacccatcacctctcggcgggcacccatcacctcccggtgggcacccatcacctgggttcctgagtctggcccacgcctgggcgatagctctgatgctgcccagccccgtgactttcctccctgtggatggctccagccttggacccccagttctgtgtggggtgggcatgggccacggtggccctgtgtgcctgggctctctcccaccctctttagagcagtccaggtggagacactcaggactggagagaatagttttaaacattgtgtgttttcttgttttttgaggcgtaggtgaagcaggtcacggaaggaggcccgctgtgcagtggctgcagtcagttgtgttcctcgctgattttggagcatgtttttttgcggggggtgggtggcgggggggtttggtactggccagtgccttaggggtggaactccctgcgagggccactgtgatcagaagtggggcagggctttaacaacacccctctgcctggctccccacctgggcctccccaccacgtccagccattccatgtatcacctgtgttctgcctgtcaagctctgttcccagaatctggatgcaggagctgggagtgtggctctgttttgagctgagtcgagaggaggggccctgtgtgtccttggaggccccgggctcatcctctgcctggctgtggtttgtgggatttctatggggtcgtgagcatgaggctcctgtagttactggtgcccagcgccgcgcagctcacggtcctccaggagccacacggcccccaccaggcgggctccaggcctggtgcccagccccttctctgagactctggggttatcttgcgtcatgttctgaggcccacctgggctctctcccgcctgtgaggttggcagcacctttcttggatcatgttctttgtctgggatggagggagggaagaattctccgttgcatggctcgcgtcttctgctttagaattcagccagctacaaatcctaactccctccccacctctcttttctcctgaaaacagaacatgaaaggctcccggagcagcgctgactcytccaggaaacactgaggcagacgtgtcggttccattccatttccatttctgcagcttagcttgtgtcctgccctccrcccgaggcaaaacgtatcctgaggacttcttccggagagggtggggtggagcagcgggggagccttggccgaagagaaccatgcttggcaccgtctgtgtcccctcggccgctggacaccagaaagccacgtgggtccctggcgccctgcctttagccgtggggcccycacctccacyctctgggtttcctaggaatgtccagcctcggagaycttcacaaagccttgggagggtgatgagtgctggtcctgacargaggccgctggggacactgtgctgttttgtttcgtttctgtgatctcccggcacgtttggagctgggaagaccacactggtggcagaatcctaaaattaaaggaggcaggctcctagttgctgaaagttaaggaatgtgtaaaacctccacgtgactgtttggtgcatcttgacctgggaagacgcctcatgggaacgaacttggacaggtgttgggttgaggcctcttctgcaggaagtccctgagctgagacgcaagttggctgggtggtccgcaccctggctctcctgcaggtccacacaccttccaggcctgtggcctgcctccaaagatgtgcaagggcaggctggctgcacggggagagggaagtattttgcygaaatatgagaactggggcctcctgctcccagggagctccagggcccctctctcctcccacctggacttggggggaactgagaaacactttcctggagctgctggcttttgcacttttttgatggcagaagtgtgacctgagagtcccaccttctcttcaggaacgtagatgttggggtgtsttgccctggggggcttggaacctctgaaggtggggagcggaacacctggcatccttccccagcacttgcattacsgtccctgctcttcccaggtggggacagtggcccaagcaaggcctcacwcgcagccacttcttcaagagctgcctgcacactgtcttggagcatctgccttgtgcctggcactctgccggtgccttgggaaggtcggaagagtggactttgtcctggccttcccttcatggcgtctatgacacttttgtggtgatggaaagcatgggacctgtcgtctcagcctgttggtttctcctcattgcctcaaaccctggggtaggtgggacggggggtctcgtgcccagatgaaaccatttggaaactcggcagcagagtttgtccaaatgacccttttcaggatgtctcaaagcttgtgccaaaggtcacttttctttcctgccttctgctgtgagccctgagatcctcctcccagctcaagggacaggtcctgggtgagggtgggagatttagacacctgaaactgggcgtggagagaagagccgttgctgtttgttttttgggaagagcttttaaagaatgcatrtttttttcctggttggaattgagtaggaactgaggctgtgcttcaggtatggtacaatcaagtgggggattttcatgctgaaccattcaagccctccccgcccgttscacccactttggctggcgtctgctggagaggatgtctctgtccgcattcccgtgcagctccaggctcgcgcagttttctctctcyccctggatgttgagtctcatcagaatatgtgggtrgggggtggacgtgcacgggtgcatgattgtgcttaacttggttgtatttttcgatttgacatggaaggcctgttgctttgctctwgagaatagtttctcgtgtccccctcrcasgcctcattctttgaacmtcractctgawgtttgatacagatrggggcttgatagctgtggtcccctctcccctctgactacctaaaatcaatacctaaatacagaagccttggtctaacacgggacttttagtttgcgaagggcctagatagggagagaggtaacatgaatctggacagggagggagatactatagaaaggagaacactgcmtactttgcaagccagtgacctgccttttgaggggacattggacgggggccgggggcgggggttsggtttgagctacmgtcatgaacttttggcgtctactgattcctccaactctccaccccacaaaataacggggaccaatatttttaactttgcctatttgtttttgggtgagtttcccccctccttattctgtcctgagaccacgggcaaagctcttcattttgagagagaagaaaaactgtttggaaccacaccaatgatatttttctttgtaatacttgaaatttatttttttattattttgatagcagatgtgctatttatttatttaatatgtataaggagcctaaacaatagaaagctgtagagattgggtttcattgttaattggtttgggagcctcctatgtgtgacttatgacttctctgtgttctgtgtatttgtctgaattaatgacctgggatataaagctatgctagctttcaaacaggagatgcctttcagaaatttgtatattttgcagttgccagaccaataaaatacctggttgaaatacatggacgaagtaaacctctggtcttttcgtgggggaaagaagagtctttaattgatgtttacggcagatgcgccacggagctgccaactcaccacttcattatcttcctttcaacaggatgttcaagtacagagtgtctagtgcctgcatttggggagaatgagctgtctcaatttttcttctaattgataggcttcatgttttatttttatttttaatttaatttttttcttttttttctttttttttttttgagactgtttctcactctgtcgcccaggctggagtgcagtggcgcgatctcagctcactgcaacctcctcctaccaggttcaagcaattctcgtgccttagcctccctagtagctgggattacaggtgtgcaccaccatgcccagctaatttttgtatttttattagagacagcatttcaccatgttggccaggctgatcttgaactcctggcctcaggtgatctgcctgcgtcggcttcccaaagtgctgggattacaggcatgagccactgtgcctggccccacgtcggttttactcccttcattctataccccttccccgcgcccttttaaacaccagttcttgcctcattggcactacagaaggtatctttcatgttaggttcctttcacctgcccttccccatctcctggcttcttccatgtttctgcagggaataaaactcaagcttctgtgacttctttgccgctcattggctgccagaggttgagccggttatttcacttccagcctcagcgtctgcatctctgcagatggggcagggttcagggtggagcgtggcaaacaccatgcgtggaggaagccctggagtggttccttctgcagctggtatgcgtgaccagcgtcttgcttggtctgattttttttccggagccccccactgctgcgctccagaaatagccttgactccccagtgagtcttcatcccttaggcgcctgccgcccacgctgtgaagagaacaggcggcagagacttggcacctctgttgcgagatgactcccagggttgcgatctggctgcagcgtgacggggcagagcgttctggggaacctgaggccacctcctcaagctctgagccacgtttgatggcgtgagatgtgtcaggtgcagggatggagcagtggcgttgacggaaatctggcctagcctttcaggctgactacccagaaaattaaaagactgctcccaaagaggatgtctgtgtatcgtaaggtcctgggccggccgggctgtggggatccacaggggctctgaccttttgggccagctctgagattcatctgagagatgggctaggtccacagtcactgactaaatacagaagattcagtaaccgggtggatgctgtcggggagaggagggctggggccggagaggggtggacgttgtacacaccagtcgtttccattcgctgcctgggctcggttccttccacttctcactcccttagctccggccacactggcctcctgcaggtcttcgaacttgccaacgtgcacccaccgcagggccttcgagagtgccgctccctcccctgggaggtctccccagctatccggggttctccccgacacttcctccccatccccattcagttatcaaagcctatgccaaaaaggcctcccgtctcccgagtccctgcacacctttcgcagtgtgtgttgaatgccttgccctctgtctcctgaacctgggcctaagatcccggagagcagggcagctccctgtgccccgtcatcgtccatacggacctggcccgcagtgggctctgtcactaaatggataaccagtgctggggagaagacccagatgatgtgctggtgaagagtgaggcgttcattcagcttgcagaaggaggcttaggaaggctttatagaagaaaggaaatgtgagcaaagatgtcgttgaaagtaactttttttgaattaaaaatattgtattaacaaaaattcaaagccttctgtgagttttcaaaatctgaatttcacaatacttgtgagttctaaagtttgttttttgagacagggttttgctctgtctcccaggctggagtgcagaggtgtgacagctcactgcaacctccgtctccagggctcaagtcatcctcccacctctgcctcccgagtagctgggactacaggcatgtgccaccacgcccaactaatttttgtattttttgtcgagatgaggtttcgccatgttgcccaggctggtcttgaactcctgagctcaagtgaactgcctgccttaacctcccaaagtgctgggattacagacgtgtgccaccacgcccagctaaagactgttttataaacttcattttaagctcatattttgcaagacaacataagtgggtttggattcagttgttctcggtgtgtgagccggtctttccagtcaattcattgatggtctagacaatttgtgaaggcgctggtttcaacctacagtttctgacatactcctaagaccaggtgaaaagaaaacccccataaagacacccgaatcgcctcaaaatatgacacttcagcccttgggactaaagaggacccctggcgcagtccctgagaaatgtctttggagaaatttttatttatttatttattatttttttgagacagagtttggctctgttgcccaggctggagtgcagtggtacaatctcagctcgctgcaacctccacctcccaggttcaagtgatcctcctgcctcagcctcctgagtagctgggattacaggtgcatgccactaagcccggctaagttttatatttttagtagagacagcattttgccatgtttgtcaggctggtcttgaactcctgaactcgggtgatctacctgccttggcctcccaaagtgccgggattacaggtgtgagccactgagcctggctgaggtgccatctcaaaaaaaaaaaaaaaaaaaaaaaaagatgtgaaggaatgccatagttctcagacttattgggagaactaaatctttttttttttttaacttttattttaagttcagaggtacatgtgcaggatgtatagacttgttaaataggtaaacttgtgtcatgggggttggttgtacagattatctcatcacccaggcagtaagctagtacccattagttatttttcctgatcctctccctcctcccacccaccaccctctgataggccccagtgtgtggtgttcccctctatgtgtccatgtgttctcattatttagctcccacttaaatgtaagaacatgtggtatctggttttctgttcctgcattagtttgctgaggataatggcctccagctccttctatgtccctgcaaaggataggatctcattccttttcatggctgtatagtattccatggtgtgtatgtaccacattttctttatccagtctatcattgatgggcatttgggttgattccatgtctttgctattgtgagtagtgctgcaatgaacatacgcgtgcatgtgtcttcatggcggaacaacttgtattcctttgggtatatagccagtaatgggattgctgggtcggatggtatttctgactttaggggttgagaattgccccactggggaagatgaaatatgaatgaaacacgcctgacagttcctggcacagagagagcaccgctgtggtagttattcatctgagcatgcatgcccggcgtttcaaatgcaaggtagatgctattatccccacctttcagatatggaactgtagtcaggagagcttaaggacgctgcttgattttgctcagccataactgagataaaccaggtctgttagactcgcagatgagtcacatcacagcctaagggctccacagactgccaggatgctcctgcatgagtcagcagaccacaggaaagggagttgagtcgcatattaattagcaagcagggtttcctgtccctggggctgtggagaggtttgtcagtgtccagacgaacaacagattttctggagtgggtcataactcaagatgctcacataacgttggggaccagatgtccattctgtaaggctatgtgtttttccctccctacctcttccagacagcatctttggggatttcctattcctggagaacatgaagactttctaatatttttttttgagagagggtcttgctctgttgcccaggctggagtgcagtggcatgatgtcgattcactgcagccttgaactcccgggctcaagccattctcccacctcagcctcccgagtagctgagacttcaggtgtgcgccaccacgcctggctaatgtttgtatttttagtagagatggggtttcaccatgttggccaggctgatctcgaactcctggactcaagcgatctgccccactgggcctcccaaagtggtgggattataggcatgagccaccgtgcctgacaatgaagaatttctgaggggtacatttgcatagataattttaagggaatgttttcggatccccaacttccacattcacccttttctaaaacagactgagaagtttgcttacattcacaatagtcttttactgctttgcaaacaataggccaagctcctatttatctcatgctcagtgctaggatgcaggacgtttgcaagttagcattcctagatttcttacatgtacaagaaagggcttagactagatggtttttggaaaactttttattttgaaataatttattttatgtaagtaggtatgtatttttgagatggagtctcgctttgtcccccaggctggactgcggtggcactatctcggctcactggaaactccgcctcctgggttcaagcgattcttgtgtctcagcctccctagtaggtgggattacaggtgcccgcctccacgcccagataattttcgcatttttagtagagatggggtttcactgtgttggccaggctgatctcgaactccaacctcaggtgatccgcccgcctcagcctcacaatgtgctgggattacagacgtgagccgccgcgcctggcctgaaataattttagatttacagaagagttgcaaagacagtacagagagttcctgtctatgtttcacccagctgcccgtaatataaacatcttacaacaacatggtacccttgtcaaaactatgagttaacatgattagtacagtactagtaacaaaactacagacttcattcaggtctcaccagtttttccactaatgccgtttttctgtttcagcatccagagtccagggtgtcaccttatctccttagactccttcaatctgtgacaatttctcactctttcctttttatttttattaccttgatgcttttgcagagtactagtcaggtatgttgtagaatgttcttttttttttttgagacagattctcactctgttgcccatgctggagtgcaatggcatgatctcagctcactgcaacctccatctcccaggttcaagtgattctcctgcctcagcctcccaagtagctgggattacaggtgcacaccaccatgcctggttaatttttttgtatttttagtagagacggggtttctccatgttggccaggctggtctcgaactcctgacctcgtgatccacccaccttggcctcccaaagtgctgggattacagctgtgagccaccgcgcctggccatagaatgttctttagtttgggtttgtctcatgttttctcatgatgggactgagtctggttagggattttgggaagaatcccaccgaggtgaagcgcccttctcatgacatcctctctgaggggacacggccacacaggacttccttctggggatgttaactttgatctttggtgaaggtggtgtctaaccactcttaccaggctggtatttttccccttcaactttcaattttttaggaaggagtcacttagtccagctccctttcaaggggagggcaatgagctccacctccggaagggagcagtatcaaagaatctgtggccatgtgttaaaaccatc

SEQ ID NO: 95221 - DNA, 67798 bp, Homo sapiens
actgtcgccttcccggggtgaaggacatcaatgacctaaaaggagatatcaagtttagcattcagtatgataaaatacatctttagagtaaaggacaattaagcaaagattgatgtgcccttccttaccatttgtttcctctgaagtagtcggttggtcatgaactttctagtgcggatagttacggtgtcgttctgaaaacataaacactctggttaataaaactactccaacttttcttggccttgctgtgattttccaagacctagaatgttgcagtccaatttgtagccattagtcatgtagcgaactaaagtaaataaaacccactgggcaaggccaaactcacaggatacacctaaggaatacataaaataccaggaaaacacaatggttttacacatgaatctgtacaacttacttcactaggttatgtgtatctctggggcagggtttctcaacctcagcactactgatatttccatatggataattccatatggatatgttgtggggactgtatgttttagaataactataaaaatcccagccctctaaccactagatgccggaagcacttcccacctttcccagttgtgacaatcaaaaatgtctccagacttagccaactgttcccttaggagaaaaatcactccgggttgagaatcacttctctggggtaaaaactgctgtggctcatataaaggtcactcaatgaactgtgtttatcatgtcttgcacaaatgtgccccaaaccttgtactcactacctacatgtaatctatccttctagaatggccatagcagagatcagagaaaacgatattcccttctgaaggactgaactgcacctttacttaatacctaacaaaaaatgtgggcattaagcaatttatgctaacaattttaccaaaaaggaggcgcaagagactttcatggcagcaaataacttcctagactttctccattttactttgagaaaccacaccaaattaaatccacgtcagtggtactcaattcttgaaagtaacggatcaaaggtaaggagaaaaaaaaaagattgctggtaaagttaaaaacggatgctggaggagctaataacgcatgacttagggcaggactacctttttataacatctctttccagggcctgtttccccactatgaaacatgaagatccatccagctgacaagttttctagcttacacgtgggaatggtttcacttgccgcaactcgcccaggcgctgcccgcaccttcttcacctcttgtactgccatcacctgcaagccgcctacctagcccaatgaggaactgcagacgagatgtgcctcccagtgtccatctatcccgcccgccccctacccccatccaccgtgctccacgaagtcaacaagcgcaacagctcctgcactgcccaggcgctggagcccgaagcccagcgtgtccgggtctacagcgcagcccgccagcccggacgccctgccaacagccccgagcccctcgacaaccatcctctgacagaaacggccagagaagagcaaccgggcttcgcgtgcctatagctcaagtactgggacccagggaccacggatggctcggatacgcggcagatractgcacgggcccagggagactcaccatgatggcgatctatcttcagacagccaaggaggaaaagagaaccacgattygccggccaatcatatcaacgcgcacggaaggaccccgggaagagccggcgtgggggcgygggcgcgccacgaggctgaccgcgccgatgcctgatttaggctgcctacggccccgcctcacagacttttggccacacccctggaactctagactgaccaatccagaaccagaacaactcgagccgactaggtttacgcaagcaggtgttcaatttcagttcaattcattatgttgaattgtacgtatttgaattccggtaaaccaaattagtttaaattgccttcttccgagttagaggtgggtaaacttggaaagcattttaggatatcctctctaacagtctcctcgttatatggctagggaaactgcagaaaccctgactctaaaacctttgttatttcaagtacttaacattgcccattctaatttattattcatgagtattatttctgtgacttttatgacgaatctttactttaaaagatctctttaatttgtatttttctgcaaatcttggtcattatgcaaaattagattttgaaaaatatttggccgggcgcgatggccacgcctgtaatcccagcactttgggagggcaaggcgggcggatcacctgaggtcaggagttcgataccagcctggccaacatggcgaaaccacgtatctacgaaaataaataaataaataaatacaaaatacaaaattagcggggcgtggtggctcatgcctgtaatcccagctactcgggaggctgaggcaggagaatcgccagaacccgggaagcaaaggttgcagtgggccgagatcacaccattgcactccagcctgggcaacaggagcgaaaatccgtctcagaaaaaaaaaaaaaagaaaagaaaaaaaaggaaaaaaaaattggaagccaggggcagtggctcacgcctataatcccaacactttgggaggccgaagcaggtagatgacctgaggtcagaagttcgataccagcctgggcaaaatggcgaaaccccgtctctactacaaaaaaaaaaaaattggccgggcgtggtggtgcatgcctctaatcccagctatctgggaggctgagacaggagaatcgcttgaacccgggaggcggaggttgcagtgggccgagatcgcaccattgcactccgcctgggcaataagagcgaaactccgtctcagaaaaaaaaaaaaaaaaaggaaaaaaaaattgattgctccagaaatattttctttaacgtgaaacagacatgtaaagaatgtaaatatatatgttccggagaaataataagaagaatttcccaaatgttagtgcagacgaggtgtccaaggtgcaggctttgcgggcagctttcctattttctttttttttttttcctgagacagagtctagctcttgtcacccaggttggagagcaatggcttcatcgcggctcactgcaacctcgacctcccggattcaagcgattctcctggctcagcttccagagtaactaaaattacaggcctgcgccacaatgcccagctaatttttgtatttttaggagagacggggtttcaccatgttggccaggctggtctccaactcctgaccgcaagtgatccgcccccgcctcggcctctcaaagtgctgggattataggcgtgagccaccgtccccggccgactatttttcttttttttcgttttttgtttttttttttttttttgagaccgcatctcgctctgtcacccaggctggagtgcagtggcgggatctcgggtcactgcaacatccgcctcccaagttcaagcgattcttctgcctcagcctcccgaggtgaccaactatccttattcttaagaaaatagtcagccggctgggcacggtggctcatgcctgtaatcccagcactctggaaggccgaggcaggcagatcacgaggtcaggagttcaagaccagcctagccaatatggtgaaaccccgtctctactaaaaatacaaaaattagccaggcatggtggtgcgcacctgtagtcccagctactcgggaggctgaggcagaagaatatttattgagtgattgtaatgtgcctgttacattctaattacttttaccttcattttgctatttaaccttcccattgactctaagaaataggatacatattactcacccatgttataaatggggaaactaacacacaataagattaaataactttcccaagttcacactttatatacgtgtatatatacacgtatgtgtatatatacacatatatctatatctatatatatatatatatatatatatattttttttttttttttttttgaggcagagtcttgctctgttgcccaggctggagtgcagtggcacaatcttggctcactgcaacctccgcctcccggatttaagcgattctcctgccttagcctcctgagttgctggaattacaggaatgcgccaccacaccaggctaatttttgtattttttagtagagacggagtttcaccatattggtcaggctggtctcaaattcctgacctcatgatctgcccacctcggcctcccaaagtgctgagattacaggcgtgagccaccgcgcccggcctgcacaactttattttttatttttttttatttttgagatggagtttcactcttgtcgcccaggctgcagtgcaatggcatggtctcggctcactgcaacctccacctcccagcttcaagcgattctcctgcctcagcctcccgagtacctgggattacaggcgcacaccaccaaccccagctaatttttgtatttttagtagagatggggtttcaccatgttgaccaggctggtcccgaactcctgacctcaggtgatccgcccaccttggcctcccaaagtgctaggattacaggcgtgagccaccacgcctggctgcctacacaactttaaatggtgaaagctagactcccatgatggcactgtgatttcataacttttgctcttaacctctagataagtcacacacgatccaacccttgttggtataatattgtaaacatcagagccgggtgtggtggctcacacctgtaatcctatcactttgggagactgaggcgggcggatcacgaggtcagggattcgagaccagcctggccaacatagtaaaaccccgtctctactaaaaatacaaaaattagctgggcgtggtggcgggcgcttgtagtcccagctactcgggaggctgagccaggagaatcgcttgaacccgggaggcggaggttgcggtgagccgagatttcgccactgcactccagtctaggcgacagagcgagactccgtctcaaaaaaaaaaaaaaaaaaaaaacaaaaaaaacccataatgttgactatatatatatatatatatatatatatatatatatagtcaacattatttcatgattaagtgatggagtaccgaaatgagttagaaaaacctgatatgcctcgtttgtctgtgacattgtgttttgctagtgaggatccatggcgtctgaaaatgagatagcgtcccttcttaaaaattgaaagttgttaaacacttttgttaagttctgttttgagtttctcacaaataatgaggacttagttctaattctaagcgctaagccctgtggtgatgtgatttccttgctaggctcatgcactaatatatcacactaggatcacctcccacaagttctcacagactgtagacaacttatttcaagacatgaatgatctttactttccattctcccttttcttctgtagattaccatggctgttttcactctaacagattttcaactgtttttgtaatcaataatgtaagtttaattcttcccccctccctccaaataacttcatgaactggaggcacatgtgcgcccatattttccgctctgttttcctttgttggtcctccacagatagtgccctctgttggatgggccggttcattttagcttccaccttcccttaaaacaattagaagctcttaatttagatggtactgatgttaatgatgatgattttccattttatgcaagttttggccctctgcttgtctaaaagccttgaggcaaagagttatatgcagtttctctgcgggtgtctgattacgtggagaaattgaccagaaatgggatttttaaaatacagcacacgcctcggtgcggcttccagtaagcgccaccaggtgacggtgcggggaaagggaaaaaaaaaaaaaaaaaggcatgccggaagtctctcttgacagacagacgcgcgggcgagtagcggaagaggaagcggacacgtgggacactctacggtggccgagaggatgccgcagatgtgttagcggcgagtccagaagcagccccaggaggtgctgggggcatcgtttctctaatctggcctcccgagtgccaaggaggcgtcccggcagcggtcatcatggtgaaggagcagttccgggagacggatgtggccaagaaaatgtaagacggagtaagagtggccaaagggctgagaaatagggcaaggggtccgaggtcagcggtcccgggtcttgcagggtcagagatggggtgcaatgggaaggggagggccagtagtccataggtgtgaccagcgcccagaactaccagcgttggtcaaagagcattggtcaggctgaggggatttcagcacctcgagaggtccctggacttgggcggagaagtcggagtggcctgagccttaatgatttgtgcaccctgggccaaagctcgcattctcctgaagtcatacaatgatccctgttcttcagcgaactatcccctgctgcagcgaggggagcaatctggggcggggactgtctctaattctgtcagccgcagagcgtctgacacggaggcagtagttgcttaccaaaaggatggggttgcccactagaaagctgtaccacaggccgacggatggcagtgtcagaaataaagctgctatccggacttttgccttcagaaatacgttattaggcggtggctccttcttagagttctcggtaagaaagtgaatccagccgggcgcggtggcttactcctgtaatcccagcactttaggaggccgaagcgggtgaatctcctgagctcaggagtttgagactagcctgggcaacgtggcgaaaccccgtctctatcaaaaatacaaaaattagcaggcgtggtggcgcgcccttgtggtcccagctactcgggaggctgaggccgaaaaatcacttgagcctgggaggcagaggttgcagtgggcaacctcctgcattccaccctgagtgacagagtgagacggtgtctcaaaaaaaaaagtgaattcatcattcttacagcagacactgaggaggatactgcgcgttattcccagtgttggacgttaaagatacggtctgaataaaacttttactgcctaatctagttggagaaggtacacaagtcaacactgggtacgacaagtgcaatgacaagggtaggtccagggggttttgagagcacataatgggtccaggcaaaagaaagcagaccaaactgcttttttcaaggagcagacctgagggagagaacacaggtgatcagaaggaagcagaagacttgaagctgtgttaagaagtcatcttgtaggcagtgaggaacctttgaaggattttcaacaggagagtatcttgataagagttctccttctggaaaatctcttgattcatggtggaaagaattagaggtcgagagaccttgagacggatatacagaatgccttgcttgggcagctgtgtggatggttgccattcactagaacaggtgtcttacctaggtgaatgcagcattctcccatgtggtagctctacatcgacactggcccttcacacccacctgtacacctgcgcccagtcagatataatacattctcacaaaacagagaaagtgcttctgtcaaagtgcaaattaagggtattgtcaattaaaatcctctagcagaggccaggagtggtggctcacgtctgtaatcccagcactttgggaggccatggcaggcagatcatgaggtcagaagttcaagaccagactggccaatatggtaaaacctcatctctactaaaaatacaaaaattagctgggtgcggtggcgcatgcctgtatgcctgtaaccccagctacttgggagtctgaggcaggagaatcgcttgaacccaggaggcagaggttgcagtgagctgagatcgcaccactgcactccagcctgggtgacagagcaagactctgtctcagggaaaaaaaaaaatcctctagcagctttccattgtgtgggccatcacgcctagcaaaktttttgtatttttagtagagacagggtttcaccatgttagccaggatggtctcaatctccttgcctcgtgatccacccaccttggcctcccaaagtgctgggattacaggcatgagccaccgcacccggctgcatttatgttatttaaataaattccctaccaaagttcccaagccctcatgctttagctcctgcatgcttcactgactttatcttgtactattagctttctatgctccagtatatactgatttcatttggttccttgaaaatgccaagcttgtgccagtcccaggaccctggccctagtcattctctccacttcagatgctcttccttctgattgtcagttttacagtgaggctttctgaccatgcaacgtaaagtaattcctcagactccactgcttacatcacttctgcatctgttcacatttgtatattcgtttgtttgtggtctgtctttcccaccctgacctgtgagctctttgttggcaaggaccttgtctgtcttagctaatctgtatcctcagcctgtaggatggtgcctggcacataggaaatagtcaatttgttggaagaatgaatgaagggacagacatgggagaaaaagtattgaggtctgttttcaatgtgtggggtttgaagtgcctatgagatatctaggtggaactgtccaggaggaggtgtctatacagatgtccagttgggtagcagtagctggcctatagagatagatttgatagacatcaacatgtatgtgagtggcatgatcactcaggagaatgtgtaggatgagaagataagaggatgaaggttgtaatgctaggtggtacagtgcaccaatatttaagggatagcagtagaagaaaagacctcaaaagagactgtacaaggagcagccagagaagggaagaagaaaactcagagtgtatggtgtcaccaaagccgagagaaaagcacttcaggattgggcagggtgctgccagtgctgcagaggtaaaatgaggaagttcttattggattcagcagcaggcaggttgtctaggtggccttggtgagcactgttcctttgatggtgagagtagaaactggattccagtaagatgaagggatgtttgtgaaggaaaaatgagagagggttaaatatatttaatactggtaggaaaagccagtggagacagttggaaggataggttggttatggtgggctatgtatgtaatagacatttttggtcacagattttgctgtaattttcacctttttcttcccattccagaagccacatctgttttggaatgaagtcacctgaggagatgcgccagcaggcgcacatccaagttgtgagtaagaacctgtacagccaggacaaccaacatgcccccttgctatatggggtgctcgaccataggatggtaaggccccctcacccctyctggtamctgtgtcttgccctgctgataaaactggtgacttaccagattgaaaggagcaggggcttccttccatctcctcaattcccccctgcacatattagactaggtcaagaactccggcctttagtcagcaacctgattcgattctgagtcatgaaaattagaaaagaaagaaaaacagtaggaagtgatctcagaaaggaaatttaagaagcaaaagaaatgattctgtgtcaccagccaggcatgatggctgggcactctttcccgtccagcagtctgtgttgatcattgggtgtgctttttttcaaagggtacgagtgagaaggatcgtccatgtgaaacctgtgggaaaaacttggctgactgtctaggccactatgggtatatcgacctggagttgccgtgttttcatgtagggtacttcagagcagtcataggcatcttacaggtaagcacacaggtgctgatttccaagacataaattctggagtgattggtcagggatgctggaatgaacttaggaactgtgagtggtgggggatacatctaggggactcttttatactaagtacataatattttcatctcacactacgttaaatcactcaagaattatttattttgtttatttaccttgagaagatggtagatacgtgttcttaaaaaaataacaatagtagtaattcaaacaatacagaatagcacaaagaaaaagataaaggtaacaaagtctgcctactggctgtgagtactgctaatctagtgaacacaggcttcctctctgcatatccatagtatagagmcatttgcagatctgtgtatatggtcacgtggttaagggtacaaaacagggcgatggcatttttaaaagaaaataatttttcattctcacttatgcttttatctgtcttgcttaatttgaaaaagatgatctgcaaaacctgctgccacatcatgctgtcccaagaggagaagaagcagtttctggactatctaaagaggcccggcctgacctaccttcagaagcgaggactgaaaaagaaaatytctgacaagtgccggaagaaaaacatctgccatcactgtggcgcttttaatggtgagtggaatgcacagaaggctaagcaatagcccttttcactcactgtcttctgtttagtttattaggtttacataatgttcgggagtcagcttttctccttataaattaggcttaagagcccaacaactgatgtcctattgggaaacggacctctcrtctttcattgctatagtagtttcagtaatttcattaaccatactacaatctctggccaatctgagaacataattttttatttcttggtaaataaactaacccttataggtaccgtaaagaagtgtggactgctgaaaataattcatgagaaatacaagaccaacaaaaaagtggtggatcccattgtatcaaatttccttcagtcttttgaaacagccattgaacataataaagaagtggagcctctgctgggaagggcacaggtgagcctgagaatgcacgcctgccttccrcctgcctcccgcctgcctcttccgcacgtcacatgcacactctctcccccaactccgccccacccctagacacccactttcttccaaaatgagaggtccagttaggttcgacagctctccgataattcctttttttttttttttttttgagatggaagacagagtctcgctctttcaccctggctggagtgagtggtgcaaatcttggttcactgcaacctgtgcatcccaggttaaaacgattcttctgcttcagcctcccaagtagctgggattacaggcatgtgccaccatgcccacctaatttttatatttttagtagagacagggtttccccatattggccaggccagtcttgaactcctgaccacaggtgatccagtcgcctcagcctcccaaagtgctaagattacaggtatgagccaccacacccggccagctctccagtaattcttatttgaccgtaacagtgtttatctagatggcactaaggctaatgtggactggccttgtaacaccagttgtttttgtttttgcttttgtttttaattgagatggggtcttgctgtgttgcccagtctggtctcaaactcctgagcccaagagatcctctcacctcagccttccaaagtgctgggattacaggcataggtcaccattcctggccccttgtttgtgtttttacctcagttctttttttttattattattttatatatttgtttatttatttattttaatttttgaggcagggtctctctctgtctcccaggctggagtgcagtggtatgatcgaggctcattgcagccccgacctcctaggctcaagtgatccttgcatgtcagcctcccaagtagctgggactacaggcacacaccaccacccccagcaacaattttttaatttgttgtagagacaaggtcttgctatgttgcccaggctttgaactcctgggttcaagcaatcctcctgcgtcagcctccaaagtactgggattacaggtgtcagccactgcatcctggcttaccttagttcttttttaacagtaacactttttttttttagagacagagttgctcagtcacccaggctggagtgcggttgcacgatctaggctcactgcaacctccacctcccacgttcaagtgattcttttgcctcagcctcccgagttgctgggactacaagtgcccgccaccatgcccggctaatttttgtacttttgtagagacagggttttactatgttgaccaggctggtcttgaactcctgacctcaggtgacccacccgcctcagcccctctaagtgctgggattatagacatgagccaccatgcccagccagtaacactttttttttttttagatggaatttcactcttactgcttaggctggagtgcaatggcatgatatcggctcacggcaacctctgcctcccaggttcaagtgattctcctgcctcagcctcccaagtatctgggattacaggcgtgtgccaccatgcccagctaatttttgtatttttagtagagacgaggtttcgccatgtttgtcaggctggtctcgaactcctgacctcaggtaatctacctacctcggccttccaaagtgctgagattacaggcatgagccactacgcccagcctccagctaccaatattttatggaccttttttatgtcaattgctgtgtttgtctagtatctttttttccccccaatggcttgctgcttttccacatagggatataccgtgattttatttagccaataaactgtcaggctctttccaacttttcactgttaagaacagcttttattaccttcctattctgtcacacggataaaaaataacaaaaaacagcttttgtgaacattcttgtagctaaatctttgtgttcatttctgaagttacaccccttggaataatgagaagtggaatttttggcttgaaaaattggaataaaagacatacacaattttaaggctcttgcagcatagcgtrtcatccatagaaatctctgttgtcacttatccttagtgacagataggttagaaaacatagtgaaggaaaaccttgcccaagctatggaaaactaacatagtatctccatttctgcctttcttcgtttccataggaaaacttgaatcccttagtagttctgaatttatttaaacgaatcccagctgaagatgttcctctacttctgatgaacccagaagccggaaagccgtctgatttgattctcacacgacttttggtgcctcctttgtgtatcagaccctccgttgtgagtgatttgaagtctggcaccaatgaagatgatctgacaatgaaactgacagaaatcattttcctaaacgatgttattaaaaaggtcagtgcctcccatttcsttgtaagtttcatagtatatctatccaaaaacttctggtcaagaaaatgtgagaaaaatcaaactgaccaggtttgtttctgtttgggctgtgctggttttagcatcggatctcaggagccaagacccagatgatcatggaggactgggatttcctgcagctgcagtgtgccctctacattaacagtgagctctcgggcattcccctcaacatggcacccaagaagtggaccagaggcttcgtccaacgcctgaagggaaaacagggtaggtttcccacaagatgtgcagaagccagcccactctctttggttmctttttcaggagtgtytgtccagcttctctgattggaggtcacaggctttcctcagtctctccgttcttattgttcccatgagcacatggtatgccatggggacctatgacatgtttttggctatttaggtcgatttagaggaaatctctcaggaaagagagtggatttttctggcagaacagtcatctcgcccgaccccaacctccggattgatgaggtagctgtgccagttcatgtggccaaaattctaacttttcctgagaaggtaagtgaccactcagctgctcaattctttgttttaaattcagtcttttacgttatattttggtattgcaaacaacaggcagtagaaagtccccagtaacccactcaacccacagtttggtttatatgagtgtatgtgtcttcccagtttgctttatacatagttggtggtatatattctgtaaaccatttgcagccacagttgtttctagtttcatgtgtatttactcatatatatgctatacttttttgcaactttttttccaattaataacatcttgaccgagcatggtggctaatgcctgtaatcccaatacttagggaggccaaggcaggtggatcatccgagcccgggagttcaagaccaacctgggcaacacagtaaaaaccttgtctctaccaaaaatacaaaaaattagccaggagtggtggcaggcgcctgtggtcccagctactggggagactgaggtggaaggattgcttgagcatggaaggtggaggttgtgagccaagatcacgtcaatgcactctagcctgggtgagagtgagaccatctttaagaaaaaaaagtagacacttttctatgttggttcatgcctcatattttaaactaactaaatggtaaacattatccatagttaattttcttgggatagattttttatttttaaaactttacagtcactgagtcaaagcatttgaacattttaaggctattgctacatacccagaaaggcttttattttattttttgtttttgaggtggagtctcgctctgtcgcccaggctggagtgcagtggcgtgatctctgcttacggcaagctccacctcccaggttcacgccattctcctgcctcagcctcccgagtagctgggactacaggcgcccatcaccatgcgcagctaattttctgtatttttagtagagacggagtttcaccatgttggccaggatcgtctcgatctcctgacctcgtgatccgcccgccttggcctcccaaagtgctgggattacaggtatgagccaccgcatccggcctggttttttttttttaagagacagactctcgccctgtcacccaggccgaagtgcagtggtgtgctcatggctcactgtaacctcaaactcctgggctcaagccattcttatgcctcagcctcccgagtagctaggactacacatgcacaccactatgcctaactaattttttaaaaaaattttttagagatgggattctcagtatgttgcccaggctggtcttgaactcctggcctcaagtgatcatcccaccttagcctcccaagtcactgaaagtcactgagattacagggccctgtgcccagctagcactttttttttttttttttttttgagactgagtctcactctattgcccaggctagagtgcagtgacacaatctcagctcactgcaacctccacctcctgggttcaagtgattgtcctgcctcagcctcctgagtagctaggattacaggcacccaccaccacacccagctaatttttatattcttagtagggacggggtttcaccacgttggccaggctggtcttgaattcctgacctcaagtgatccacccacctcggcctcccaaagtgctgggattacaggcgtgagctaccatgcccagcccatacttttttttttttttttaaattgaggtctaggtaactgcagggcctgctaacgagaatattgattagctttacctatgagactcacagttagcccagatcatagatgttcctggtcagcttgtgttgtgtgtcctcagttgagttactaatgatccaagagttaacttctccaaaatggtgttccacaagacagttgtttaagaggttccagaacacattcaatgcagaccagggcttgtggtgctggtgtcacaacttttaaaccttacaagcccccagtaagttattgcagatcaagtcgccacctgtttctaggatcacagaaggttcctatagatcagtctagcctacccgttttaccagtgaggaaaccaagcaccaggaaaggaattggccatgtcactcagtgagcaaacagctgagttgacactggaagctggaagcttgtttgccagtctgttgttcacattatactcaagaccataggcagcaggytgcccaggatgcctctctttctcctagaatctgaacaaggaaagtaaagattaagacgcatttcagtatcatttgttagtttctagttacctgggagtaayttattgtggtttttttgtactgcaggtaaacaaagcaaacatcaatttcttgaggaaactggttcaaaacggccctgaggttcacccaggagcaaacttcattcagcagagacatacgcagatgaaaaggtaatcttttcccaatctagttggatttaactactttctcatggcaaagctcactgtggtcatactcagccacagaatgcaatccagaaatacagtttgcgtgacattttggcatgtggaaaatatctgtttaaatttccgtgagccaaggtatgtcatttgctctgttcagtcattgaatatacatgaagtgctcctttgttctcaggcttgtaatgttattggatccaggaggacaaaataccatggatactaaagtctaaagaggatcattattgctgggcttggtggctcacacctttaatcccagcactttgtgaggccaaggtgggcaaatcacttgaggccaggagttcaagaccagcctggccaatatggcaaagaaaccccttttctactaaaaatacaaaaattagctgggcacggtagcacacgtatgtagtcccagctactcagaagcctgagacacaaaaatcacttgaacccaggaggcagaggttgcagtgagctgagatcacaccactgcactccagcctgggcgacagagcaagactctgtctcagaaatacaataaatatataaagtggatcattgcctgtgtcacctgggctctcagggcttttagcatttctaaaattaggatatgtcttttttttttttttcaagacagagtcttgctgtgttacccaggctggagagtagtggcacgatcttgactcactgcaacctccacctcccaggttcaagcaagtttcctgcctcagtcacccgagtagctgggattacaggcacccgccaccacacctgactaatttttgtatttttagtagcgacgggttttcaccatgttgaccaggctggtttcgaactcctgacctggtgatccagctgcctcagcctcccaaagtgctaggattacagccatgagccaccacatccgactggatatatcttaagatcaatttatcatrgtttttttttttttttttttgatgtctcagtctgtcactcaggctggagcgcaatggcacaatcatggctcactgcagtctccacctcctctgctcaggtgatcctcccaccttaggctccaaagtagatgggattaaaggcacacaccccaccacgtttggctaatttttgtattttttgtagagacaaggtctcaccatgttgcccagtctgttctcaatctcctgggctcaagcagtccgcccatctcagcctcccaaagtgctgagattacaagagtgagtcacctcgcccaccctgtcatagtttaatagggagcttttttcttggcacataaaactatatgacattaaaatggaggcatcttagatttgatgaaataatatattaaagattgaatcctgatctgaagagggagaaacttggtgagagaactttgctttcacagatcatgtttattgttgcacattcaggtttttgaaatacggaaatcgagaaaagatggctcaagagctcaagtatggtgacatcgtagagagacacctcatcgatggagatgtggtgctgttcaatcggcagccctcgctgcacaaattgagcattatggctcatctggtgagtagcactgctttttaaattttccatcacktagaaatttgccatgactgttcagtgctaaacagtggacttctaaaattaaaattgcctgttatctcaagttttcataacttttttttttttttgagayaggctcttgctctgtcacccaggttggagtgcagtgacacaatcacagctcactgcaacctggacctcccaggccyaagcaagcctcccmcctcagcccccaaagtagctgggaccacggacatgtgccaccaaatctggctaatttggggtttttttgttttttgtttttggtttttggttgagacggrggtctcactatattgcccaagctagtctggaactcttgggctcaagcgatcctccttcagcctcccaaagttctgggattataggcgtgagtagcccctacagctggcccaacctttcataactattggtctccctcttctctcacattttagtttgagtgaaactttttaatttcaagcttccttttagtaagctttaatattttttaatattaaatttttaatatttgcaacgtaatattcatacaaaacactaagagaggatttaattgaaagtgactagcatggtttcacaaaaacatatacacgtatatgtgttgtgtgcacaaacttacataaaataggtatggcagaaaatggattttttttttttttttttggagacagtctcactctgttacccaggctggagtgcagtggcacagtctggctcattgcagctttgaccgcctcggctcaagcgatcctcccacctcagcctaccgtagctaggactacaggcatgtgccatgatggccagctttttttttttttttttgagacagagtctcactctattgcccaggctggtgtgcagtgtcgcagtcttggctcacagcagcctctgcctcccaggttcaagtgagtctcctgccttagcctctcaagtagctggagttacaggtgcatgccaccacgcccagctaatgtttgtatttttagttgaggcaggatttcaccatgttggcctggctggtctcaaactcctgacctcaggtgattcacccaccttggcctcccaaagtgctgggattacagacatgagccactgtgcccaccctttttttttttttttttttttaataagtggagctgaggtcttggtgtattgcccagatgggtcgcaatctcctgtgctcaatggatcctcccaccttagcctcccagagtgctgggattataggtatgacccactgtgcctagccagaaaattgacttttgatttaactttgcatattaactaagcaactaaaatgcttaaaagattttttctttgcagtaatcctccaactaagaccttaaaccatatttttttggkgatttagttttgcaacagcagcagttcctttttctggagatttaaaatggaaatgaaatacagctttaatttgttcaatattcatagattctcctatctgtaaagctgttaatccatgagcctttgcaaacagtgtttaagcagcctcttatggtaatattttttcatagattcattttggggtcgtctgaacacattatatcagtcatttacataatagtagaaataactaagaagtagtttgtgattatgggattatgattgtgagaatgtagagggttaactaaagccttctctttctggaatgttttgcttggctttggaacattacaaaatataattattaggtttttttgactggcaatggcacacacctatagccccagctactcaggaggcggaggcagaaggatcacgtgggcctgggagttcaaggctacagtgtgctatatcacgcctataaatagccactgcactccagcctagacaacgtaatgagaccctgtctctaaaaaaagaagtagaaattttttttgtttgaaaattttgaggccaggtgtgatggctcatgcctgtaatcccagcactctgggaggccaaggtgtatcacttgaggtcaggagttcgagaccagcctggacagcataatgaaaccccatctttactaaaatacaaaaaattagccgggtgtggtggcacgtgcctgtaatcccagctacttgggaggctgaggcaggagaattgcttgaacccaggaggcagaggttgcagtgagccgagattgcgccactgcactccagcctaggcagcagaatgaagctccgtctcaaaaaaagaaaaagaaaattttcaaatgtacactaaagtagaaagaatggtctaatgaacttacatattcccatcctctatatgcaataattttcaaggtttagccacacttgttttatctttcccatttttcttcgatgaacccatatctgtgtcatttttcaatatgtatccagtttacatttgtaagaaaaacttacataaccacagtgctgtaatcatacctaacaaaattaacagtcatctcttggcattcccaggtccatacctagttcatattcagatttccccatttgtctcaaaattgtctttttgtggtttgtttgagtcaagatgcaagcaatgaattcattctaattaattcatttgttatcattgcctgtgttattttattgggctgcaaaatggaaccccactttttgaatctatcgttcctttaacatttattacctacaattcttataatggaaaatacccgcttgttaattaggtctgtttgcttgcccagaggtgcagctcataaagcaaaggctgtgtaaatggttaagtctttttcctttattgtgattttgggaagtaagaacttagtgctctcctgtgttcgtgtgcttaggaaaaaaaatttttttttttttaaagaaagggccaggtgcggtggctcaagcctgtaatgccagcactttgggaggccaaggtgggcggatcatgaggtcaggagttctagaccaatggtgaaacctcatctctactaaaatataaaaattagcctggtgtggcagtaaacgcctgtagtcccagctactcaggaggctgaggcaggagaattgcttgaacccgggagacagaggttgcagtgagccgagattgcaccattgcactccagccaggacaacagagtgagactacgtctcaaaaaaaaagggggttagtgctcagtaacttccaactagattgattggggttttttgtttgttttgactttctgttttttcagtgtcattataaacacatgggtttttatttagttggtttattttaatcaacttctgctgttaatctttttgatacttgaaaccatgacatccttggccagtgggagccttcacactggcgcctttgttgaaattcactgctttggttcaatctaataaagcttctcgaatgagtctttttttttttttctttttttgagatggagtctcgctctatcacccaggctggggtgcaatggcgcgatcttggctcactgcaacctccacctcctgggttcaagcgattctcctgcctcagcctcccaagttactgggattataggcatgtgttaccacacctggctaatttttgtatttttagtagagatggggtttcaccatgttggccagactgggaatgagtcctaaatgatatatatcacttgacagaacatactggaaatctactttcttaagccagtgcccagtattccaggaagccatttttaatgtttcaaaacagagaagcttttggataaatgcctaagtcctcttcctgttttgttttgttttgtgttccacaggccagggtcaagccccaccggaccttcagatttaatgagtgtgtctgtacaccctataatgctgactttgatggtgatgaaatgaaccttcatcttcctcaaacagaagaagctaaagcagaggcccttgttctkatgggggtatgtagggtggcacagcccagcttttgcataacagctccttgaaaggaggcaaaggaaacttacatgaaaacaccaccacaactaacaacgccaaagaagccaggctctttctgttcttaaaccgaccactaactgcctatatatctctctttttattggtttcttttgagcctttgaagaatctcttagaaattatagtatatacmtgagagttagggtctgtaacagatgcgttgaggggattttctggcctataaatgtgggttctgggagaaaatgtatacatgagggccagttatgacaaggtaagaaaagaatatagcaatatcaatgttggctgtcacaggggaagaagatgtcctacctaagtaaattttccagtagctgaagattctttaagcaccagcacattttattgaacattctgaatggaaaccttcctaaactatattacatacttcgtcttcttagaggatgcagtattatacataatgataataactcttaccaccactttatttgacaaatgcataaggagtgcccagtagatrctgcaggagatcggtgatagtgaggcacgtgcctgctcttaaggagcttacagttgagctttaactgttggcacaggctggcgctgtggctcaggcctgtaatcccagcactatgggaagcctaggcaggtggttcacttgagttcaggagttcaagaccagcccggacaacatggcgaaactccatctctacgaaaactacaaaaattagccaggtgtggtggcgcacgcctgtagtcccagctactcaggaagctgaaatgggaggattgcttggtcccaggaggttgaggctgcagtgagctgtgattgcaccactgcagttcagcctgggcaacagagcaagaccctgtctcaaaagaagaaaaaaaaaaaacctgttggcactacatgtactattcactcctgacccagcaatagcacagtgggacatggcaccggctgtgtaggattctctcctcctgaacttcatgatccccaactactgagtattttagagcttcaggctttcttttttcagtattccagcttcctatattaggaactggtaagtcttatagttgtaagtgtccctacctccaaaatcacttattaccatttctgatgtgatgcttttaacctgttttggtttaggcttttagtattgcatgcatcattttggggttttaagttgtctatacgtttagattttttttctttttctttttctttttttttttgtttgtttgtttgagacggagttttactcttgttgcccaggctggagtgcaatgatgtgatctcagcccactgcaacctctacctcccaggttcaagtgattctcctgcctcagcctcctgagtagctgggattacaggcgtctgccaccatgcccagctaattttgtactcttagtagagacagggtttcaccacattcgtcaggctggtcttgaactcccgacctcaggtgatccgcccgattcggcctccccagatgctgggattacaggtgtgagccaytgcacctggccttagatttattttctataatgagcatatattatttttgtaacaaaaagtaatgtttagaatgctgcttgaaataatagctatcagcttgcaaccaaccatttagactttgctgtcaactctgccattgaggatccatactgtggacattgtgttacaactgcatatttcattggttacaaatggcaataataaaacaaagtctccaaggattttggggtagaagaatccttagttaccatgtggacaagtttcctcaatttcaagtaagaaaatacctatcgttctgatttagcaatgctgttctccgtgtagtgcatagggctctaatttggatgtgggcccaaattacccaggagaccttttcaaaatacactaatctcagccccttgcactctgcttctatccgtagactaccygtatcccacctcagagagagtctctaaaccaggagtaagagcagtcaggtggtgtgcaatgaagaggcacatctggctaaatagctgtctcccactctggttgaagggtccctgctttggatagtggctcagaagtaagtggtaatgggcctttgtctgagaggaccctgctttctgggtgaaaaggcccagaaaacccacaaatacacatgtgcattttcatatcaagattagagcaaatgtactctcatacacacagagccttctttacatgacttaattatgttttactacctaacacccttttttgcccaacgtaggccctcattaaatgtttaattaaattctgttgttggattgattattattagaacgtaatgtcttaaccaagggacatttaacagttctgtcatcattgtggacaagtgtggaattggttgacttcagaggtcacaacgctcctcatcattcacagaaatgaattttctttggagaagcacctatagtaataacaatagggctgggtgcagtagctcatgcctgtaataccagcactttgggaggccaaggtgggaggatcagttgagcccaggagttcgagaccagtctgggcaacaaagtaagaccccgtctccacaaaaaaaatgcaaaaacttagctgggcatgatgatgtgggcctgtagtcccagctgcttgggaggctgagctgggaggatcacttgagccccatgaggttgaggctgcagtgagccatatttgcaccactgcactctaacctgggctataagcaagactctgtctcaaaaacaaacaacaataaaatcttcttacatgggtagagtttttcatagaattctgaaacaacttcacttratatttcattttggtgttggtaggaccctcctaggtcaatcttgctggtatttttttctctccccttgacagataaaggaactgggagttagtgacaaagctgggattcagacccctggctttcatttctcagcctcgtccttctgctactctgtatttgttcataactattcaaaaaccttgtgattcaggctttgggctgcatcatgcatccgagaacagctaactgactgcgcttacttttcctacagactaaagcaaatcttgtaaccccgaggaatggggaaccgctgattgctgctattcaggattttctaacaggtaggttggtgaagttcacttgaaaggagatttctgactggaacacagtgttcctcgttcatagtgattcatgtgatgacttgaaaagctatttaatagcctgtgtttaatttggttttttgtttacyaagtttgatcatgaacctccccgtgggtttttttttttctttttttttttaattggttggttattcattaattcagcaagtctttaatgagctcctctcatggactgggcattttctaaacctagtgtctggcttagaatctgtcccttttgcctggggatacagcagtgaacaaaacaaagtcacgttcctgtggaggtagatcctagttggaggagaaagccagtaagcagytgtttgtttcaattcacgmtgttggtcatggttcaaatttattttaaaattgaaaccttgcagtattctcacaatttcattccttttctttgttttgtgttggttcctaatgcttaggtgcctatctcctcactctcaaggacactttctttgatcgagccaaggcttgccaaatcattgcttcaatactggttggcaaggatgagaaaattaaagttckcctcccaccrcctacaatcctaaaggtgtgtgtgggagttgtgtgttggtgcacaggtgtgtrtatgtgtctgtgggggtagactggtgaaatgagtggaacmgtgttggtgctaggcttgagtgcagtccctaggccgcctggcttcgtctactgaagggggattgagaccaggctcagcccactgactctcaggcttcctccccccctcagcctgtcaccctgtggacgggaaagcagatcttcagtgtcatcctcaggcctagcgatgacaatccagtgagggccaacctgcgaaccaagggcaagcagtactgtggcaaaggggaagatctctgtgccaatgattcctgtgagtggacggaactcgggtggggagaaggaggaacgtgacagaaaagcaagtggctggtcatcagctttgctggtaccttcgcgaagcaagcaaattcattgtttctgtaagccttaggtggaaagttttttcttcaggaaaatgtagctggtttttcttctctcagatgtaattccccatttctcttaaaagtagagatcatgtagacacatgacgcagtggttagaatgttctctccaaatgtgttttgtcttaagtgactagtttttctcacttagtagtttgtctktattttgtcatctttttggcggcggggggggcaataaacaaggattttactatttaaggcatttaattttttttttttttttttttttttttgagactaagtcttgctctgtcacccaggctggagtgcagtggtgcagtctcagctgactgcaacttccacctactgggttcaagcgattctcctgcctcagcctcctgagtagcttggattacaggcgcccaccaccatgcctggcttatttttgtatttttagtagagacggggtttcaccgtgttggccaagctggtcttgaactcctgacctcaagtgatctgccttgccctcccaaagtgctgggattataggcatgagccactgcacccagcctggattgatttttttttttttttttcaaagacaaacaggttctccctacgttgcccaggctggtctcgaactcctaggctcaagcaatcgtcccacctcatcctcccaaagtgctgggattacaggtgtgagccacctcacccagccagggaaaggatttacatgcaagtcatctgagtctgtctaaaccagttcaacccgaagtgcagtccacagagccctgctgtttagccagcatccattgagttactttctgatgtgagcacgttcactcacccagaccactaccaaacagttccctagcagcctagtttgagtagcactgatttagaatgggctttgctagtgagaccttgggactagaagtggatctccaggactctgtactgaagaactgaattgcagagttcttctgaaggtcaggatttctgctgtcttctaatgaagagcaaatgttttgaagggcactgatactcctcagatttatttctttggaaatatgctctctgatcttcaaaatacttcagcttcttgttttagactgttttgtttctttttggatatgaatttcatttggttgttgtataggctgtacatgatggtacctttgttaatatttaatatcttatatgagtaacaaattatttatagtttatagagcacttcactgtatgttatttcatctgatgctcaaaatatcccataacataaagatgacaagtgcttgatactgttacccacagttcacagatgaggagagtgagggtcaactggtatatttcagggttaggactacacactaactggagtttctatatttttcaaaaattcccaagttttcctttaaccccccctccctccccccaaaaaaaagctttgaggagaatttctgtttgttctgctttaagtgtcagtatgggaacatattttctcaactgtckcaaattcattttggaataaggcaaagtaataaataattgttgtctaaatatataatcattcttccagatgttacaatccagaacagtgagttgatgagtggcagcatggacaaaggaaccctagggtcaggatccaagaacaatattttttacattttgctgcgagactggggacagaatgaagctgcagatgccatgtcacggctcgccaggctggctcctgtctacctgtgtaagtatctcagcatccttcttttagttaaagctgcaattgttagagtcttaagggtttacgttattttgttcttttactgccatttcatccccaccacacatatacatacagaaaaagatactcattccaggctaaatcatgtgtgctgttattaattaaattaactcagtactgaatagtttcacaacagatttgaatttgcttttcagttctcttctcaaaaccagcagtagctccctacggtcttctagacagggttagattataaaccatccttgatgggctgcttccaaggtccctgtggaagcactagaacacttggggctrtccatgattcagttctccaagattactcaatatttgcctactatgctttcactgttctattttgtttgtttgtttgtttgctcatgctttgagtgggccatgagtcaagtgatgtttgcatgcccccaaaactttattccactcttatacttgcctgggtatacaattttagattgaaaattattttccctcagaattttgaaggtactgctctactttcttcttgctttcagagttgttgttaacaggtattgtcgttcttattccccagtttttgtatttgatttttttttgttttttgaagatagggtcttgctctgtcacccaggctgtagtgcagtggtgtgatcttggctcacgcagcctctcgagcagctgggactacaggcatgtgccaccatgcccaactaagttttgtagaaatgaagtctcaccatgttgcccaggttggtcttgaactcctggtctcaagtgatccacctgcctccacctcccaaagtgctaggattacaggcattagctaccatgcctggcccttgaattgtttttttcattttagaaactttcagaatcctctctgttctcactgtgaaagttcacaacaatatacctttggtgtgggtcttttttcattcactgtgctaagcactgagtaatttcatttaatctgcagctgtgtgtccttccattcgggaaattttatgttatttctttaataattttctctcttttactttctctgttctttctttttggaacttcagttaattacatattagaactcctagattaattatctaattatcttcttttccatttgccatttctttattctagattcactttatcttttaatacttctgttgatttttaaaattttatcactrtcatgtatttaatttccaatactatttttcaatatacttattcacaggtagtgtttttgtttcttttttttttttttttttttttttttgagacagagtcttgctcagtcgccaggctggagtgcagtgatgcaatctcagctcgctgcaacctccgcctcccaggctcaagtgattctcctgccacagcctcccgagtaactgggactacaggtgcctgccaccatgcccggctaatttttgtgtttttagtagagacggggtttcaccatgttggccagggtggtctcgaactcctgacctcaagtgatctgcccacctcggcctcccaaagtgctgggattacaggcgtgagccactatgcccaggctgttttgtttttaaagctttcttgttttgatccctgaatgtatcttctctgatcactctgagagaatattattcatagttttattatatttgcttcctgaattttctgtatccttttactttctttttcctgtgcatttgtgtcttttgtctttcatgttaaaatctttcctcaaatatctggtggtccttgaggagtaaggactgaaacactgattggaaatggagctgactggttgatggacctctcagtttttttatataaaaggaatatacagactttccctcagtgctcttgtttacagttatttcatctgcctggtattcccagacccagagcctctctgattccatttcgctgggagcgaactcccatctcctacaggaataagggcctggagccttccttatacagactttccactaggtttccttgtttccagcacattcatcatttccagcagttgcagaacctaatgatctcatttctgagcctttccaggcccattagtcctctcatctacagatacttgtaggtcataccttcctatcctgctaagccagaagccactcattcactctctttatttctacatacagtatattgtggctaggatcaatggtggcacctagttccatcaaagttggagaatacttttttgtgtgtgtgacacagggtcttgctctgttgcccaggctggagygcagtgatgtgattatggctcattgcaacctccacctcccaagtagctgggactactggcatgtgccaccatgcccggctaattttttaaggtttttgtagagaygaggctgatcacaaacatctgggatcaagcgagcctcctgcctcagccttccaaagtgctgggattataggcgtgagccactgcacccagccctcaggccaccctttagtgtttaatgtcactctgctttagataatagttggaaacggtattgtgtttccccaccagatcgtaaggtctctgagagaagtcagttgagtcctagtcattttgtgtaactccctaatgactgagaaagaaagccattatttaattgaattgtgatgaattctgtgaagatatacacttttttatactttaaactatacatacatagtttatatatagtacaaactatatctagcaggcataaactgtatttagtaggtttgctgagtctcatttatggccctttcttcctgctctaccaactcaacagctaaccgtggtttctcaattgggatcggtgatgtcacacctggccaaggactgctgaaggccaastatgagttgctgaatgccggctacaagaaatgtgatgagtacatcgaagccctgaacacgggcaagctgcagcagcagcctggctgcactgctgaggagaccctggaggtgagcccggccctttggttcagggtcgccacttgccgtgcacagtggctacrgtggtgctctctggggttgtgctgagccatgaatagaggtagcaaaggagtgggcaagtcaaggcattggcgtctgtcctgttggggcccagggctcactgtgtatgtcctcgtctgtcctgttggggccctgggctcactgtgtgtgtccttgtttgtttcctgagggtagggcctttcatcagatcctcatgtccctcctaactttcacatccaggtggtgaaaacatagccatctgttcattcggccacacgaggctgctcttgttctggtggcacactcaggtcccttctgtaactggtactcgagtgctcctgccttttctattttcagcatccttcaagtagaaactgacaccacagctctttggtttttgggggtttggttttttttgtttttgtttttgtttgagacggagtctcgcttttcatagttttatgaagcactccagccaggctggagtgcagtggtacgatcttggctcactgcaacgtctgactccctggttcaagcaattctcctgcctcaccctcccaagtagctgggattacaggcacatgccaccatgaccagctaatttttgtatttttagtagagacagggtttcaccatgttggccagcacggtctcgatctcctgacctcrtgatctgcccaccttggcctcccaaagtactgggattacaggtgtaagccactacgcccagccagtttttttgttgttgttttgttttaagawggagtctcactttgtcgcccaggctggagtgcagtggtgcaatctcatctcactgcaacctctacctcctgggtgcaagcaattatccctgcctcaacatcctaagtagctgggattacaggcgcccaccaccatgcccagctaattttttttttgcatttttagtagaggcggggttttgccatgttggccagcctggtctcgaactcctgacctcaggtgatccacccacctcggcttcccaaagtgctggaattacaggcatgagccaccgtgcccagcctcaccacagctctttgaatgtatggtctttgaaagagacttggatgcggaagagggagaattcatgtctaatagtcacatccccagcctgctgcccctcatttgaaactattttagctaagatctcaaccagcatgggtcagaatcagaatcaccaccagcctgtgagaacctgaaactccctcagcagtctgagtgcaccaggctttcacctggccgtcttctgcctcaccgataaacccgtggcactgagctttgactcacctgagtgtggaagaaaggctctttaagcattgggaagttttctaatgaaatacattttctaaagcagggagaaaccagaattttgtgaggtatttaccattagctcattcttaatcttactgagtcttagagagagagaaaaggatatccctcaccggtacctcctagaaaattacttgagacctcggcagcagcaatttttcatggaaccagacttgtaactgattcagcatcctagtttgtaagttgaggagtaactgtggatgagctcatgagccggaatattcttgtgaagtcacctcatcacatgcctagcttgcagacattcagatgtgtgcttggcaagaaaaagtagaaagacaaatttacaaatagtacaggcaattctcttttacataccacatattatcttatatatttgtatggggtgcatgtgtgtgtccacacagctatttatatacagatattttgttgtgtagggtagtatacacaaagccatacattctaccttatgggccatttaaaggattcttcaagtttttattactgtcaattttaggccaggcttggtggcttatgcctataatcaaggcaggaagatcccttgaggccaggagttcaagtccaacctgggcagtatagcaagaccccatctctacaaaaaaaattttaaaaattagccaggcctggtagggacatatacctgtagtcctagctactcaggggtctggggcaggaggatcacttgagcccgggagtttgaggctgcagtgagctgtgattatgccattgtacaccaacctcagcaacagagtgagatcctgtctccaacaaaaacaaaaaaaagataaactgtttgccttatacaccaattttagaaccttgtagaagatgtacatgttcatatagccagggcattttgctcctctaaggttctgaaacatttactgatcggaaatcgggcatcttgcctcagtattttcaaatttctttaaatgttagattgaacatttgtaatccacagagacaatgaggacaacccaccaaggatctccttttctcccactaggcactgatcctgaaggagctgtctgtgatccgtgaccaygctggcagtgcctgcctccgggagctggacaagagcaacagccccctcaccatggctctgtgcggctccaaaggtctgcatgcccctctctcacctgctggcagtgtgttctccgtacaggctgtttggctccagaaaatgtgatagtcacagctccaaacagacatttcatttatttaagggatctttttaaatcagagagagagacttaattatttgcattttgggaagtttaactgctttgaaggaacttgttggtaatgtgtctggattctgagtttgagggtgctttgagcaacgtggtctttaaaaaaaaatgaggccagatgcagtggctcatgcctgtaatcccagcactttgggaggctgaggccgaggccgattgattgcttgagcccaggagtttgagatcagcctgggcaatatgccaaaaccccatctctacaaaaaatacaaaaaaaaaaaaattagctgggcgtggtggcttgtgcctgtcgtcccagctaatcaggaggctgaggtgggaggatcacttgagcccagcaggtcaggcaggttgaagcagaagaaagccagggattttttaatgtacttaatgatgtggcataattcttctattttgtagataccgaggccctcaaagcatttggttttatgataatgcattcaaattcaaaacctctgtgcttctatttctgtacactttttttttaaacaggataaagtccagtctctttaactttgctgccttttaccccattgctctcctgcttcctaccctcaggacatagcccacacttttccatttctctgtctttgcttcctactttcccacccactttggaattcctccccctctccctttatgtccaaatcataatgtcctccaggagtccaacctggacttgctgaagcctccttgaagactcacctgtcacttccccagcctttcctccaacccacacatgctcctggctcctctcgccrtcgttccgcctttcttgggttcctgacagctccttgttgtcttgattgtatttctgtcttctactgttccaggaccatgacctcattgagcatargggcctattcctgttttacccttccaatctgcatgcacttcaattagtgttattttggtaaatgaatgttacatttctggtccatgtccccaggttccttcattaacatatcacagatgattgcctgygtgggacagcaggccatcagtggctctcgagtgccagacggctttgaaaacaggtccttgcctcattttgaaaaacactcaaaggtaagcagtagcagatcaggtagaactgtgaagatctcttaatctacmctttcctccaaggaacacagacctattcagatcaaagaccgttggccaatttcatgtggagttttatatatgtattttttgccattttattaagatacacttcaggccgggcacagtgtctcatgcctgaaattctagcactttgggaggccaaggcaagaggattgcttgaggccaggagttcgtctggccaacatagcgagaccccatctctacaaataaataaactttaaatacatatatacttcatatgtaattattacaattatacttcatatataatttacccatgtaaggcacacagttcagtgactgttaatcacagagctgtgcagccatcactacaacctacttttagaacattttcagtgcccagaatgaaaccctgtagacattgacaatgcatggttatgttttgtaggtgggcaggtctggcccacaggaaggatatcttgaaggtgtcatttcccagggaatgggcaggcagcctccatccacagggtgtcctctgaggtccttgactgcttgcctattttaaggagagcatccagatcttaggtttccctctcttgggccacttgcctgccactggcaccagcaccagccctggctgggccctcattctccttgtccctggtataaagtatttctccataaggaaagggcaaagaaagcctgccatttmgtgagaatatactggccaggtatttatagtctcaaggtggggcattttctgatttgagtggatttcagaatcgtgggccttgaactttttttgtttgatttttcttttttctacctctctttagctcccagctgccaaaggctttgtggctaatagcttttattccggtttgacaccaactgagtttttcttccacacaatggccggccgggaaggtctagtcgacacggctgtaaagacagctgaaacgggatacatgcaggtaacctgaagaaatgtaggccattagcaacagagcaggacagagctctgtgggttttgactattgagtacacgttttgcacatgagctgtaatttatctagtcttgggttaaatttaaaaggaaaaaatgtagaaaggtagatgccctggaaatgaacaaccaaaaaaaatgtagtatgttccgaatcatcctatgatgatcaagaccaggccagagccacgcatagcaaagcgctgttagaggagaacatggatggaagtacattgtgggatatgtcattcaacctcactaagcctcgctttactaacacgtgacaatgagggttattgcaaggcctctgcctctctctttgcaactatttrtgtaactcattattaayatcattctaattaactctaatgacctattccagtgcttgctgcggggcttggatgcttagaaggaaagcatttcctcagagagtgtatagctctgagataatagactctggggcacaggkctaaactagaggcttctcagcatttgtgcttctcaaactttaccacaaaagtaccctaatggcwgaggagtgaaaaataygtcttcttgtgttcttccataagaccacaggcaaaagatgtcttttcaatccctgtactctccactcaataatttaactgtatttttttaattttattattattatacttttaagtttagggtacatgtgcacaacgtgcaggtttgttacatatgtatacatgtgccatgttggtgtgctgtacccattaactcatttagcattaggtatatctcctaatgctatccctccccgctccccctaccccacaacagtccccggtgtgtgatgttccccttcctgtgtccatgtgttctcrttgttcaatttccacctatgagtgagaacatgcggcatttggttttttgtctttgggatagtttgctgagaatgatggtttccagtttcatccatgtccctacaaaggacgtgaactcatcattttttatggctgcatagtattccatggtgtgtatgtgccacattttcttaatccagtctatcattgttggacacttaggttggttccaagtctttgctattgtgaatagtgccgctataaacatacatgtgcatgtgtctttatagcagcatgatttataatcctttgggtatatacccagtaatgggattgctgcatcaaatggtatttctagttctagatccctgaggaatcgccacactgacttccacaatggttgaactagtttacagtcccaccaacagtgtaaaagtgttcctatttctccacatcctctccagctcctgttgtttcctgactttttaatgatcgccattctaactggtgtgagacggtatctcattgtagttttgatttccgtttctctgatggccagtgatgatgagcattgtttcatgtgtcctttggctgcataaatgtcttcttttgagaagtgtctgttcatatccttcacccactttttgatggggtttgtttttttcttgtaaatttgtttgagttcattgtagattctggatgttagccctttgtcagatgagtaggttgcaaaaattttctcccattctgtaggttgcctgttcactctgatggtagtttcttttgctgtgcagaagctctttagtttaattagatcccatttgtcaattttggcttttgttgccattgcttttggtgttttagacatgaagtccttgcccatgcctatgtcctgaatgctattgcctaggttttcttctatggtttttatggttttaggtctaacatttaagtctttaatccatcttgaattaatttttgtataaggtataaggaagggatccagtttcagctttctacatatgactacccagttttcccagcaccatttattaaatagggaatcctttccccattgcttgtttttctcaggtttgtcaaagatcagatagttgtagatatgcggcattatttctgagggctctgttctgttccactggtctatatctctgttttggtaccagtctatatctctgttttggttactgtagccttgtgtagtttgaagtcaggtagcgtgatgcctccaggtttgttcttttggcttaggattgacttggcgatgtgggctcttttttggttccatatgaactttaaagtagttttttccaatttgtgaagaaagacattggtagcttgatggggatggcattgagtctataaattaccttgggcagtatggccattttcacgatattgattcttcctacccatgagcatggaatgttctccatttgtttgtatcctcttttatttcattgagcagtggtttttagttctccttgaagaggtccttcacatcccttgtaagttggattcctaggtattttattctctttgaagcaattgtgaatgggagttcactcatgatttggctctctgtctgttattggtgtataagaatgcttgtgatttttgcacattgattttgtatcctgagactttgctgaagttgcttatcagcttgaggagattttgggctgaaacgattgggttttctagctatacaatcatgtcatctgcaaacagggacaatttgacttcctcttttcctaattgaatgccctttatttccttctgcttgattgccctggccagaacttccaacactatgttgaataggagtggtaagagagggcatccctgtcttgtgcccgttttcaaagggaatgcttccagtttttgcccattcaatatgatattggctgtgggtttgtcatagatagctcttattattttgagatacatcccatcaatacctaatttattgagagtttttagcatgaagggttgttgaattttgtcaaaggcctttctgcatctattgagataatcatgtgttttttgtctttggttctgtttatatgctggattacatttattgatctgtgtatgtggaaccagccttgcatcccagggatgaagccgacttgatcatggtggataagctttttgatgtgctgctggattcggtttgccagtattttattgaggatttttgcatcgatgttcatcaaggatattggtctaaaattctcttttttggttgtgtctctgccaggctttggtatcaggatgatgctggcctcataaaatgagttagggaggattccctctttttctattgattggagtagtttcagaaggaatggtaccagctcctctttttacctctggtagaattcggctgtgaatccatctggtcctggactttttttggttggtaagctattaattattgcctcaatttcagatcctgttattggtctattcagagattcaacttcttcctggtttagtcttgggaggatgtatgtgtcgaggaatttatccatttcttctagattttctagtttatttgcatagaggtatttatagtattctctgatggtagtttgtatttctgtgggatcgttggtgatatcccctttatcattttttattgcatctatttgattcttctctcttttcttctttattagtcttgctagcggtctgtcaattttgttgatcttttcaaaaaaccagctcctggattcattaattttttgaagggttttttgtgtctctagttccttcagttctgctctgatcttagttatttcttgccttctgctagcttttgaatgtgtttgctcttgcttctcttattcttttaattgtgatgttagggtgtcaattttagatctttcctgctttctcttgtgggcatttagtgctataaatttccctctacacactgctttgaatgcgtcccagagattctggtatgttgtgtctttgttctcgttggtttcaaagaacatctttatttctgccttcatttcattatttacccagtagtcattcaggagcaggttgttcagtttccatgtagttgagcggttttgagtgagtttcttaatcctgagttctagtttgattgcactgtggtctgagagacagtttgttataatttctgttcttttacatttgctaaggagtgctttacttccaactgtgtggtcagttttggaataggtgtggtgtggtgctgaaaagaatgtatattctgttgatttggggtggagaattctgtagatgtctattaggtccgcttggtgcagagctgagttcaattcctggatatccttgttaactttctgtctcgttgttctgtctaatgttgacagtggggtgttaaagtctcccattattattgtgtgggagtctaagtctctttgtaggtcactcaggacttgctttatgaatctgggtgctcctgtattgggtgcatatatatttaggatagttagctcttcttgttgaattgatccctttaccattatgtaatggccttctttgtctcttttgatctttgttggtttaaagtctgttttatcagagactaggattgccacccctgcctttttttgttttccatttgcttagtagatcttcctccatccctttattttgagcctatgtgtgtctctgcacgtgagatgcatttcctgaatacagcacactgatgggtcttgactctttatccaatttgccagtctgtgtcttttaattggagcatttagcccatttacatttaaagttaatattttatttgtgaatttgatcctgtcattatgatgttagctggttattttgcttgttagttgatgcagtttcttcctagccttgatggtctttacaatttggcatgtttttgcagtggctggtaccggttattcctttccatgtttagtgcttccttcaggagctcttttagggcaggcctggtggtgacaaaatctctcagcatttgcttgtctgtaaagtattttatttctccttcacttatgaagcttagtttggctggatatgaaattctgttttgaaaattcttttctttaagaatgttgaatattggtccccactctcttctggcttgtagagtttctgccgagagatccgctgttagtctgatgggcttccctttgtgggtaacccgacctttctctctggctgcccttaacattttttccttcatttcaactttggtgaatctgacaattatgtgtcttggagttgctcttctcgaggagtatctttgtggtgttctctgtatttcctgaatttgaatgttggcccaccttgctagattggggaagttctcctggataacatcctgcagagtgttttccaacttggttcccttctccccgtcactttcaggtacaccaatcagacgtagatttggtcttttcacatagtcccatatttcttcaaggctttgttcatttctttttattcttttttctctaaacttctcttctggcttcatttcattcattacgtcttccatcactgataccctttcttccagttgatcgcattggytactgagtcttctgctttttttttttttttaagtaatgtttttaactacttaaaacaccagataaagtcaacactacaagttgctgggccatgaacttgctgtggctttgtgtcttctctctccctactatggaagcatggccctttgcaagctggaaaaccagggtagataaaccagagatgtgaaygagtgggccagaacaaacactgtgattagtgtgacagtggacacctatttccaagtcagtagacgcctatttccatcatctctcctgtagctcgtgtatcatctgatacctttaatcgtcttttttgtgtgtgtcatccatggaatacaattaatcatctttcaatgggaaattgcccttcagtgtgggagcatgctgcttttgtcagaaacccaatagactgtgaaatacttttaccactcttgtcataatgtgtgtttttacttaatttttttgtctttactttttgaattagagagtatgactttgccagagcagtgtgttaatgtaaactaaattagttctggcataagggattttttgttttgaagttgcctagaggaagatttccttctctttaattcactgagccaccatagcattgctggctggagtgttcagctggtggacggttctccctaagcagatttgagaagtcattgctgcctgctggttcagacacaatactgtccctgttctctcttcttccccctctgtcccagaagagggcctgcacctgatcctccgtaattcatattgaagtctgcaggggtcctggcttaagttctgtttagaaatgcaaagctattgcattaatttataccttagggagaaagagaaggaaggtaaaacagcctaggaaaacagcagttgcagagtcctttgtgggtgatgcggtttaaattgcatgtgttctaaaatacactaaaatgttggaggttggagcatattccaaatcccactgcacaggctagtaaggcattcttgctcttgttcttggggtgagaggactctttttaaagggtttctaataaagtatttttatgtgattaaagtgcttgtaaccttgagactcttgagttgcaaatcttatcctctccccatgtgactagtcttctcaaagcagctgagctttttcctccttttcctttagcgaaggcttgtcaaatctcttgaagatctttgctcccagtatgatctgacagtccgaagctctactggcgatattatccagttcatttatggaggagatggcttagatcctgcagctatggagggaaaagatgaacctttggagtttaaaagggttctggacaacatcaaagtaagatttagcattatatctggggttagagtgtttttaaggatgtttctttaggacggaagtactgtttggactatcaattgcagttaataaatacttcagtatttataatcccaagcactggattagtatcttttttctttgtgttactctgtataattttccgatattaaaagggaagggccaggcacaatggcttatgcctgtgatcacagcactttgggaggccaaggcaggaggatcacttgaggccaggagtttaagactagcctgggcagcaaagtgagaccccgtctctataaaaaaaaraaaaaagttttgctttttttttttactttccaatatttaaaggaaaaaggccaagtgcagtggcttacacctagaatcctagcratttgggaggccaaggcaggagaatcacttgaggcgagaagtttgaggtcagcctgggcaacagaggaaaaactctatctctaaaaaaatattttttaaagaattagccagacatcgggcagatcacaagatcaagagatcgagaccatcctggccaacatggtgaaaccccatctctactaaagatacaaaaattagctgggtgtggtggtacgtgcctataatcccagctacttgggaggctgaggcaggagaatcacttgaaccagggagttggaggttgcaatgaactgagatcacaccactgcactccaacctggcaacagagcgagattccatctcaaaaaaaaaaaaaaaaaaaaaagaattagccagggatgatggcatgctcctaaagttccagctactcaggaggctggggcaggtgaatccttaagcccaggaatttgaggccacagtgagctgatcttaccactacattccagcctgggtgacagaccaagaccctgtcttaaaaaaaaaaaaaagatgaaaaaaaaagttgttttcagttgaaagtctagtgttggtagtaatcaaatgccaacagaagagggctttgtttggtttcgctctgtgtcaagtagagcatactagagaccagttttataagtcatgggcattgaaaagcaggcacacttcacatactttgagaatataacttggaacaacctttttggagagtagctggacaataccattctgagttttaaatacgtgtcccttttgacccagtagtttcccttacagaaactccttttgtcctctagaaatggtctaactatgccaagaatgttttttctacgctgcttacagtaaaggcaaaccatcagtagaggatagttcaaatacatgatggtctgtctatacaaaagaataataatgcagccattaaaacattgagtcaacttggacaaagcagaggagaggaaaaaagaggaaattctgctggggctcacgcttgtaatcctagtcctttgggaggctgaggcggtcatatcacttgaggtcaggagtttgaaaccagcctggccaacatggtgaaaccccgtctctactaaaaatacaaaaaaattaatcgtacgtggtggcgcatgcctgtagtcccagctactcgggaggctgaggcaagagaatcacttgaacctgggaggcagaggttgcagtgagccgagatggcgccattgcactccagccttggcaatccagcaagactccatctcaaaaaaaagagaaatttatgagcttcagaagtgggagaatattttcactcttgaaatgtttgagttttttaaataacagcttatatttttaatgtaaatctggtggggggcagtggggtggcgaaggctgggaagtgatgggacaacacctgctgaatagcccagaaatttttgcataggatggagtatccatttatccagttttcaccttcacatgaaaggtagagtccacaatttgttttgaaagaaaaatcacaggttgctaaaagctcaccttgggtaaggtcattttatcctttgtaagttctctcatctactaccgcctgctctctgtggcacccacacataatgcaattttcttttaatactcaaggcagtcttcccgtgtcccagtgagcctgctctcagcaaaaacgagctgatcctgaccacagagtccatcatgaagaagagtgagttcctctgctgccaggacagcttcctgcaggtgagctctgccaggtgctggctactgcacccagcctggctgtcgtaaagaactctgtttgccaagggctggcaagtggattttataagctggttgttttttaaggtagggttgttcctttgttagaaagttcaagaatgggccaggcatggtggctcatgcctgtaatcccagcactttgggaggccgaggcaggtggatcacttgaggtcaggagttcaaaaccagattggccaacacgatgagaccctgtctctactaaaaatacaaaaattagccgggcgtggtggcgggcacctgtaatcccagctcgggaggctgaggcaggagaatcgcttgaacctgagaggcggaggttgcagtacaccgggatggcaccactgcacttcagcctgggcaacagagcaagactccatctcaaaaaaaaaaaaaaaaatgacaggcagtcattcaaaaatggccaaggcaaaatctcaccagccaacaagcagaatttatctcatgactttcttagtttatgtctttcactcaagccatttccctattagaagaaaaatgtttttttcccctgttagaagaaaaatgctgattttgtttgagcgctgtccctaacaccagcctactacctactctatcttgtgagccaactcttccctcaatcattctgaatcccaataattattagtactagtagtcttgttttgataccatttattttaaactgctctttcttttgctgtattgtggatcaaaaatccattgaatcagccttttctattcttccagggagctgttactttgataccctcttaaggttttttggttcgtttgttttttgttttttttttatggttctgacctgctcaggcagctccttcatgtttataatcatggttaggatcaaaagcaaagggatacagaaatcagtaaatggtttcctttgtgtactaaatagtaattcaaatgtagcacaagatcagcaggccaaagaagaatgtatctctttccgtagatcaaaaataaaaacagcgagtgaagcttaaataagaatatttgtgttaaggaagctcctcgcttcttgtgttcatgtgtcaaggtgtgaaaggtgaaaaagagactcttccagattttaaaatcaagagtgtggcaaggctgggtgcctttgtctgtttttctcctccaaaggctttcttattctttttttttaactaacaaattagagttgtaatttggtttttcttcacgctcatgtttacgtatttatctgtttgtcctcaaagaccttaactgagacaggttatgaaagctataacgaggtaacgtacttagcatgctgtgaacgccaacagaaagggcccactccagcagcaccccagcatttgccagcgccagagagagcaggtttctgtcccggttctggcaaacactgctttgctttggactggttcctttcttgcccttgaaaaggtttaacacaggtgacctcctacccggcagcatttgtttattcagtgagcactggtttagccctcaccatatgtcacacagtccacagatcctggggatgcaaggatgactaaacatgtccttgccaccggcagctcacaatccgatgagctcagatttgctgagagggtccaaaatccactggccagaacagatgtgtctgagcccgtgaaatgttctccagccctagcccgtatcagagctgaggtgacagaggcactcctgagtggcattgagcccaggtccctgccagaggagaatgcccgtgctcataggcctgctgtggagcatgagacactaacttctggttaatcgtgtgatgaattgcctgccaatagccatgttgtgagttygttccctctagtatgcatgggttgactcagtgtgaatttttagcagattgtttcagttttcatttccaaaaagtgagctgtttttctttttttatttttaaacctaatttccagaacctttgtgtagggaaagtcattcagcaaacccacgggaaatgtgtccattggggtgaaagctgagctatgtcattcccagtgcctaagccggcagattgttttaggtgtgttaattttactccctatgtgtgcrcagtcccttgcagatgaaaaccttctgggtctaaggcttggccttaggttctgctcctgtttttcctgtgccaacaggtaaggcagcttttaacaactggtgatcaaatggcaacatctgggccaagagggctttcgggacctttctcaaaaggacccagccactgccaggcaaagccccctcttatactgaatatatagaggaaaaattcagtggcagcaagtgcaaatgcctttgaatattctgttagagccatgccagaagaggttgtcccactgccctctacagctttatttttcatctctggtttgcaaaaggtaactgtatctgaaaacacagtgtcagactcatcattaataacaaggaatcaggagagtttctctttaaaaagagtttcttgagaactctaaagttcttgcgaattaataaaagtttttttgttttttttttcctgagacagagtctcacaatctcggctcactgcaacctctgcctcctgggttcaagtgattctcctgcctcagcctcccaaatagctgggactacaggtgcgtgccaccatgcccagctaatttttgtatttttagtagagacggggtttcaccttgttggccaggctggtctccaactcctgacctcaggtgatccacctgcctcagcctcccaaagtgctgggattacaggcatgagctaccgcacccagctggtaaaacttcttaaataaaaagccctttctatgtagaacaatgattgggctgcagggtcaccctccgtgggcctctgcactttctcagtgggaagaaagagagtgggccaacacagagagtcatgagaaagcagtattcatgggaactgacagccaggatgtgttgggcccccgaggtagccccttggctgcctgggctcctgggagacagacggaatttcccagtaggcaaagattacatcgaagaaacccctgttcagagaaaagactttgaagaaagcatctgacttcgtggagtggttggttgccttggccaagcgctgacctcattcaggccttcagtgccttctgctctagggtggtggggctaaagccatgccacctcacagtgaggtcttgccaagctgggcagcagctggctgggaaaggcataagaccatgtggacacagatgctaaggctattttaacaggaacataaagttctagcagtttgcttgtagaaagggtagtaactagaaatggctagttaggaggctaatgagatttctttttgcaaggttaggatagaatggggctaggaagtcttaagctgtctgtggataccttataggattttatttttgcagaaatgggctcctggttcaggcttaggcattttcagccatgtaataggctgagtggactttgggcagggcatgctggccytctctctgggggaccctcagcctaccccagaatcaagaaacagaacctcatgaggcttctcggccaccacagtacgcagtctgccctcaagctgcttgtcctccatgtgtgggcatctgtactcatccagacacacagagcagctgaatgcctgcatttggccagagtgccattcaagcttaccgccactgtgatttccttgctgctacaaaggaggggcagtctatctcctcttccccatattctcagagactatatcatccctaggccacaccagagcagccgatgccagctcccgggatggcaggataatggcctctggaggatggttgctactacatggcaggtgccatcagctcaccctgagaattgctttaagagccagtctgtagtccgtgatgattgacccactgtgagcaggatgttaaccgctcctctgtaagtgctccttccctgtgagcactctccaggggaaggtgctggctgatcctggctttaggagtggtggtgggctgggtctatttcacagacacactgtaaatcctaaaacagatagttttacccatttgagtggttgccagaaaacctgagtcagggctgtagtctctagccctgctctgatcttccacctgtgtatttttcaccttcttcttgctctacttggtcatcctcccggggctgagagtgctgttcttaaatacagtgggaatcgcagcatatactgatgcttcacatctggctttgacaatggtttccaggaatccttacagacttctaattgtgtgtgggaagacagtgtaggcctaggcctgtggggagaggtggttaccagaggggaaaagataagctgggtttggggagtgttttctttgaaatgaaggtaagctcaaagtgtgtttgaaatgcatttactgtcaacaaagctatgctttagttggtagtatttaaactgagcataataccttcagaagaaaccctcaaaaattaatctgtagaagaacagtataaatgcttcagtcgtacctgtcttgagctgtgttcttatagccctcgtggcacgtgggagagcaagaacaaaggctcccacgcactttgtgggctctgtagatagtgccatgagagcagttggaggagaaggtcttagagacacattaaccaatggartgtgtgtctggggtatggacagtgtggtgtgttccttggaaaaccactttgtagtagaagcagtatccagattgggtcctttatactatatatggagctaacactaaratatgatggacttgtcatatacaactgaggtttatgaaatgaattatgtcatctgcatgactgtgaaacttacaaatgatgtttgctgtgtaatctttcaggaaataaaaaaattcattaagggggtctctgagaagatcaagaaaaccagagataaatatggcatcaatgataacggcacaacagaggtaatatccctccaagacgcgttagaaccccgagctgtttgyagttgmcgctggccctaactctgtgcttggcttgtattctcccagccccgtgtgctgtaccagctggaccgcatcacccccacccaagtagaaaagtttctggagacctgtagggacaagtacatgaggtagggatgcttttgtcttggactgacggtcatccacataggtctcacgtatcccttctgtttccccatgtgtacaaaaccctgcaccagctcacttgttaactgccagtatttgatcagattctgtcacattttctgtagggggtctgatgaattgccagtctgaatgctccaagataacggaaataattgcaaggaaatttcttagtgtcttctccccatggggaaactgctaacgaatatggcagatgccactgctctgtttgccatcagtaccattggttagcagactgcttagattttctgcatccattacatgctgaccacaagcagccatgcagaattgagttgcactgctgccccctctctgacctttactttcccctgtctgyacctatttctggtctatgccaggctttttctctgtcacagacataccctttccgaccctaatagcatctatattctctgttgaaaggtgataaccagaagcctctccccagcagttttgctggacttttctttggcatgctgcaatctcatccatacctttgccttctagggcacagatggagccaggttctgcagtgggtgctctgtgtgcccagagcattggtgagccaggcacccagatgaccctgaagactttccactttgcaggtgtggcctccatgaacatcaccctgggcgtgccccggattaaagagatcatcaacgcttccaaggccatcaggtgcctgctttcatttccttcttgttccacacakgcctgtcctgtttcctgagaaacaatsatycccgtgtcacatgcatatgtgtgatatcctcataggactgtgtcttaaactctgggtggcatgcttgctgtgttaatcctattttggtttttaaaaaagccactcaagaaaaagtctaaactggatacagtcaaaatagaagcaatggttttgttatggccacaagtaacatgaagagagaaaatgtttaaaatgactggaaaaattggagcaatgtgtcagtggagatttcatccttttgatgtcattattccagcctaactaggcctgactgaaatgtctgccacttgccctgtggtcatattctgtgagcccctggtgatttcatgatgggatttctagttgatctaaggctagaagaaatagaaatgtattacaatgccttcgatgacaaaaataatgatttttacctatgacctatatttaacaaaatgataatacgtagcattgaatgaaagatagtcggctgggcgcaatggctcacgcctgtaatcccagcactttgggaggctgaggcgggcagatcacgaggtcaggagatcaagacatcctggctaacatggtgaaaccccgtctctactaaaaatacaaaaaattagctgggcgtggtggcgagcgcctgtagtcccagctactccagaggctgaggcaggagaatggcatgaacctgggaggcagagcttgctcagtaaactggggttgctagtaacattatgattctaaatagcacttgggtttaacaaagcagtagtcctcaaacagcctcctcccttgtgctagtgccatttttcctttgcttctcaacagcactccaattatcacagcacagctagacaaggatgacgacgcggattatgctcgcctcgtgaaagggagaattgagaaaaccctcttgggagaggtaagaagaaatccctattgataacaagaaaactagctcagcaatgttgcaaggaagtgtaaaaatcagctgccatctattgaccagcctgtggcgtccacactactcaagctcttcaaaaaagcaagcagtcgtgtgctcttaggaaaggggaaagcggctgattaacagtctgatcttttgacactccagatttccgagtatattgaagaagtgtttcttcctgatgactgctttattctcgtcaagctctccctggaacggattaggcttctgagactggaagtgagtcacatarttaaatgtagagaggaagtcatcctgttagtccyaagataggtactgataaactagggcaagagctaagcaagacagaggaagcattgcagaaccttctgtgtggtttctggtttttgtgattctgttgtcccctcacattttctttctaaacctgaccttgatacaaatatacccatctaaagacacacagaaaattagttgaaattttgtgcagaccgcaataccagttcactgtgacacggtattatgataagtggtcttgttgtccctcttcccagtgtctggaaggaccctagggctggctgtgtcttactcatctgtggatccccagcrcccagcatggcagctagcctaggaagttcagtaaatgtgtttagatggggagattaacctggcttcttaaactggcatgcatgggtaataggcaacagttgaaagatgatcagcctttctcacaaacagaccaacttggggtacaaactgagtaacttcccgacaccctcttctttctctcgggtagttaaagctgtactagcccttaaaacacattctgtcagctcgttctctcacgcatcaagttcatatgttacccatataacagttgactcaaatgcagcaacctgctctccagtttggggatttctctagcctgtctcttgctgcctgccttgtggctcctttgcagaagagatgagttgtatccaggaacgtagcacatgaaccattgtgaaagtgtcaggtaaaggggaggccccacggaagcttttaattagcctggcctccaacctccagcctccctagagcttcccacagaggctgcgtgtgttgccatgaactgagcatgaattttcaagggcaaatattttgtcgtgggtgaaaaaaactactctttttatgaataaagcatagatatatatacacatatagtacataaaacatatgtagcatatttatggtattaatttcatggtgcgggtggggggtgcttagaacaaacctgactaaaaggacttcttagaggggcaacaatgaaataaacgaagaamaacactggaatcagtaacrcctacacctggccatgttgcaggtgaacgctgagacagtgagatattccatctgcacatccaagctccgtgtgaagcccggtgatgtggctgttcatggtgaggctgtggtgtgtgtcacccccagagagaacagcaagagctccatgtactacgtgctgcagttcctgaaagaggatctccccaaggtgaaacagamgtcgcttctcatggagacccagcatctccctgtggtgtgacacccagggctgggacctaagggctttgtcacttagtccgatttcttaatttcttcttggccttatccccaaggagttagtctgttagattcckctctgttctatcaaaaaactgatgttaggatgaggtgcagtcccctgaacaacttctgttctcccttatccctaaaactagctctagtgtgttaacagatgaccactgctgaaagctggggtgatcaaggtgatcagcccagggcatggctcaccccgtcctcacagctttctctgtctctgaatccaggtggtggtgcagggcattccagaggtgtccagagctgtcatccacattgacgagcagagtggaaaggagaagtacaagcttctggtggaaggtgataacctgcgggcagtcatggccacacacggtgtgaagggcacccgaaccacctccaataacacctatgaggtaccactcagcccacggggtcgccttagggttaggctgtcttccttgtgccatctgcaggccttccactgattcccagtatacttcttttttttttttttttttttttttttttgagatggagtcttgctctgttgcccaggctggagtgcagtggcgtgatctctgctcactgcaagctctgcctcccgggttcacgccattctcctgcctcagcctcccgagtagctgggactacaggcacccaccaccacgcccggctaatttttttttttttttttttttgtatttttagtagaaatggggtttcaccatgttagccaggatggtctcgatctcctgacctcatgatccgcccgcctcggcctcccaaagtgctgggattacaggcatgagccactgtgcccggcctcccagcatacttctctgaccatcccatttgccgtgggtctgcaactgaaaattgcccagcaatccatttctggaaaacggcacagggtttgctttgaaactgcagggcagaggagaaagtggagagaatttgcagtggcctcccggaaggggctgcttctgctcattactggctctctgtaggtggagaaaactctgggcatcgaggccgcccggacaacgatcatcaatgaaatccagtacaccatggtgaaccacggcatgagcatcgacaggaggcacgtgatgctgctctccgacctcatgacctacaaggtatgtgggcaggaggcccccgggctgcctgggcatcccgaaactcactttcaggagaataagcctgtggagtttctaagacatgtagaatacgctgctgtgaggaccatcatagagagaaaataagatgtgaacattgctcaaaaaccaaagtatgctggtcaggctgagtgtcctggtgaaatcccagtatgagagttacagcctcatggcaaactcatacccagtcggtggagtgaagagagctggagcttggttccgtcctcatcctgaatgtcatcctaaagcaaaattagccactgccaaagcccagagagtcccatggcaagttgaggtgtttctttcttattaaacccatccatcactcttctgtagccattcccaggaaaaaataagttaacatgatctgaagttgggggcgggaggctgaggtgggttggttggtttgattttttttttctctcttttccaaaaaaaacgtatttccctctagctgtgccttagggcagcaggttttcataaggcttccccaaacaagtcgatagagtattacagactatttagaaaccaggtgagggaaatggcccatttcctaccaccctgaggctgtcggttcgatgtcttctgtgaagtcctattctttatgcatcttttgctttagtcgcaggaaactgtgtgcatgcagtttttgttgtgactttttgtttaacatcacaaatgttttccatcttgtttcatggttttaataaatatactttttaaattatggcacaatattcctttgagtagaattacctaaatttaattaattctcttcatacttgaggtttttacattcttttatttttagttctttgagccataagaaatctcttcagaaatactccccttttttaaagttagtctctgaattctagttctcaattcttctttgttctgatggcgtctggatgcgagtgtgaagtttcatgttgccgacgattgaccacctcaatgggacacagagggcggacccatagctcctcarggcctttcacacctgacgttgggtcttggaggatttttgttgattgtattgaaggtgcaccgtgctttggtttcgagcttttgccattggtgtgagtaccacygtgactctttctcccttgacgcagggtgaagtcctgggcatcactaggtttggcctggccaagatgaaggagagtgtgctgatgctggcctcctttgagaagacggctgaccatctctttgacgctgcctacttcgggcagaaggactctgtgtgtggtaggtttgatgtttctatgaacagcatcaaaggcctttactatttacaaatagaccatggctaggcttccaagggaatgaaaaaaactgagtggcagagcgtttattttttcaagaataatgtcaatagacacraattggaactgctggatcttttatctccaaatcctgactgtagcatcctgcatccccgtttacatctgttggatgacttccctctgtcagcacagatggtttttggtccacgaagcaaagagcaaccctgggcatgtaagaatttttctagcccttgactttgwagtcagccacactgatcctgacccctgtgtgtgacaccagggctgacaggagcaggtactggctgggcrctgggcagagcagagtgtcctactgtccttgggaggtggccatcaatgcctgctgagcccctgtgccaggcatcatatgtgtcaagtatctctacccacccgtggggtgtggatattaagccctttgacaagtcagaagaccaaggtgacctcgcttgctgtcgagtccaccagcagagccttgctctgcaccatgcctcatccccgccactcgacaaaacatggctttatggggctgtgctggcctgggggagagggagcacgaggggaactctccccartgtctggcttccctgcctcttccgtgagaccagcactgactgctgagctttgctcgagcctttctgattccgcaggaagaccctgcaggcttggggtgagagctggtaaggggctggggttcgagagggccagcaacctgccccggggcacacaccagtcaggcccacacagggattccaagtctggctgctgtttccaggccagagctctgcttcccagtagccctttgctctctcacctcctgctcttgtacagattggcatcattagagtatatacccattttttgcctctaagattaactgtttctcttttcagaagggacagggattggagatggagggaaataaatattacataagtctttaagataaagaagggtgagagcgggcatggtgttgctattgtcccagctactcgggaggctgaggcaggacgatcacttgagcccaggagtttgaggccaggctgggcaacataatgagaactcgtgtctatttaaatatttttaaaatcaaaaaacaagcgtgggccgggcgcggtggctcacgcctgtaatcccagcactttgggaggccaaggcgggtggatcacgaggtcaggagttcaagaccaacctggccaagatggtgagaccccgtctctactaaaaaaaatataaaaattagctgggcacggtggcaggcacctgtaatcccagctactcgggaggctgaggcaggagaatctcttgaacctgggaggcagaggttgcagtgagccgagattgcaccactgcactctagcctgagcaacagagcaggactccgtctcaaaaaaaaaaaaaaaaaactagcatgaagggaaaagaaaaggagcagcagttagaatggggccagagggaggtacacagaagactggaagaaagcccaaggccaagagaagagcaagtctgcctgacaatagggctgagacccagcactcaagcctgacacctggaaaccgggcctttgccgcagctctgcggccccatacaccagcacctttctccaccaccagtctccttgactgcctggcactgccaccccacccccaatttgaagttttcccctcctcctggtccttcagcacattgtaacccagtgttcgccctcattgcatgttggtctttaatttagttgtttgcctctccggttccttggtagcacaaagtctacaacacagtagccatttgcttgctcatcgtagactcaagccttatgccaggttgacatggggcttggagaaagaatctgcaccacccccttgatcctgtaactctataggtgccctgccttctgggtgtttctcatcagggctgtagatcatgaaggctcagatgctcttaagcctggcctggccccttcccctgagcacagctaacagctgcctaccgcagtttccaaggggattgtattctgctcactactgtcccagttgtttgcttttcttggaggctctaagttaaggaagcactgggtggcaaacttagagtttcctaagcatccttcagtattcttgctaagttgtgttctcaaaggcagggccctcccagggtgcctttggctcaggtgggagaggagaactggaggagctgactctgtctccaacaagctcckgggctgtgagcaagccctgcccttccctgaaagtgcagaatccccctgtctgcactccacagccaccctttttagatgggaaggaaagggatttgccaaagttcagttgatgtggagtggcgctgggactcacatcctaattttctgacacttaagccaatagtctttcttcgtgaaaatgtaccttgtgtttagagrctctctgatgttcattctggttggtttcaggggtgtctgagtgcatcatcatgggaatcccaatgaacattggaaccgggctcttcaagctgcttcacaaggctgacagggacccgaaccctcccaagaggcccctgatcttcgacacaaatgaattccacatcccccttgtcacatagtccaaagaaagaggggaccatgcctgaccttgactccttgtcctgtctccagctgatgtataaagagttttgtgctccctgggacgggggtcctgaggtccccacctatgccagcaatcagagaagccctcttggcatccccaggagcagcttctcctctgatagggtgcagctcacaccagtgaccctgactgtgccacrctgctcgggagagctgagggttttattgtttgcttgcttgaaacctaatctatagacggccccacagctcstgcacacactgcttccctggacttaaagcccagccaggtgtcatggtccatcccagctcactgcatacatccatcggctccccatggtgtcttcacacctgacgatgagccaggcctgagccccacacaggccagggcacattcttggattttccattccttggtcatgctggaatctctcaatgtgacatacttatgtaaatattgttactattatttatttgttccatttgagggatttggaatttttgttattttagttttatttttgaaaccaagcatctatagaaaccaagaaagtcagcatgtaagcgtcactggaaaaactggtttaagcaaatagagccgtctgggatttgtaactgaggtgcaactgtcatgaggcccaggcagctctgtaacatcttctatagatgcccctggctaccctgttgttttcatctacctcagacccctatcatggggctctaccctgtgacaagagccaaacccattctccatggcctatggaagcctcactggagtttggggcctgctgcaatggggatgagatggttttttgtagaattatacttacgttccttggatgatctctagttgattttttaagttctgagttgatgctgttaaggtacccggggtagccattggttcttggatctgtgttagaatgagtgctttcccttcctactgatgtgattgtggattaggaattcgtgaccgagtgatttttggccagtggttgggtttaaaattctattaaaatttgtagtttgggctgggtgctgtggctcatacctataatcccagcactttgggaggccgaggggggcagatcacttgagcccaggagttcgagagcagcctgggcaacatgacgaaaccccgtctctacagagaatacaaaaattagccaggcatggtggcccatgcctgtagtacctgctattggtaaggctgaggtggaaggttcacttgagcctgggaggtggaggttgtagtgagccaagatcgtgccactacactccagcctgggcaacaaagcaagaccttgtctcaaaaaaaaaaaagaaaaaaattaagcgtaaaaaaaaattagtttttataaaaaattatagtttgaccttttgatttccctgcatctacaaggtagacctattaacttctcttggggtatcagtgatgtggraaaaaaatgccatttttcttaatgtttaacccccctttatctttgaattgagctagagcctggtttaggacaaaggattaagtttgttaatgaacactaattcagggcttctacttgagaccccaccgagatcaccagttctcatgtaacctgggaagagccataaaggggtaccccccaccccaactgccttcctggaagcatgcctgggaagtaagctgtaggcctgatccgagccaggaccactgggatccgtgcaaaggccaggggagggtagaattgaatcataggagtgaactccrgcacctgttgtcttctgcrggtgacgcacactttaaatggaagagaggttgtggctataacttgtggctgggaataataaagatggcaccgccaaggarcctcaccttgcgtgagtgagtactcagttgggcgctgcagggtctggagtctgtgtgagacgtgtgtgattgtgatgggtgcgaatcagcgtatagcacttgrgaacaaggcagaccttggagcagaatggttatgtgaaggatcacatcacccatgggtagggggggaagtcatacgtcctggaggtgctggtcctcctcctggaactgccagccttgctaggactatcaacatcaacagcattgcctggtaaaccctactgtttgtgctccccactgtgtcccatgactggtgttaaaattctccctactttgatcatctgccctgcccaggccttgggctttatgccagcacagagctcaaaggccaggtagcagcacatcctcaagcatgagagctcaaagggttacatttgagtctctgtacctgcttggaagaaataaaaatacgtgtgaattccatctcatccatgaatagttacaaattcttgactagcattctgtccagttctttgccatttttacgtcttttttacaagggagattaaaatagctcctgactcagttacagctccctgcagtgttcagcactttaggggtgggagagacattctggagtccttcagtatatatatgtgtcagttaaactatggtgccgtgtttctatttcagggtttatccatgtgtattcccattgattcatgtctgattgaacctggcattgtatgtttacttttcttgatttttgctgtctgttggcagacctctttatttttcagccaaaacccaagagaggaaatatttgcgttacctaaaactatagcagaatcatccttatgggttgtgaaaaaggacgttggccttgtatgagttctaactcctagaatgagaaccaacccccgtcaggagctcacctcttcgggtgctggaggtcaacagtgaatgccccagttacccccacccctgtgacttagaaatgtaggaaataaagtgccctctgagatgcagctaatccagtcccagtaggaggcgctgaaaggactcaagtctggagtctgaagggccgtctggccaggatcaggtgcatagcttaacttttattcattcaacaaagatttaaggcttgctacttccaaggcactgttctaggtattaggggtgcagcagtaaacacaataggtgaatcagatgttaatacatctggccaggcacggtggttcacgcctgtaattccagcactttgggaggccgaggcgagtggatcacctgaggtcaggagttggagaccagcctggccaacatggtgaaaccccgtctctactaaaaatagaaaaattagctgggtgtggtggcacgtgcctgtaatcccagctactggggaggctgaggtaggagaattgcttgaaccaaggagacagaggttgcagtgagccgagatcacaccattgcactccagcctgggagacagagcgagactccatctcagaaaaaaaaaaaaaaaaaaaaaaaaagatgttaatacatctaaaaggaattccacagaagcgggtgaagcaaaaaggctcaggttcagtgtgcagaagtgtgtccagcacactctggggtggaagctgcagatcaagggattgtgctcccgtgggcacatcaggcccaccagggtaaagaaaggtccttctgtggctgcagccctctggttccaacccctcccacagggcctctcatgacactaatttggcctccttaccttaggcttggattctggggagtgtgccctgagcgaggacacaagcctgcagtcactgggaaacgttgccaccatcctttcctcaacctactggcagtgttagcgtgtgaacatttgaatccattaatatttgctacacttctgctctgtgccaggcagtgcactaggcccttggggaaggtccctgcatgaatggagcttaccatctggtcagggtcatcttgttaagagcctgagttctacaatcagtgtcaggatttaaatcccaactccccctttcttttttttatttttataatttttttttttattttaaatagagacaggtcttgctatatgttgcccagctggtctcgaacacctgggctcaagcaatcctctcaaagtgctgggattacaggcgtgagccgccatgcccagcgtcaattctccctttccatctggtgcacatgaacaaattacttaacctctccttgcctcactttactcatttataagctaggaatactgtttagtagtgtttgactcattgggtcattgtgagttttaaacgtgattacacataaaaaggtcttagtacagtgcctggcacataatacacattaaatgtttgcaattattaatacagtgacttttttttttactgaaaaacatggtctgtgaattcacaactaaaaaccaatcccctggctctctttatttgaccctaagtggagcttggtggacttgggatccagcctccctagacataatgactacccagctgtctgctcaatcagtaggtcgtgggaagtattttacatggggggggagaagggttcgggaaggggatggatgtggccactgtgtggttgagggcttgaacactttaatgcaggccataaggtaagcgtgatctcattttagagtcacaggtagtaagaccagaataattcagacaggcaggtttttttgtagaggtatggatgttgacaacagctatgtatttagattatgtaagaaggtatcccataagggagaacttaacatttttctctctctttaaaagaatatattagggccgggcacagtggctcatgcctataatcccaacactttgggaggctgaggctggtggatcatttgaggtcaggagtttaagaccagcctggccaacatggtgaaaccccgtctctactaaaaatacaaaaattagccgggtactagtggtacacacctgtaatcccagctactcaggaggctgaggcaggagaatcacttgatcctgggaggcagaggttgtgatgagccaagatcacgccactgtacttcagtatgggtaacagagtgagaccctgttaaaaaaaaaaaaaaaagaagaagaagaagaatggaacagaaaatgggtatgacaaggacagaggtaggaagtgaccctatgttttttgtttgtttgttttcccagacaggttcatgctctgtcgcccaggctggagtagagtggcgtgatgatctcgggtcgctgcaacctcttcacctcccaggctcaagcagtccttcccatctcagcctccagagcgagtaggactacaggcacattgcccagctaatttttctttctttttttttttttttttttttggtagagatggggtttcaccatgttgcccaggcttcactctgttctattgtacctttctaattttgtaccttctgaaggtcttgccagtttttgtttttttttttaatcaatacctagcagcctgggcaacatggcaaaaccccatctctacaaaaaatacaaaaaaattaactgggcatcatggctcacatctgtggtcccagctgaggtgggaggatcaattgagcccaggaggtggaggctgcagtgagccaagatccactgcattccggcctgggcaacacagtgagaccctgtctcaaaaaaataaatcaacagctgatggtaaagaaatccagtcatcttggagcagaccctgtccgggaaggtacttgagtgttctcaaggtagttgagtggtcccttccagtgatagcaacgtaaggctggtaggcaccagtcaccagttaggacaaggtgaccaaaaaatgcaagtcaacaagcctgaaatacataggattttcttttctgacatgaaaagtccacagtaggcattccaaggctgatacgacagttcaccaagttgtcggggagggacccaggcccctcccagccttctgctacaccacccctccaccattcctcatggttcaatgtggctgctgaggttccaggcattccagccaggagaaggggaaagagacatagcacttccctttaaggaaagttcccaaaagttacttgacacttctgtttacatcccatgagccagaacttacgtagccaaacccagctccagagaggctggaaaatgtttggactctgggtggccatgtgcctagctaaaaatagacgcctctgttagcaaagaaagagggggagggccacaggaagtggaggatgatcgtatctctgcctctgatgggcaggacctttctttttttcttttttggcttgacaaaggtcagaatatccccctaatccctcagaaaaaagagactgagaccctgatcccttcattctcccttttcctttccccttcttgcaaatttcatgcttgagttacggtggggtttttttgttttgttttgttttaaatatataaactgacatttaaattagatcacattccctttgcaggctgtttaaaatgtttcagggctgatggaaaatgtgactgtcaaacattcattcaacaaataacacttttttgaccccctactatatcctggcgccaataccaggtcctgggtttagaatgatgagcaatattcctatggctcttttccttgtggaattaatctagtcacagcactgtccagcagtactgtagtatatagtaatatagatgacagtaattatgtaagtcatatgtaatttgtttttgtttttgtttttgagatggagtcttgatctgttgcccaggctagagtgcagtggcgcagtcttggctcactgcaacctccacctcctgggttcaagcaattttcctgtctcagccacccaagtagctggcagtacaggcacacgccactatgcccagctaattttttcatatttttagtagagatggggtttcaccatattggtcagactggtcttgaactcctgacctcacgtgatccacccacctcggcctcccaaagtactgggattacaggtgtgagccaccactcctggcccatatgtaattttaaatctagtattggccaggtatggtagctcacgtctgtaatcccagcactttgggaggctgaggcaggagtactgcttgaatccaggagtttgagaccatcctgagcaacatgtcaaaaccctgtctttacaaagaatacaaaacattatccaggcatggtggcacgcacttgtaatcccagctacttgggaggctgaggtgggaggatcacctgagcctagggagaaaaaatgagaaattaattttaacaatgcattttatttaacccaacgtacccaaaatgtcatttcaacatgtaatcaatataaaaatgactgagatattttacactcttattttcatactaagttttccaattccagtgtctattttacacttagcacatagcgagtttcacatgctcagtagccacatagcctaggggttggccattcagctcctccatttactctccaagaactttccagtaaatgcttcctggggcttaggctaaccagaaatgattttctatttcctgctagcctggccccaaccctgagacctgtatgaaggtggatagtccacactcagaaaagagaagcaggatggtagtcatggaagctggaatctgccaaggagtatggaacaactcaccagccaaatgaactcgtcctaaaaatatggatctaatttttttaaaaaagaaaaggccaagtgcagtggctcacacccataatcccagcatcccagcacttgggaggccgaggtagatggatcacttgaggtcaggagttcgagatcagcctggccaacatggtgacaccccatctctactaaagatacaaaaattagccaggcatggtggcatgtgcctgtagtcccagctactcgggaggctgaagcatgagaatcgcttggacctgggaggcagaggctgcggtgagccaaaattgcgccaatgcactccagcctgggtgacagaagaagaccctgtttcagggggaaaaaaaagaaaaagaaaggaaagggaaaaaacatgaagagagcccagtgtatccagacccgagtctcatcaccttctcaggaagctttttgggttgtccaggccttaagtaggcctgtgcttccaaacttcatttctgggaggagtgccagtgggctggggaagtcggaggctagaagaagcctgttcttgtaccttgcagtctgttccaccaccgaggaacaggcctgacccgagtggcctgcagtaaagctccgagtcagggagcatggtataatcacctgacactggtgttacaggtaaatcacaatctctccccatagacaacatgatcttcctcatgtacaagataagctacttattcagtaagacagcactcagggaagtatgaatttgcagatctggtgataaatccactggtctggcagaaatggacctggactgggatagccatgactccagttctagccacctttctgcctgccattagcggcattgccttcggcaggctgcctcccttctgcatctgtttcccagtctatatagtggagattaaagtctcagccatgcatttctgcttccaagcatccgtgaggcatctagaagctggaaagctttgtacatcgcttaggcagaacacgcggagggagctggtcactgctgatggagtctcaagtattggctagctccttccatacctcaccctcttacctttcaggaattgtcctgggacctgaagctgagccccaagacggtgcctgggacccccccccaacccggccctggtgtcagtgtgtgccacagcttaccctgctgttctctaggccccttccctaatactgaaactactgtctaacctgggtggtttttttttttttgcattttggaggggggatggggagaggggggacagttttgttctttttgcccaggctggagtgcaatggcatgatctcagctcactgcaacctctgcctcctgggttcaaatgattctcctgcctcagcctcctaagtagctgagattacaggcacacaccaccatgcccggctaattttggtatttttagtagaaatggggtttcaccatgttggccaggctggtctcgaactcctgacctcaggtgatccacccaccttggcatcccaaaatgctggaattacaggcatgaagcactgcgcccggccatggatgttttgttttgctaattgtctgcctctcgctggtcgaatataagctccatgaggacaggggttttgttttttaattcactgctgtattcccaatgcttagcacacagtgcctggcacatagtagccactttaaacacatcggtcaaataaatgaatatatgaaggagtggattccatcttaaattcccttttagaatttgacgtcaaggaggagtgagggccttggagcccagcaggcctggagtggaatccctgcttggttactgcatagctccaagttgcccccatcctgatcagagttaagatgtcctgctggctgcagggtctccctatttaaggactgcacaagcataactgcctgttgtcctcccaccacttcacaaaaggctcaattccaattttgcccaaagagggcccctcacagggccagaccaagggcatcgggctctgaccaccatctcccacctccccacattttctgccttcgggcctgggccccaaccctggccccaaacacaagagccagagccaaacacgtctagcatataccaccacgggtgatttatttaagggtctccaaataatcgcttaagtgtcaccatggcaacctgaagagttgccatggagattggagcaggaaacgtcc

SEQ ID NO: 95222 - DNA, 189710 bp, Homo sapiens
  misc_feature (1)...(189710): n = A,T,C or G
gatctgcctgcctcgacctcccaaagtgctaggattacaggcgtgagccactgcaccctgccaagttccctgtttccttcttgcctcatagatcctggaccaagtgctggagagtgggcatccgggaacatcacaggagcattttttttttaaacccataaatgcctgttctctctagccaaaggatcaggaaaggggcaacctagcaagagagaaaacttttagaaaataaatgccctattccaaccaaacattgaagaaaacatatttgacctcaccccttccctgtccataaaggctttgaatagagagcctagactgccatcttcactctgttgtaacaatgcacccctcatgacctcactccctgctgagaaggagtcagagaagaccacgtggccaagtggagacccagggctttaatccctgcccagtcaacagaatggacagcacaaaaataaacaaaaaaccatgacccaacaataggcaagggcattaagttgagtaaaaaagccaatctcaaaagggcactatattagtccattttcatgctgctgataaagacatacctgagactgggcagaaaaagaggtttaattggacttacagttccacatggctggggaggcctcagaatcatggcaggaggtgaaaggcactttttacatggcggcggcaagagaaaaaaaaaagaggaagatgcaaaagcggaaatccctgataaaaccatcagatctcgtgagacttattcactaccacaagaacagtacgggggaactgcccccaagattcaaattatctcccactgggtccctcctacaacacatgagaattatgagagtacaattcaagatgagatttgggtggggacacagagccaaaccataacagccacatactgtatgattccatttatacgacatccatagccacatactgtatgattccatttacacaactatagagacagggaacagataagtggttgccaggggttagagatagtgagggtggggaagagggtgtggctataaaggagatctttgtggtgatgaaatactacttgatatagtaggatgatttgggatcctaatgtctcaaaatggggtcactcctatcaagtagtattgaggccacagtgaagttgtttactcctcaaagtgctaaatgtgtactcctcaaagtgctaaacgtgtgtgtgtaatggcttgaggtgataacacctgctcttgcctggtaccacctgagacctgaaatgaactgacagaaattgaaaagtggctgagttaatgacagtggacatatctgagaggatcctgaaagcagcaagcacctggtcttagcctagatgccttaagaggctctgcccatgagaactgtgaggtcatctcccaacttggcaacggtcactgcgggctctgcctgagagaagcagaagtggtgaccccccacccccacacctgaccaacatctgaaggacttctgtacccgctggacatgtctgtcagtgcgttggtctcccaagcccatcactgtggttcattacccacctctgatgactgcctatgtgttaaatattaattacataattgatggtgtgtgaagacctcacaataaaccatgaattcaaacatacataattggctactgagtcattgtgaaacctctcagctttggtcagagttagcaaacctaggccataggaaattaacataacagctctgtatcttgattcgggtggtagttacaggaatcaactcgtggtaaaatggcatagagctacacacacacattgcaccaatgtcaatttcctggttttgatattatactacagttatataaggtgtaatcattgggggaaactgcaactattagtcactgttacctgccccacctcccacaaatgcctaaaatgtactgctctgatcaccacaaggctttgatggcatcctgactgggatgctacctccatctccccagggctgccttcacctcgctgacatgacatgatcaccaccaaatggatgaatgtaccaaggttcctgcctgcatccaatttgcgttctcttgttcctgggcctcacaacagtgagtggtcatgacagcgatgatgtctacgggcaggggagctatgagacgaagaagtgcatgcatgttcctgaggctgcagccacaagacagagctgccaggcctccgtatggcaaagcaaacacaaggagtaaaaaatcataaaataatggtgctttgcattctgcatgattccacatacttcgtatcactggacatctgtgtgggctagtttgtgtctgtccctctctcatccattaccctcttctgttccttcccacaagtgggtgcttgacacacaattctgtataaacaacctctactcttctcccttccctgcctaccatgtgggtcagttgttcctggacagtttaccctgcttcaggcaacccccccacatctctccattaaaccaaatccaccctaggtgccattcatttggtttctaggtagtcaggaacaaacaatttggccttattcataaactgaaagaatattagcatcatttagataacaaccattttaaagggggcctgatagaaataatgccctgaattaataagtctactccaaggagcagctcccctggtgtgcttccgggagtcgggggctgtggtgaggggatgtcagggcagataggctatttcaggtaggattgttcaatttcaatgtgtctccattacttactcttctaggggttaatttcttctatggtaagatcatagaaatcatgaaaaatccttacaaatccataaaataatgaaacaaatcttgaatcctaccattatccagcccaaagacaatgtcccttaccccacaggcataccacgtgcattactggaggcaaccaatgagtcctggggcagagccaaagaaaaacaagattaacactgggaaagaaagcattcttactctggattccctggtctatgccctttcaactattccttcttggcaaatcttgactttgttgtaaagaatctagttttttcctgctctcaaatatgcttacccttttctaccccattttctgttctgttagcaggtacagtgaagacacattttggaatgaataggagtagacttggattgttgaagggtaaatgtgcttggttataaaaacagttgtgaaaagtgcatttgattacacggtagaattatgtgcaaacagcacacaatttttcatttgtcttacaggtagttttcattgcaaagaacttgttgcaagcagattaaaaaggtactattttcctgcgctatttaatggtacacagttatctttttttttaattgctttattgaggtaattgcacataccataaaatccacatttcaagtgcacagttcaggtagttttcgtaaatctacaaccattaccacaatccaattttagaacatttatatcactgcaaagagatctcttgtgcccctttgcagtcattccccatatctacccccagctctagaccactgattatctgtatcgatttgccttttctagatatcttacatagtcaatgtgtcacttaatgacaggggtatgttttgggaaatgcattgttaggcaattctgtcattgtgagaatatcatacagtatactcacaaacctagatggtatagcctactacacacctaggctacatggtacagcttattgctcctaggctacagacctgtacagcatgggactgtactgaataccgcaggcaattgttaacacaatggtatttgtgtatctaaacacagaaaaggtaacccattgcccaacgacattatgaaggctacctcacttggtgatagtaacttttcagctgcatataatcttatgggaccaccattgtacaggtgacccatcattgaccggggcatggctgtaaatagatcctacaatacaggctcttacacatctagcttcttccacttagcttatcgtttttgaggttcctctatgttgtatcttctatgactacttcgttccttttactgagtagtagtccactgtatggcatatactgcattttatccacgcagcagtttctggacatttggactgtttctacttcttggctatcatgaataacactgttattaatattcatgtacaagttactgtatgaatttatcttcagttctctcaggcatacgcctaggagtggaattgttgggtgatagaatacttcatgtgtaactttttaaaaaacctggaaaactgttttccaaagtggctgcaccattttacatttccataggcaacgtatgagggttctaatttctccatctcttcaccaacactgctattgtctgtctgtcttttgtactacagccagtgtagtgggtgtcaagaacttccttgttgtgcttctaatttgcatttccctattaactaatgatgttgaacacctttttatgtaattgttgatcatttaaatatctttggtaaaacgtctattcaattgttttgcccatttaaaattggactattagtcttattactgagttgtaagagttcttcatacattctggctacaagtcctttaacagatatatgatttgccaatcttttctcccaagataagagtattttttaacgatgacaactttattccaaagtgaagtttccttgtggaacagtaacaggctagtcatgattgactttgtttcaaaatattatataagtacttttaaaatagtaacttttaacttttattttagaatacttggaagatgtagacaagcaaaaacaggatactaaaattccagagataatcttcaggtttttttttttttttttcggacagccttttggttatgtgagaggtaatataaatttaaaagtgggaccacttaaatattaagtaatctcttattgcagctcttggttggcaagcaataagacacaaacctctgaattatttaagtagaaaattaatttattaaaagaatggttggttatgcctcgcgtgagtgacagagccagggttttgtcttctatcttcagggcagggtacagctgggtattggaattgtaccaagcagtgtttcccaagggggcacagagggagggcccctctccgggcactgtgcgggagccacttccccaaacagtccccgttctgcaagggccccggcgttgctgcccccgagacccgggtgcctgccccggcggtgcgggtcgcgggcctccgctctcgccgtcctccctcagtcccgggcctcctgcatcgcggtcgccaggcgcaggctcagcgcggctgacagcgctccagctcccgcgctcgcggccgcctcaggcagccgaccgggttggggcggccccgcgctcggcccgggagccgatcccctgtgagggctcctccatctcctcccaccccgtgacctgctcgacgcgcaacagcccgagttgtctttaacttgctgcggcagcctctttgtcccgacccagggtcgggggcacctctcggcctggcccggccctgcccgtagccgtgtgagcgggggccgggactgggcggtcggtccgggaggggcgccgcgccccgaccccggagtcccgagcccgaggggagcgtcgcggccccgcggtgggctcgccgcagcggagggggcgcgcatccgggtgagcgccggcgcccccgcctcccccgcgcagccgcacgggccgccgccgccgctgccgccgggctagcagccaagggaggacccgcccccgagcggcctgcggggcnnnnnnnnnnnnnnnnnnnncccccccccccccggggggggggcaagggggcggcccggagtagcgcgccgagcccgcgaggcccgggcgcggaggcgggagcgggcgcggcggagtcggggcccggaccggacccgcccgcccgccgggggagccgccggcagtggccgaggaggcggcgcggcggacggcggcccgagagtagcgcccgcgctgcggcccgcgggaccgcgccgcgaccgcccgggccggcccggaggagcgcctgccgccgccgccgccgccgcgcgcctagcgaggtgagtgttcgcccgcggccgggcagtcccggagccgcagcggctcgcgcgggtcggaggtggagaaagaggccccgccgcggccgcgtccccggtccctttgtggccggcgctgcctggggccggggcgcgggcacgctcggcgcgggttcgggtctgggaccccggtgccgttggacacgcggcgtctcyggttggcagctttggcgagcagcgagtttccgtcctagtttgacattgagttagaaccgtttttctttagaagacggaagtttgttttattgacaaaaataaagctaaatatggcttctgggttcggccgtgtggtacttgcaaccgcggtgccagcctgaccctcgcggcgccacgggggaggggaagacacgccggcagcgggggagggggcttcccggcccgctgcccccgaggaggacccggacctraattagcaaatgtttgtggttgggaagtagcgggctttaggtaatgtagtagcttttccgcttttcctggaagaatgaatgaatgagatgtcatttactcatccataatcaatacgttgcccatttaagcatttaccaggaattgggatgatttgcattgtcattgcttctcttatctggtcagccttgctagatgaggttcccttactccccagatttgtgaccttgtcctcattctcaaagccactgagctaaccaacccgtctaccaaactcacttggcatttttttggtcaagtgggcaataggcaaagtagtctttctgaactgtttctggagggcagagaatgtcactttgatcatatcttatgtttaatacattgctttataatcgtgtcaagaacgctgagagttaggaggtcttgtcatttcacagatgaaatagtgaaggccctaagaagttgcaacttttcaggtcacaatctgagcagcagagttgggattcaaacctagaccttgttagtccagtcctctttacatcacatctgtgtccagacctggactgtccagcgtgggagccactaaccacatgtgactattaaaattaaattttaaaaattcagctcctcggtcacagtagccacatttcaagtgttccatagctaaatgtggttctttgctacagttgaacagccctggtctaaattatacatacatttgttgtgtcagtaaatatttactgaatgcgatctgtctatgaggcacagttttaagttctgggtacatggtgaataagggagacacaatgtccttgccctattggaattgacattttacatgatcctttgaggatgtttccatggtactccgagtcctgctattccaagtgtggatggtgtaccagcagcatccctgtcacctcagactcaagtaatgcagaatgtgaagccccgctgcacatcaactgaatcagtatctgctttaccaggatttcaagttatttgtgtgcactttgaaacctgagaagcctttgttcagcgtgctggtgataactgcgtttaatgactgctctgctggtttgtttggtgcctcttaagcagcagactgcaaaactcttgggagcactcaccatttatgcaaatacttgttaaatgcctggctttctcaatagagtttaagctttatgagagcagagattgtggcttccttttccagccatgtatcactgaagactttacagtgcctggtaagcaataagcacttggtataaatgcttgttggataaacgaatgagtgtgctaggatacttaagcgtggttgttagctgggtgtggtggcatgcgtctgtagtcctagctattccagagtgacagcgcgagaccctgtctcaaaaaactgaaaacccaacaacaacaaaactgattgttaatcccaagcagttacaggcaaggtaattctcatgacatcaggtgagagagcatgggaccagagtcaaaatgaagatagatctgtttgtaactttcagtgggacgctccagctactctgactggagttttgctcctggctcacttgcatgccctatccctcttttaactaatataataataattttgaatctgaatcacacattagtgcttcatatagtttttaaaaaattttgtatttttttaggtagctaaattccagacattatttggatttcaccagtttttccgttaatatcttctttctgttccagaatccagtccagtgtactacattgtattttgacatcatgtttctttaatatttggtttgtgatagtttctgtcttgtctggttttccataactttggtagttttgaggaatactgtcctggctttctttgatggacagctttccatactcattctcatgaaaggtcacaatcaggttgacgctgtttctgcttttacttatttatttatgtaatacatctgtcatgcttatgtaacatacaacttyggtacttttttttcagtaacagatttcttggatacagttcctaattggttgagatgcagaagagtgttataccattgcagttatataccaagttttattttttgatgggttaagagctgggctgaggtagaggaggaaggaaagaggagagatcagttaaaagaggcagttaggcaaagagggaccaaggcaaagggagtgacagataatggaggaagaggagtgcggcaacttcgtagaagagagttaggagtgactacttactgtttgttcatttattcaattaatatttattgactcagcagtcccagtctctctggcaccagggaccagttttgtggaagacrgtttttccgtggaccaggttgggggccaggggaatggtttcgggatgaaaccgttacacctcagatcatcaggcattagattctcataagtcttgtgcaacctagatccctcatatgtaaaattcacagtagtgtttgccctatgagaatttaatgccgctggtgatctgaccggaaggaggtggagctcaggcagtaatgctcgcttgcccactgctcacctcctgctgtgtggccaggtttctaacaggccacagactggtactggttcatggcttgggggttggggacccctgtatggagcgattaatgtgtgccacacccagtgctgtagtctcaagataactgggggtggatagcattaaataaacatgcaaataagtacataaatacaatttgtgattattgctacacattagcagtaaaggatgctggagagattgtaggtgggggaacttcaggttggctgggttggggaggacggcttctctgggtatgtaacatttaaactcctgcacctgacttttggggacccttcagagttaccctccacatttcttatcccatttttatgttatttcacaacccccgacacatgcctctttcttcataggcactttgcttatttctggctctgtacctttttatgtgatttcttctccttcccaagatgtccccttctccacctccacttgtggaagtgctacctgtttttcatagatttgctcaaggtctttctccttgatgaagttattcactgttgatttatgcctcttgagtgtatggtgtttaagggtagggataacagtttacatttatatctgtgtgtcctcatttagtcctcagttacctggttgcttccaatggtatcattttgtaaagctatagtacaatttccagacctgtaatagtcacattgaaacagtcaagatagagaaaattttcatggccacaagatttccttatgtttttttgtagccacacctactacccttctacctccaccccctccttaaactctgacaattactaatttgttcatttctgtaattttgccattttaagaatgttttataaatgggataagtgtcttttggaattggctttattcactcagcataattctctggagattgatccaggttgttgcatgtatcagtaattactcccttttcattgctaagtaatattccatagtatgaatgtacttttacggatcttttaaccatttacctgttgaacatctggttgtttctagtttttggctattgtgaataaagctgctgtaagcttttgtgtataggtttttgtgtgaacagagtctttatttctctgggatatatgcccaggagtacacttactgggttgtgtggcagttgcatgtttagttttttaaaaaactggtgagctgttttgtaaaatgttctagcatggctggaacatcccaaagtgccgggattacaggcatgaggcaccacgcctggcctgtcaccatttagccattctgataggtgtatagggatgtctcattgtggttttaacgtgcatttccttaaaggctaatgatgttgaacacttctcatgtgcttatttgtcaactgtatattttcttcagggaactatcttttgttcattttctaatgggattgtttgtcctttttactattaacttttgagacttgtttattctttatatattctaaatactggtcctttgttgggtatgttgtttgtctgtagcttgtcttttcatccccttaataaggtcttttgcagagcaaaagttttaaatttgttgaagtccagtttctcagtttatttttttatggatcattctttttggtgtcaagtctgggaactctttgcctagccctagatcctgaagatttttcccttgtgctttttttccctaatagttttgtggtttttacatgatccagtttatgaagctgagatttaggtcaaaattgtgtgtgtgtttgtgtgtgtgtttatgcgtgtgtctatggatgttcagttacttcagcaccattccttgaaaaggctgtcattcctccgttgaattgcctttgtatctttgtaaaaaagcatttggagctgggagtggtgggcatgggcatggggtagactgattcctcctacactttttttcccccgttattttagctgttctagttcctttgcttttccttataaattgtagaataatcttgtttatatctacaaaaaaggtctttctgggcttttgatacaaattgcagtagacctgtatcagtatggagaagatcgacgtctttagtatgtatgttgcatttttcaatctgtgaacacaggttgtctctccatttatttagatccttgatttctttcatcagcattgtgtagttttatcatgcaagtcctgtacatatgttttgttagtttttattggatttgttttgttacatttgtaagtaaatatttctttttatattttagtaattgtaacggtatttttaattttggtgtccatgtactcattgccagtatgtagaaatataattaactttcatatgttgattttgtattccacaatcttgctgaacctacttattagttctaggagttcttctggagattccttgggattttctatgcagactaccatgttacctgcaaagaggaacaattttattcttttcctttttaatctgcacactttttcttgccttttcttgccatgttgcactggctgaaatatcagcactatgatgaataagaagggtgagaaaggacagtctttgtgatcttgggggaaagcattccttcagtccttaactatgaggtataatgttaactataggattttcatggatgctgtttatcaagttagggaagttcctctctgttcctatcttcctgagagtttttatcatgagtgagtgttgaattttattgtgttttttgttcatcagttgatctgatcatgtgatttttcttctttagcctgtcaatatggtgcattgtattgatttattttttaaatattgagccagccttacatccatggcatgaaacttggtcacagtataacactttttgtacatatgttgctgaattccatttactaatattttgttaaggaattttgcacttagattcatgggggcatttagcaatgtttccctctcagcactgttttctctgtgttccacacctttgttttatttttatttccattcaattcaatgtctgtttttattttatcttgggacttccactttgagccatggtatgttgaagagggctgttgagattccaagtattaggaaattttcctttcatcttctgttttcggtttctagtttgattccattttggttggagagcacactctgatttcagttcttttaaatttattgaggtttgttttacagcccagaatatggtctgtctgtgggcccctgaatgaaatgtgttttctgctcttacatcctgttggttgatgatgctgttgaattctgtgtctttgcttgtttttgtcaaggcattctatcaactgtggagagagaaggccagttattttctctggttatgggactctgtgttgatagttctttcagcccttgaaaaaattataccactttcttctggcttccatggtttctgaggagaaatccactgtcattctaataatttttcctctgtagaaaggaatcgtttttctctcactgttctcaggattttttcttcgtctttagttttcgaaagttttattatgatacatttcggtgtggattcctttgggtttatactgcttggggttcactcagattcctaaatctgtaagtttatgtcacttgccaaatttaggaagttttcaccattacttttttgagtactttttcagcctgccctctttctcctcttctttcaagactctgatgactggaatgttcagtcttttgttatgattccacatgtttttgaggctttgtcaatttttctttagtccatttctctcttattcatattgggctcttgtcttccagttcctttcctgtgtccttccctccctttctgctgctgagtctttttattttggtatttttcagctctaaaatttgctttaggtttttcttcatatcttgtatttctttgttgaggctttttgtttatttattcttaatttgtttcaagcatgcttgtaattattgaagcatgtctatcacagctgctttaaaattgttgtcagataattctaacatctctcttcttggtgttgctgcctcctgatgtctttttcattcagtttgagttcatcctggctcttggtatgatgagtgatttttaaatgaaaacctgggtgtttttatattatactatgagattctggatcttacttaagccttctgttttagctcgctttgttttgataccaccctggcgggggaaggttggtggggagggcacatggcactgtctagtgatcactagaggaaattagaagtacaggctccccacttggcctttcttgacccaagaggtacagtatcttgtttccaccaggtgggagtagaggtccaggatatccgggggagagggtgtatgtggaagggtgccttgttaccagctgatgtaaatgaaagcttgggctccctacttggccttctcaacaccaccctggtgtgtgggaagtgggtgccttattataacccggggagtacgtgaagtctaggctacccacctgacctttgttggcatgggtcggggtaaggctacagtttttttctgtgatgtttgtctggagtagagtggtttttttcctatcagttttctgtctcagtaggatgtccctttcttggtcttttgactttttttcccttctgcttctgttaatgtttccaggtttcagattgctgccattttcaactccagaaagctgggatatatgaggcaaaaataagtctcagggaactcaccattttattgttccttgcagcctgaggtccctagccttcttctctccacagttaagaatcttctcatgtttgttttatatgtaatgttcagagttttcagttgtgcttagtgggaggaatagggaaaatacatctgcttcatcttcctggaattgaatatccccgaaggatcagtttgtaacatttcttcttttcatgggctgatgttttcctaatatgtgtaaaatatgaattgcaagaaaaatgaaattaaaaaccacaatatataatttccatttcaaaaattattggattcagtagatgtaacatttatctgtcaaattgctaccaaagtttctaaatgcttgctctcaccctctctccttactcctcatggactaggtgagtgccagtttgccatctaggaactagactttgactagcactgcctggagtgttactgcttgattctttttaaaatgatagactagtgattagccattcagttgaacttctctgctgttttccatggatttttgtagggacaccttcaatgtgaagcccattttagtccttaatggggagggatgtttgggattgttttgagggcagatgtagcagcggtgatgagagttgagagtgcatctctgatttcaagtgatccatttgttgttcagtgtttagaattcttataaatttttacaaattataaattcttataaatcgttatgagactcctttaaatccttcgttgtaatttatgacttctaatgttagagaacatatgattgattttgattctgtaaagatgtctaagtattggcttccagtatgttaatcttttgattgacagccttgagtataggacaaacttctatgggaaccaggaggtgatttgaagacagttctttaggtttaagcatcatggaagttatgacttctcattgaaaaaagaatatttttaaagtatcagttcatttgtagaaaggagtagaatttgcattgcattggtagagacacatactaagttattggattgtcctttggaatctacacattatgttttataatttattgttgtctttcaggttaaagggtaggaggaaatttctgggactattgaaactctcatttgtccattcctaagaattagtgagttatcagtaaacactttactaacatttacaagtccccatgcgtggcagggactgtaaaaaaaggtaggaaggcagcactgtcatagtggagaggcctgatgctttggagattgaagtccatattgtgttcgtattaggactgcagaataaattttaattattttaagtgtttccatgcaaagggaacactgtctcaagtaacagaactgatatagggagagtagccgtgagagtttcaacttttacttagactgggggcaaaagatgactaaaacagctctgccactggggataggaaataagggtaacatggtctctgatctgaaacctgtgaggggattgagaaagtagagggaagaaaagggtggttaatttagactgagagtctttgaacagggctggaaatcctttgatgagcaacctctggggcatttcattgcatgagatgtatacatactcctggagagaaaggacctttgtggcaggagcttttcactggaaatgctttgagaaggggatgcaacactggcagcttatcagctggtccttgtgctgtggtcctgccctatgctgtggtaatagtaagttggttcagacagatgtgaatgtaggctattgataattggagatggggaagcaaaacaaaataaatcacaacttagaatatctctggccatataccaagcacaattctaagtgctgtacttatattaattcatttgctctttataacaaaattaaatggcactgagaagataagtggtaaagctggacaggtaaacctgtccccatggctgtgcatttaatgtgtcagtctggctccacagattatggtcttaactgtttaactagactaccttgctcggatagtttgggaaagattgagaggggctttgaataccaacaaaaagagtatggatgttctttggaatgcaggagggagctgttgaaggattttgacgagggcattgattgacataatcagaattaagctttaacatacatgtaggtgagtgattgctatttcaaaagactagaggtaggaaatgaggctaatgcactacttcacatgactttgtatgcaggagcatacaggtgcatttttagaaatggaatcagatggtctcgtcaatgggtgaaggaaaaataagtcaatcacttgatttgtaaggggtgtcaccattaacagcaatggaaaaaaacagagtttgagaagagttaatgaatgtgtcttggtacatatccagttgcaggtgtcagagaaggattccaggtggaactgtcctgtaggcttcatagttggagcactgcatcttgttgggagaggtcaggtctggaggtgcagatgagcatcatcagcattgaaatgatgaaaacagggagtggtagaaagggctgaggaataaacctgaggggatacttacagttacgggcccggatgaggaaagtgacttttacatcctcactgggcacatatttattgagtatctgtttgtgccaggcactgtgactacaatgggaactaaacagacatagatcctgtctttgttgatcatacaatttaatgaggaagataaaaatagaaacaattaagtaaacaatgggagaaatgacatttcagctgagacccagaggtcaaaaagattttaataatacaaagagtatgggcaagaggattctggtaaaaaagaatgctatgcacagagactgtgtagcaaagaggactcattctgtttaaggaactgaaataccagtgtggctgaagggccattggtgcaagggatgggggtggggtgagatgaaggtaggaaaattggcatggtatagctgatgcaagacctcattctcagtgctgttgaaaggttttgagtaggagaaagctctgctcctgattttaagcagatcacccctgctgcagtgtggagaatggatttgggtgagagggtgggatgggtaaaggggaggcatggagatcagttgggaagctcttgcaggaggcctggactaaatggtggtagtggatatgtctgaggctggggatcaggctctggtgtttgtctcagcaagctcttctggccttcaccttagtacctttgtttttctttatcatcatatgtatcatgttaccccyctctgtttatccttgccccttttagactgtgaatcccttatgtagggataaggaccttctcttactggtctgcctaccacctgaaaagtgatcagtaaatgttgaataaatcaatgtacttgtcttcatactgaggttgttttcctgttgttgttgttgtttttccttgagaggagttgcaagacgtgggaggctgtgggcagggttccacgggagaaggaggatgctgcatgtctgggacttgtgaggaggaagcactgaagaaatctatgtggcacacggaggtgttttcaggtgttgaaccatagggaggtctacgtgatttcctcattaggaggattagagagggcagagtcaggaaaccaatagaggaggccttataaagaagacagttgctgatgtccagtgctgctgaacaggcaggagggtgaaaagattctttctctgctctctgtagttttagcagaggcggaagagcagaaatctattaccaggggataggagtgacagcaaatgtagaccattccctgaggaagtatttgggagaggagaaaggaggagattgtagcttgcattcggggtagttgaggcaagtggtttttaggataggaaggagcagaacctattattagtaggtcgtaggttatgttgagtcagggtagtaaggtatatgagagtcactgaggggtgacgggggacaaggaaggtcaactgtggtgactggagatggcaagcaccccattgcaagagggcagctaatcacctactaggattttgctctttgggtatgctcagtcagtggtggcagataattttttttttttaaaccagagaagctagaatacaagtcttttttgttttgagatggaatcttgctctgtcacccaggctggggtacagtggcgcgatctgggctcactgcaacctccgcctctcgggttcaagctattctcctgtctctgcctcctgagtagctgggactacaggcacgtgccatcacacctggctaagttttgtatttttagtagtgacgggggtttcatcatgttggtcaggctggccttgaactcctgacctcaggtgatctacccacctcagcctcccaaagtgttgggattacaggagtgagtcaccgtgcccagcctataatacaaatcttgatttttcaagtgcaatgtcctgattttggcarttaaatcagtttttaaatcttttctttgggcggggggcgggggcaggagtaggggacaaaacccttgtctctggcataactttgcctgaaagttaccttgggagaaagggctgatggcattggttggtgaatgtgaaagagaagaggagttatttgtggagcaaggcttctaaggctttgaaaaggaatgtaattaagtgtacaaataaagagtattatccttaaaaaggagaaaaaactcagaggaacaagggagtgtgaggtaaaagtgaggtggaaggaactccggtctgatgaggtgggatttctctgtagagaggcaaggaytatgttggctggtctgaggatgtgcacaagggaaggtagagggtgagagagggggtccaggagaggagctgtaaagaatagtaaggcttggtctggctagttagtgtaggtttacaggggaccttgccagtgtttcagaactttctaatgccactatcctagaagttgaagcagaaaaagtgaagagtagaacttactgagggttagagattgtatgtaaggctgaaaggtccaatgaagtgagggattttttgtgtgtcaaagagtaccttattacaaaggtaatatgacttctgtgttggaagctgagcacattaaactagaaggctggttaagtgtactaggaggcaacttcctgcagacggagaagaacaagtttggcaggggtgagggaacctaagccccagtggtcaggagaccatgatggtggtgtattttatgcctgggtttggttttggctgaagagtagtttaaggtatagacaggcaggttggtgttgagactcgagacagaggacaaatcaggattgaggccaatggggactataagcttggatgttgctgctaacagaggtttgaggtgagctttggaaatggggaggaagatggtaactctagtgttgaaatcaactcattaggggaggctagatggtgccttaaagatcagtgtcagtgtgagggtaagttttttgggatggggcctaaatgaagaggcagattctgacaaatacacaattcagattctcctgttacaatatgatatttcaatagcatggaaaatatcccatgtaaaatactcttaatatataacaaaaaagtaatgtaatatttaataacaagataatttacataatgaaatgatatatgaaaagattttgcttagaggaaagagaggtggagtctgcctgggacacacacacagagatgctggccctgacctgatttgttctgatttactagcaactcccagacttgtgggaggtgacagtggctgatccaatcataccatcacttgggagcctaaaagtacttgcagtaccaactttttgagggatgactgacttgaaaaaattcttcagatttcccttaaacttttaacagtggaagagcattgatttgtttagtaaccagaccataaacctatggcaacaagctgctgcgtgtccactctctgccctccaaacaaaactaaacagaaacattgtgaatttagggatgctcttttctctcacctgatgttaacatgtttttgcataaaaaatactcttggcagagtgggacaataagataattttttttacattattaaatagtggcartttttttttcttaagagaaaaaataacatgtttacatagtaaaatatcctgacggtatcaaaaagtacacagtgaaaactaactgttctattctagtaattttttcttaatgttgtaaatggaagtcataaatatttctgggccagatgagagttgcctcaaaattattttctgaattagaatattatgaagagatatgataactaagctagatgggaaagaaattaccagttgggtgtgacatgctggtaggcatttttaaaaagttaaatttggggtgcattttgagaaatggaaggaggtggggaatgtgtatttgagagagagagggtgctgcgaaaactaaggaaaacagcagagagtttggagagaatttaggatactgattttaaatatagagattagggtagattatgttggagaagaacaaagcacaaagaggctttcacagtcaatgggggtttatctgagccctgaactagaaaaactcttttccccagagaccccaaatgggagctctgactgtagcttgattcagattgggtcaaaaaggtggaaataggtagacaagtcaaaatagacggggttctaggaggctatggtaataataatatcattcctggaaaaaattgttgaaggctttaaacctgaagcaagccagctgggtaacttttatattcttctctcacttctgaatgttctttgcctttaaatgctattgaactataatagagtttcattatgaacttgaaccttatgtatgctaaaaaagtgtgttgagctagagaggtgggagttagggggaagggcatagaaacttggttcttcgtgaaaggtctccaccctagtgtacttgtagatacctgagagtgagtgtttttttctttctttatttttttacagaactctttgaaagggactttataaaaatacaccctagaatttcaccgggcagaaatttcaggtcagatataggtgggcccacttcctcccatgcaactcaactccacaccatagttcctcacatctctaggggaagtctccataccttattccattgctcatcacatcttagcctctggctttctcactgtatttactagaacatctttccaagacttgctgttcttatcctcagcagagcctccagttccaacatgagccccagcacagtatgttcatgttgtactccactgactgttcttcattcactactcaattggattcttcagttgtaggcagtagaatccacctccgcctaacttagcaggagttaatttattggaaaggaattagaagctcacagaaccgatggaattctagagaaccagccttgggaacagattagtggaaactaaggcaactcttgggggctaggaagcagaattgcaggagtgacctgatcaacagattaccactgggatgattgaacccagtctgttctttcatccttgaatgttacttgcccaagatttaagagtcctggagaaagcatctagttggtgaaacctaggtcatgctggatgtaccaggggtgagagtagggatttatagtatttgcaagaacctccaggaatccctttggcatccattagtgggagggtagtcatatggagttacattctcactgggattatacaagggcaggtaattctccaacaggaaattaggacgtggggagagatggatgctgagcagccaaaatgaaatacctcctccagaccccttgtcaacattaaataacttaatgactctttacattctagtagtttacttatataagacaaataatgacagtttgtttagtgcttttctcagtagaatttatattgtgtctgatattggccctttacatgctgctcctttaattatctcaacagtcttgtgatataggcagcttgtatgaactgacctggtagtaggtgtcaggagtcagggtgcaaactcaagcaatctgggctaccttgcctatatgcggtttaaaacattatcatgaattagttaatacttttaaatgaatttggattcatcggtcgttagcatatgtgtacttttaaaataatagtcaaattcatgtaataaaacagtttacatcttttaagtcacaacttaagttcatcttttcaacatatatatgtaaatgccttgaaattaggcattaaatgctgtgattctttatgctggggacattctaagacttcacttctagctgttttgaattatacaatatatcattgttaactatagtcacctgactatactattgagcaatagnnnnnnnnnnnnnnnnnnnnnnnnnnnnnnnnnnnnnnnnnnnnnnnnnnnnnnnnnnnnnnnnnnnnnnnnnnnnnnnnnnnnnnnnnnnnnnnnnnnnnnnnnnnnnnnnnnnnnnnnnnnnnnnnnnnnnnnnnnnnnnnnnnnnnnnnnnnnnnnnnnnnnnnnnnnnnnnnnnnnnnnnnnnnnnnnnnnnnnnnnnnnnnnnnnnnnnnnnnnnnnnnnnnnnnnnnnnnnnnnnnnnnnnnnnnnnnnnnnnnnnnnnnnnnnnnnnnnnnnnnnnnnnnnnnnnnnnnnnnnnnnnnnnnnnnnnnnnnnnnnnnnnnnnnnnnnnnnnnnnnnnnnnnnnnnnnnnnnnnnnnnnnnnnnnnnnnnnnnnnnnnnnnnnnnnnnnnnnnnnnnnnnnnnnnnnnnnnngcctcggccttccaaagtattgggattacaggcgtgagccactgtgcctggacaatctaactgtatttttgtacccagtaaccagtctctcatctccccttctcctccctacccttcccagcctctggtaaccatcatttcactctctacctctgtgagatccactttcttagttctcacatacgagtgagaacacgaggtatttgtctttttgtgcctggcttatttcacttaacgtaatgacctgcagttccatccatgttgttgaaaatgataggatttcattttttatggctgaataatattccattctatctatgtaccacattttctttatccattcatctattgatggatgcttaggttgattccattattttggctattgtaaatagtactgcaataaacatgggagtgtctatatctcttcaatatactgatttcctttcttttggatatatacccagcattggggttgctggatcatatggtacttctgtttttagttttttaggaacctccatgctgttttccttaatggctgtactaatttacattcccaccaacagcatataagggctcccctgtctctgcatccttgccagcatctgttattttcttgtccttgtagtaaaaagctattttaactagggtgagatgatatctcattgtggttttcatttgcattttccaggtgatgtatccaggcgtttttttttttttttttcatgtacgtgttggctatttgtatgtcttctttttattgaaatctttagcccattttacaattggattatttgttgttttgcttttgagttccttgtaattctggttattaatccttcattggatggatagtttacaggtgttttctcctattataaacaggttatctcttcactttgttgtttcctttgctctgcagaagctttttagcttgatgtgctcccatttgcctacatttacctttgttgcctgtgtttttgaggtccaacccaaaaagtttttgcccagaccaatgtcctgaggcatttttgcagtgttttcttctagtagtttaatagtttcaggtatgagatttacactttttttttttttttttttttaagacaaggtctcactctgtcattcaagctgcagtgaattatggcacaatcacagctcactgtagccttgaactccggggctcaagtgatcctcccacctcagcctcctaagtagctgggaccacaaacatgcactgccacatccagctaattttctgtattttggataaagacctggtttcaccaggctggtcccaaactcctgagctcaagcagtctgcccgccttggtctcccaaagtgctgggcttacaggtgtgagccattacgcctagccagatttaagtttttaaatccattttgagttgatttctgtatatgatgagaaatagggatctagctttattcttctgtgtatggtcatatagttttcccagctggatttattgaagagactgtcctttccccagtgattattcttcttgcctttktcaaaaatgagttggctgtaaatgcgtggatttctatctgggttctgtattctgttccattgatctttgtgtctgtttttatgttagtatcatgctgttttggttactatggctttctaatacattttgaagtcaggtagtgtgatgcctacagctttattctttttgcctgggattgctatggctatttggggtcttttgtggttccaatttaggatcgtcttttctatttctktgaagaatgtccttggtattttgatagggatgccctgaatctgtagatcacattaggtaggatggacattttcacaatattagttattccaattcatgagcatggaatattttcccatttttaaaatgtcctctttaatttctttcatcagtgttttatagttttccttgtagagatcattcctttctttgtttaactttattcctaggtattttatattttttgtatttaatagctattgtaggattgctttcttaatttctttttcgttttgtttgatgttggtgtgtattaatgttagtgatttttgttgttgattgtgtattctgcaactttactggatttgattattggttctagtagtttgctgatggagtcttagggttttctaaatataataccatgttgttgcaaacaaggataatttgactactttctttccaatttggaggccctttatgtctttttctttttgaattgctctggctaggacttccagtactgttttgaagagaaatggtgaatatgagcatccttgtcttgttccagatcttagaggaaaggcttcagttttttcccattcagtacaatgttagctgtgggtttgtcacatatggcctttatttttgcggggaggggtatgatccttctataccattaacattctattaatgtgatgtgtcaagtttattgacttgcatattttgagctattcttgcatcactgggaagaatctcacttgatcgtggtgaatgatttttttaatatgttgttcaagttggtttgctagcattttcttgaggatttttgcatattacgttcatcagggatattggtctgtagttttctttttttgttgtgtccttgtctgtttttggtatatgagtaatggtagcctaacagaatgagtttggaagtatttccttccttctctttacttttttggaataatttgagtagaattggtattagttcatcttttaagtgtttggtagaattcagcagtgaagccatcaggttctgggcttttctttgatgggagactttttatttacagatttaatcttgttacttttgattggtctgttcaggttttctatttctttatgttttaattttgatgggtcttatgtgttcaggaatttatccctttcttctaggttttccaattttttggtgtatagttcttaatagtctccaatgatcctctgtatttctatggtatcatttgttaatgtcttgtttttcagttttgattttatttatgtaggtcctctcccttttttgcttattttcttagtctacctaagggtttgttgattttattaatcttttcaaaaaacaactttttgttgtgtagatcttttatattttttggtctcaatttacttttttcctgttctttattattttttccttctattaatttggaatttttgttcttgtttttctagttacttgaggagtattgttaggttgtttatttgaaatctttctactgttttgatgtagatgtttatttctataaatatcccatagattttgatacgttgtgtatcctcattattgatttctggttttacttcatcacggtcagaaaagatacttgatataattttgacagatttgaatttgttgagacttgttttgtggcctgccagatggtctgtcctggagaatgttccatgtgccgatgaaaagaatatgtattctgcagcagttacatgttcagtaaatgtgagttaggtccctttggtctagtgtaatttatattgtcttatgacttaacaggttgctgtagtttctgtttttgatagatttgtcttttagtcgtcattctagtgatgtgaatggattacacattgcaattacagtattgagtattctgaatttgtctgtttacttttaccagtgagctttataccttcaaatgttttgtttttgcacatcagcatccttttctttcagattgaagaactccctttagcatttgttatgagtcaggtctagcagtggtaaatacctttagttttgtttgtctgggaaatacttgatctctccatgtctggaggaaagctttgctgggtcatctgggttggtaattttttttctttagcacttggaatatgttgtcacactcccttttggcttgtgtagtttccagtgaagtttcttgccagatgaattagagctcctttgcatcatgtcatttgcttcttttttcttgctgcttttaggatcctccttttgtccttgacctttgagagtttgatcattatatcttggggtagcgttatttgggttgaattgtttggtgatctctgaccttcctgtatctgtgtatttatatctttctctaggtttggaaaattttctgttatttatttgaataagctttctatcccygtctttctcaactcccagttgaacaccagtgattcttagatcttctgtttgaagttattctgtatatcttgtaggtgttctttgttcrtttttattcttttttttcctcttctgactgtattttccaatatcctgtcttcgagctcatattgttcggcttgatccattctcctgttgagaccctctaatacacttttcagtttagcaaatgtatttctcagttccaggatttctatttcatgttttaaaaaacatttcaatctttggtaaatttttctgataaatttctgaattgtttttctgtgttaccttggagcttgctgatttcccatagaattgttattttgaattcttgatctgagagctcgcacattgctgtctgcttagggttggtctctggcttctcrctttgtccttctggggaagccataattccctgtttgctgtttcttgtggatgtatgtctatgacttcacattaaagggttggttttttattccagtcttctctatatgtcttgtctttctagagtatgtttgcttagaagttctttgcagttgactrtaattttcatttatcctagatcactgcctcctttttggcactgcatggtgccttaagtctaggttttccttggctcttgcaaatactcagagcactgcctgtcccagatggaggtgggagagtgggagggtttttctccttacaagcttcttgtgggttgaggcaagaacagggaacccaagctggtggggaagctggcctttcaccttgacctcactttttccagtgtagaaattgtgagacagggaggaattttccatgtgcagtgcctagcagattgtgggaggggtattgtggagagagaagtctgtttctcttactgtctgcttggagtttttccacttctctgtggccctggagatcttactagcctcagattcaagttctggggtattgctggtgatattcttgggactgaatatttgtttttggttttctgcagaggagggtaaagccagattgctgcaattttggtaacatcacttcctctatacatattttaaatggtagcatcatgtatttgtgacacacacacgttaatttattaatttgttttgaaagtgttaatgaggcaattccttaccttcccaagacttgtggactgtatatagattaggaaaccctggctgtcctcgtagtggcatgtgattatctcccaatcatgacttctcttcttccccactgtgtggcaatcattggtggaccctggagctccatccctctacagttaagccagctctaaactttgccctcccctggaactaacagttatgtgagccagtaaatttcctcgtgtttaagcagtttgaggtggaatttctgatctcttaaagctaaaggtatcccaactgatgtagtaatgcagaattagaatgtaaggaaataagagggtttttctttatttttttctttccaacttttaggttcgggggtacatgtgcaggtttgttacatgggtatattgcatgccattggggtttggtgtgcagattctttcatcacccatgtagtgagcatagtacttgatagatagtttttcgatcctcaccctcctcccacccttcaccctcaactaggccccagtatctatttttacccttctttgtgtccatgtgtactcaatgtttcgctcccacttataagaacatgtggtattttggttcctattttaattcacttaggataatggcctctatttgcattcatgttgttgcaaaggacgtgattttgttcttttaaatggctgcrtggtactccatggtgtatatgtaccacattttctttatccagtcaactgctgatgatgggcatctagattgatttcatgtctttgctattgtgagtagtgctgcgataaacatacacgtgcatgtgtctttatggtagaatgatttatattcctttgaatacatacccagtaatgggattgctgggtcaagtagtagttctaagttttttgagaaatctccaagctgctttccacagtgactgacctcatttacatttcaaccaccagcatataagcatttccttttccctacagctgcaccagcatgttattttttgactttttaataatagtcattctgactggtgtgaggtgatatctcactgtgattttgatttgcatttctctaatgattagagatgttgaacattttttcatatgcttattggccgtgtgtatgtcttcttttgagaagtgtctgttcatgttcctttgtccatcttttaataggattgtttgttttttgcttgctgatttgataacaagatttttatgttggtatttataagttgaacaccaagatattgctaaataggctagtccctcaatctggcatgttagaaactgcgtaaattaggactcagaggaccacctggttttagtttctactttgccactccctacctatatcactagacctaaatttcctgaacagtaaaaacaaggatgttgccctgaataagctataatttacttttcatctcagatattctttaattttggaacccatgcaaaatatctggttaaatttaattaggagttaagaaggtgaggattttgcagaacaggtgtctcagatctttactgtatttattatggtttcatagtctagtagccccaagatgttctgtttctacaacttctctgtaaatggcactggcaaagtcttttaacagtgttttagaaactttttttctgacctggcacggtggctcacgcctgtaatcccagcaccttgggaggccgagacaggtggattggaattcaagaccagcctggccaacatggtgaaaccccgtctctactaaaaatacaaaaattagccgggtgtgatgatgggcatctgaaatctcagctattcaggaggctgaggcaggaaaattgcttgaactgaggaggcggaggttgccgtgagccaagattgtgccactgtattccagtctgggcccagactctgtctcaaaaaaaaaaaaaagaaaaagaaaaatttttttctctcaggtgcttaaaacgagcagtatttttattttttaaaactcttagatctccctccctccctttttcttcctttttttaacactctcagatcttcctccctccctgtttcttcctttttttaattgtggaaaatttctaatatgtatagaagtatagagaatagtataatgaaccctcatatactcatcatctaacctcagtaattatcaacattttgatagccttaaaatcagtagctttaaggtgcttgcatttgactcttctaaatagggacttttttccagctgaactctagacctaagctaggcatctcttgcttcagtgtttcagttgcctgcatgtttgtttaaggtactgttctttttagcatcataagaaggtatagcactgtgaaaactagtctttgtattagcagttctggcgaaacaattatgaatatttaggcattcatatttgtacatatcaaggtaggataagttatactgtgctaacagtctatcccaaaacctcagtggcttaaaayaacaaaacttgttggtcttgtgactgattgactggggccttggttctgcctcaccctccctctggaaccaagctgaaagagcagttactgtcttgattgttgccagcaccattgtagaaggaaagagagcagggcaaattgtgtgcagtctcataaagcttccgcctggaagtgagtcatggcatttctgctcacacttggccaaaacaagtcacgtgactaacctatatttctaggggatggaaaagtgcaaacttatcatgtattggtgaaaagaaccagaaatgtttggtaggcaacactaatgactatcacagtattgtgagaaatagaaaatttcacctgtctttcaacttgatgtatgacagctaaggcttcaagaattgtttaccctcatgcgacaagtgtaggtaatagtattaaagttatcctcattattttcttagctgttattttaaagccacttttagactagttaattagaagtcctcagagaaggaataccaatttctagattggatcccaaattctttctgggaggtacagacttttcccttctctaaggtgatacagtcagcatatcagagaaggggcagaatagttgtggcttctttacttctcattataggaagaccttgcccatcactgtccctcttcctttttaaagtaggattttgatttcagttgtgacatgggtaaaatgccaggtcagactcttggatgtttcaagtggggtttgggattccagatcagatctctttgttgatgttttgtgtgtgtgtgtgtgtgtgtgtgtgtgtgtgtgtgtgtgtgtttggaggctgggatttatagattgtgaccatccactgtgagagacatagtcatagcactggccatatttatatcacattccagaggaaactgcctgacccccacagttcctgctcaaaggtgctcttagttggtcatattttgtacccctcagaagtgagcaccagactcaaggcagccaggtcagtagcacctgctgtgatatgacctggcttgaaaagataagtaggctggccactctgccctcttcctgagaatttaacttcccagtctaagacagaggccctgagtctaacacagtgccatgggagagtaaaaaagccattatcattcgtaggcagtttgaggcaatcagaggaagtgagggtggagaaaaaagagagagcagagttgattggggatgaaaagagaagaggctcttggagtgttgtcctcatggagtccttgagagacactaatccttctgctggggtccttggtggggccttgtgttctgccagagccrttgtgtttctgcttccttctgtgatgccttactctatggttgtttctgccctgtttggcttgggattcctgggttccttgcatgcatgctgtagcataggattgggtgttggtactagttacatacagaggcttagtgtaagagtaactgaagcaaggaagaggtacttctgtctcatgtctaaatctggacttatacagctcatgtatgaggctgggggctggtatggtggctccatggttttctgggatcttagttgttctaactttcgtatttgctgactcgggctggtcttcatcctcatggtctcaaatgaaacttcaactatcatattskcattccacgcagtagratggaggaagggtgaaagaacggtcatgctacagtcctttttagacacctatgtgaagttacactcaaggcttcctgtcatatatcaactagaacctccaactagtcactccaagggtaacttggaactatatctttattctagtggtccatgtacctagcaaaaattgggggttctgtaactgctggaagggacatgaatattgggggatgtcttgcagtgtgcttcatatatgttttaaaatttttttgatataaatttagggtaactgccaatttttattttaaaaatagggatttgggggaattaccttgaatctatacagcagtttttatattttaacaatatcaaatcatctagtagctatttcttagatccctctctagttagttagatattttaaaatttttctcagtaatattttttgtttttcaawgaagttgtcttactgctaagtttattcctaaaattttgtgggttttctgctattataaaaggatgttttaacttacatttctaattgtttgctactaatctgtagaaatgcaattgattagattatgttgatcttttactttgcatgcttattaaatttaatgttttttaagatttctaagaattttgccaataaataaccatgtaatttataaatagaggtagttttatttctcccatgcttcctgtatcttaaaagtaaactccctgttgcttgaggccacctctgtgccttggtgtgaaaagagtgtaaaacaccactcagaatcttcttgtttgatttaatgcctaatttgtacctaggtttctgctgtactgattgtttcagccaaactaaacaaagattcactttgtttcttcatttaataaaccttagtgtctaytatgtactctaggtgtggtactaggcattgtagacacaaaagaaagacacgaaaatgaaatatgtgatcttttccctcaaggagytcacagtttggcagaggcaactgaataagtaaaaataatatagtatgataaatgcagtaataaagatcaacattcaaggtataaagtatacatatactactagaatgacagaaaagaaggactagttttctgcatcttccagctctcttatttcttcaagacacgggaaataactaagcactagccatcryaggggcactgtaagtccaaatgcaggtgttctttcttamaagagttttccagttcttccttattagtgaacagagtaaaagctttctctaaacaaatccctgaacctaccacagtaaagagcaatcacatatgtataatgctttatgttatagaaaactcttctcattacaaacccagttttccagaaatccagttacccagttttgtcagactaagatttcttttggcatttttaaaatagcagtctgtgtttattgacctagcttgccactggtggtgtgttttactttaaatcttatccctctttacttttcttctgcctttgtctttagaaagttggtctttgattgatattagtggtactgtagaggatagctatgctaagctttgattgaaatggaattttaatacaaaaaaaattcaggtcagttaaatctgtcattttatgcagaatatatggaataacatgagattaatagagcattgttcctgcagcccatctcttgggatatggaaatagcttggcttttcagacctcatgtttgagatggtgtttgctcttggataattttgcctggagcgccttgctgcccttgagcctcttctgtgtgtgctgtcatagtatgtgttaaatgtaggaattgaaagcactgctatgcatgatagtttacttagattaattgtagctctaaattttgtgttttaattcttcactgtcttggcatcatagatgttggacagtccaaaaaaaggaagttttcctataagataattattttttaatggaggatgggcacaacatttcatcagaagcatttgggagaaaacagtgaccaggagacagagtggatttttaaaaaatattgattgtaatcaactgcccactctttgcttagtattaatacccttagattctttacattgaagacataggttttaacactgacatcccaaataataattaatgtttttactatttaaaaatgaagttaatccctaggatttggttgttcttcagtatacatttgatccttttagatcgaggttgaaaatagttctgaaagtcattttttgagatgaatggaacacagatcatttcaattttttaatttttattatgcctggaaccatgaagatacacttttatggatcacagagtgttcaaatttcaaggaatagaacagctatataatttgtgaggccattttagacagagaaagcaacacctgtgcagacatggaagccagagaaagcatgacgtaattgggcagctgggagtggttggatgtgaatgaagagcagggcatgggaaagaggtgcagagtggaaccagggtgtggtctctgcctagaaggcccttctgcaggatcttcctgtgtctggctccctgctcttccaggctgcttctcattgccctgcctcagagaagccgttcctgatcacctaggataaagtagccacccagtcacttgctaacaagccaactcctctttttgtttgtttatggagcgttccttactggctgtcactttttgtttattgtctgtgtcctagtgctttactatagttccatgagagcagggaccttgtctgtcctgtttattgctgtagatctagagcccagcataaaactggcatttaataaatgtttgtgatgggaatataagtggatttttttattatggattttgaattttcttctctgagttaattgttcttaatccagtagttctctaaacccttttacacttttagaaattactgaagaccccgaagagtttgttttgtgggttcatatgtattgatatttaccaaattaaagataacctagacatttaaaaataatttatttaaaataatagacttgtgatatgttaatataaacatttttatgaaaaataacttttccaaaacaaaaaaagtgagaagtgtggcattatctgacatttgtgtaaatcccattagtgtctggcttctcatagctggattctcataccctcttttttccattcagtctattgatactgcatatcatgtagcctctggacctcagccacatgcttaggagggaatgacagtaaacaggcaaatggtgacttggcatagtataaaaatagtcttgaccttgcagaccccttgaaagggtcttgatgaccccttgagttggatagggtgggggtctttgtactacattttcagaactgctgctgtaggtggatgattttcaaactttttagtagcaggagtatattttcaaatatctcctaacaagttccaatgcatagaaaagataaaggtggagctgttttggttaaagtgcatatgtggtgggaatacggattcgggagcaggggaaggtccctggagccatgctttcmctttttttctcattttttggctgagctactaaattggccaagggattgatacctctaaggcaggaatactgtgtgagagaaagtgaggcagttgaacatactgcagagactttccaccctgtgccatagtttaactttcaggtattttatttaatagctttttaatattttatataagtcagtaagaaaatttgctataatttgcagcaaccttagagaaatatttatgtaatcgaatgttatctaactcaggtttttaaaagacaatttgctctctttatacatctgagagtatgtaaaataaaattcaatcaaggtccaataygtaatcagacaaaagtaaggatgtggaggaagtttaatattgggaattggtaatctaattgtatgtgccaaatgcaggaggaattctcatggtcttgagagtggagggaatggcagctggccagaggctgcctagagcttggaccctgtkttaggcagcaccaccaccagctaatggtaatacgttgttgtggtaaatgcagtgtttgactgccttgggaaacattcttaactcagtctgttttgtttctgtgtaaaactgtttctaatcttttttgtcttgaaaaaaggatcctgacaaaagtttcccacaaagcttctgtttttacacaaaaatcctgtctctaaatttgtaggccttgccctttgggagttttatctgacaggcaatataaagtgtcctcattaccatcattatttattacctgtatcattaaaaaagacatcatttattatatgtaattatatcacagtgtttatataaaatatgagctctagctttgttgtctacattttaagagaaggaaaaattgagagataaagggaaaagtaatgaaaataattataaggctgcaaaatactgtcttaggtttggatttaaatatttttaagatgtgatttaataacttcacacatgattcttatgaaaagagaaaaaacctgttttaatgagttaaaaatagggtacatctccatgaaagatagaaggagatataattggacaatttgccttctggattaggtttaaaattcaaaagaactgcctaatagtgatactaattaaattctaattatctttagaaatgtgaaagataagtctgctaatttaaccattttttcagtaaaagcttcactctaagcctatcgtgtttatttttatatttgtttaatttttttgaacaaatagcatcataaattttttagcatttccaattaatattaaagtgtgccccaatttctttgaagtagatggagtcatgtagtattaacctttctaggccgggcgtggtgctcacgcctgtaatcccagcactttgggaggccaaggcatggatcaccagatgtcaggcattcaagaccagcctggccaacgtgatgaaactctgtctttgctaaaaatacaaaaaattagctgggcatggtggcaggtgcctgtaatcccagctcctcgagaggctgaggcaggagaattgcttgaacccaggaggtggaggttgcagtgagctaatatcgcaccattgcactccagcctgggcaacaagaatgaaactctgtctcaaaaaaaaaaaaatccgtaggcagctctccatcatacctcacaccaggagaggaggaaagtacccatagtttcttaaaattttatgtttaaaaaaattaatcagtggtatgttatagggaagtaagaaatgttttagtaatagctaccttgtttaagatcgcagctcctctccaccaggcactcatggtcctccctacctgactactcaatttttctttctttccattgcaataccttctgtgctataatctagtttasttatgtttattatttcctgtctcctactctgctcctacagaagtgctttgaatgcattgatctttgtttagtttactgatacgtactgagtgcctagaatatatttgttaattcaatgaattgyttttcctttggcttctagaagtggatgtacatttcttttggggaaaaatactcagcagactattcaaaactttaagaggcttctgtttctggcagcgtggcagagtagaggttaaaaaaaaggtcccacattatgaaatgttaaaaatactggacttaatattcaaaatatcttttaaatgcatcgttgagctgacaagaggtaaggaaactttccagaggcccagaacaagaaatcttgaatccagggaggtaagttagtagtgatactggctcccgtgctgagggttctggtatttgtaagtccttcaaaacccagaactttggcttttgcagggtggccatagggtaccagacggtgtctagggatcaagcagttgctaagtaagatccagagacctttgtgtaaagctgaagctccctgaaagctgtcagtgggtttaactaggaaaaagcaaaaaacctatccctcagtggttggaaaagtatagggtagggagcataggaacaaggttgcctgtttcagcttttcactggaagggtaaaataaccttccccgaaaaattataactgcagttccactctaactggatttggggttgaagttcatactaccttaatggtgggggaaaaaaaaacaaccaagccaagaatttagtgaaaagtagtctcagtctcaggactgagaatcaaatgaaatcctcactggagaaatacaggaacacaggcctcagagaattgacacaggtaaagtttcttcctagaaatgcattcacaatttaaaaaaccaaaaacactttatataaaccatgagttaatcagcagagcaaggagaccgtgtaatcaggcattcaaacattgcagatattgtagttgtcagatatgtaatataagataaatgcttaatatgtttagagagtataaaatacggctaaagagcaaaagactatcaaaaataattaggcaagttgaattcagcagtgtataaaggaaatactggatattgaacaaagggtttattccaggaaggcgagcttggttctgcattagaaggactattaatgtaattatcgacacaagcagtttaaagttaaaaaaaccatatcatcctaaaatatacagaaaaagaatttattaaaattcatctctcttttatggtaaaaactcataacaaactaagaacagaagggaaattctgtaacctgacaaagggcatctgtgaaaaacctacagcaaacatagtatttgatagagaaacattaatggtattcctttgaaaaacagcagcgatataaagatgcccactgttaccctgcctcttcacaattgcactggagatatgagttagtgcagtaaagcaacaaagagctacagggctatgaggaatgaacagaatggtcattccttagagtgaatataagtaccttcatagaaaattcaggagtttattaagttgcgaatatatgattgatatagtaaaatttaaggactaacatccagaatctgcaaggaatgccaattaatcaacaagaagatcattatggtaaagtcagttctattactctaaactagcagcatacaataataaatgtaataaaaatatttctcaatagtaaaaaaaataaaaagccacctaggaataaatagaaaaagagagggcaagatctttaaatagaaaggtatagaaatatatcgaaggacattaagaagacctaaataaatgtgacgacataccatgttcatagaaagaaggtttcctataaacgtatcaattaatctgtctttaatatatgaatttattgctattaaaaaaaacacccagcagggtatggttttgtttgtttttgtggaatttgaccagttaattctaaaatttatttggaaatacaaagggtcaagaatggctaagacattcctgaagcaagtacttgtcttacaagattttaagatagtgtaaaactttaatcattgagatggcataatatttggacaagcatagacaaatagataatggaaggaagttaaggcaaaaaccagaactctaagtacgtggaaagctaatacatgacagagctaatgttacaaatcaaggaaatggaatacgttttaaatggttgggattcttagccacattttaaaaaatggtttttactaacactgtattaaaaaaagcartttcagatggattaaagactagattgtgaaaggcaaaacttaagcctccagaataaaatattagagagtattttagacctcaggctttggaagccaaaarcacaattgttgaaggaaaaggtttattaatttggctgtactaaaattaagatctcttgggttttgtgtgcatggaaaggagagtgtaaagactagtcacaaatacacaagtagaatatattttgcatacaaaggataaggatttttagaatcagtaatgcacacacccatatgtcagtacgcatacatacgtaagtgtgaaaacagttaatggcagaagaaagcaagagctgtttcttaggagaaaaatgaatagccagtaaacagttgttttcagggaaatacaaattaaagctacattgacaaaattgtaaaagttggacattgtcaagtataccactgcactactccatggcagaggttggcagacttttctgtaaagggccagatagtaagtattttagcctttgcaggccrtacagtctctgtaaaggccaacaactttgacgttgtagtgcaaaagcagctgtaaaccatatataaatgaatgagagtggctgcattcccataaaattttatttacaaaaatactagtttgccaccccttgctctatgacaccaaagttagtgaactacatcaatatggatgagtcttaaaaacgtaatgttggatttaaaaggtagcagaagaatacattataatatgatttaatttawgtaaattgcagaggtagacaaggtaaaggatacaggtttgtgggtttcatcatagttgctgggacctgactaattttgaattctggccttgacatgtatagtctatgtgacgctggccaaattacctaactttttaaagtgtcagttttcctatctgtaagatggtgtgcataatagtacctggcttactgggttgttgggagtattgttatacagtgcccatcaaagtgctcagcacacagtaagtgcttggtaattgttgttatgcttttattctcctgtttaatttatatctctattaaaagaaatatagctgttattgctttggacactgggtgttttttttatctgacctgcattgcatatggctaatgagaagtactaaggcttgcatatcctcacctgaagtcttgagtaatgtttgattccttttgcttagcacaggttgtaaaaccttctagtgttttagtgttgtgttttaatctccacattcatggtagcttgctgaatacttggcagaaacagcttccagtgtcacgtaatctttctctgtggcagttagcatcgtctcagactcctttttcagagctctctcctcctttgtattggcaccactcttcaaattctgtgacttctcagaccttccagtcctctagtatggtccacccctcaaacttctgactcttcagcttcctcagctgaaaatgaagataaaacccacttgaaagggttgttattaggataaaattctctctctaatgcctaagccactgaggaaccctgtaaccatagatcctgactcatttatgccagagtgaggtgtggtatgaaaacaaacaaaactttatgagtagttccttccccatttgagcagcagtgacgggtgaatgtaatgcaagcggcgcattgcaggcattcagacagctcccccctccatttcctgtctgtggctactgttctctagactcttctctcacaccaccaagaatcatttattacaggtatttatattgaccatttcctccctaaggacagtgatgttgtctaactcatctttgttctcatatggtctggtaaaatgcttggcatatagtagggcagttaacaaatttgttaagtgaacaaatgtctactatatgccttgcttttgttcacagaacaccagtgtatgcagtatttggcctgccaaagtaagatgttaaatccaaagtaagatgttaaatcctaatttagcgtttagctatctgaaacacgtttaaaagttacttctttgttttaacatcatatttcgagaaattctaacatatataaaagtagacagaacagtgaaacgagccctcttaaacctgtatccattctccagattcagcaaacacattttcccacttgtgttccacctctcaatctaacctcactcccctgctcttaagcccaagtattttaaagcaatggaagacatcatgtcattttacctctaacattcttcagtatagatcctttaaaatgagaacattttgaatatgaccacaatgctgttaacattcctaattaacagtgattgcttagtagcatctgtaacccagttcataatcatatttcctcagtggtccctaaagtgtctttttaagttgatttgtagattcaaaactcaaaacaagatcaacatagcacatttagtttttttaaaaaagctttccttaaaaaaataaaaacaatacctattttaaaaattatttctctccctttctcttcttcttttcttttcgataactcttcagattagggttctttataatgaaaccataaactttgctctagcagataaaggtttcatcttttaagactgctttgctgttctttttttttttttttgatagccaagcacttaacatgtatagagagcactactgcagttaacagcacagcaaaatgcaaaactgttaactgctctgatttttcttgtgcaatgagatagcattatgtgcagtaccattaggaaaataattttacatcattttcattcataattaacattatttacattaaatgtagtctaaacctgtaaaataatcttgtattcattaaaaagtatatattctttggtatgtttagtttaaatacatctttaaaaaattttagttattcctcttgaatttatggttagggtctcaagaaggaagcttgagactagactgtaatgtgtgtttgaaaaagactgctcatggatgaacttaattcttaaattctctaaagctcaagtggagaaatgacatctgcaaaaaatttatcttttagttgcattatgggtaataaagacaaacatgtgtaactgtttagtgtatttaaaagaaaaggagagataacccaagtgattagaggttttagtagaatagttttgagaattagaattttaaaaaataatacaaaagaaatgtttgagttattgatgtgaattaaatagcaggtttatttcagagttttttttttccaacaatttacttaactttcctattacattgttaagtaaaatgtcaacttaattgtactgcactgtttttgtttgtttgtttgttctgagagcaggaagcaaatcctataatcagccctccaaagagctgaaacaaatatgaagaaaaggcgcttgaggtcatcccctagaatggatcttaactgatagcaatgcagaagcagcctgagactacagggcagaccgagttgagggagggaggcagagaatagcttttcacaggaaaatcagcaggcaagaatgcaaaacaatcactaacgctataaactaagagacgttaaatgacattagggagagactagtaagagagaaaccaagttagaaaacacagcaacttaaaaaccgatatgccaaattactgattagttaaggaaaaaaggaagggtatggttgttttgcagtgtgtggtacctgcgataaatctgtaaggtagaatttgtgactaaccagaacactgtctttctgtaacatgctaatatatgttttgttttgttttttcaatggtaactaaatatttcaggctattattagggccaaaaatctaaaatctacccctaactcaagttttggtttttatttgttctgttgagcaaatctgaaaactttttagatctcaaaaggtcgcttaagttagtaacctagtaacatcagacagtgtattaaggaaagcaattctcaaaagaaccttcatgcttacaaatgtaaaaaaaagaatttcatctaagggtactactgtcctttgagattttttttcttctttttctcctcacagatgatccagttatacaggaggaaaagtatggcactgagctctggggaatgcatggaaaaaaaaattgggaaaagggagtgacaacagagatttccatttagtctgcaaattgtttttggtctttctcatccatagtccagcgccaagagactgtgggatcatacagtcttgtttgtgatccaaactggcagtggcagtactgatgacaacagtgtagtaactgtctgcgctcagtagtgtcgttggcaagcttctagtgaattctttatccactctggtgggccacctcatagagtatacatgttgtctctgcgttttaacttgatctgtggaccaacagttgtttgtgggtaacatttgagaatctctgtttaaagtctaggaagtaaaaggtttttttaaataaaaaatgtaaagcctattcaaaagtacagttagcagaagataaagaacaagccatgaaaccacctctcctctgagtcttgtcttatttttctattttgaccgatttccttctgtgtttgttagcattaggtttggcagcatcgcaaaggtccctgtattccctcttcccccacaaaaaggtgctttaaacaagatagaggttttttcctctcaggatatggcagctatgtggtcagcaaagacccagctcctatctttctgtgttgcagtctttagcttatgactttccttctcagggttatctcctggttgcaaagaaggtccttgcagctccatccgttgtgtttgtttttcaggcagcagaatcgaggggtgagggcaaaatggcccttctctctgtgaagttggtccctttaaaaatctttcccatattcccacccactgatttctgatattggccaacctaatcttcaaggcaggccagaagatgtaaattgccacttttagtaatacagcagtttgatttgtaaaaaaagaagaggaaactattgaatgaacaactagcagtcagccataatttagatcttttatataaaataatttctgatatagttgaagcccttcccttcctccctcctcagaaacaaccactagtaagaatttggtgtattatcctcatgcatattattctctacagtgtttgtgtccataagcagtctgttttattttaatatgttttaaagctgtatattaatggaacatattgtacatattctgtaaatcacttttgtctcattcatcattgtttactgataatgatgcacataattctagtttattcgtttttcctgctatatagtagtctattgtatagttcatgtgtacatttaggttgttacttttttttttttkkgtcattataaacaatcctgcaatcatgtctctttatactcwtgtgtaagagtttctccagggactgtacctagaagtgaaattagtgagtgatagggtagtgctttcttcagctttatgagatacttattgccagattgctctccaaagtggccgtgccaaattacacttggaacaacagtgtgtgagtgtcccatttccttatttcttactagttgtgtttttgccagtttgatgaggtcagattcattttcctgagtactacggagattgagcatatttttatgttgtcttatatgttccatgtttatgattctttgtctatgatttgcccgttcatatctttggccatttttcaattgtgtgtgtttttgttgtttgttttatttatttttttttttagagacaaggtctcgttctgttgcccaggctggagtgcagtagtgggatcacagctcactgcaacctcaggcttccaggcccaagtgatccccccacctcagcctcccaagtagctgggactacagatgcgtgtcaacacacctggctaattttctttttttttactttttgctttttgtagagatgcggtcttcctatgttgcccaggctggtcttgaacttctggttcaagtgatcctcctgtcttggcctcctacaatgctaggattatagacatgaatcaccgcaattggtctgttgtttgttttggtttgtagaagtttttaatacattctgatactaatcttttgttcattatctgtatgtatctgaatatttcttcccggactttcgcatatcttatgatgtctttggttatatcaaaaattttaatttttatgtagtagaaattattcattcttttgtggtttgtgctttttgaatattgcttaagcaattcttcctgatctaatgacgtgacaatagttgcctatagtttagagtgttagagatttatgcctttaagcctttaatgtttttttgtatggtatgaggtaggaattttatttttacttatgaatgaacatttattgaatagcccatccctttcacacagatttatagtgccatctctgtcatatatgaagtttgcatattcatgtgggtctgattctgggctgtcttctgtttcattggtcttttcatgtgtgtctgcctgtgtatgacaccaaattagttaccatatcttgatatatggtagacagagttctctgaccttgttgtttaaaattgtaatggctttcttagctttgctcttccatgtaattttaggatctacttttaaagttctatttaaaaactatattgagattttgattggaactatagtaagtacacagattaatataaagataatttttttctttactatagaaatccttccacacataaagatagtattccttaatttttttgtagatctttctaagcaattttcttctttttctttttttaatattattatttttcattaagagacagggtctcactctgtcacagaggctggagtgcagtggcatagtcacagctcactgcagcttcgacttcccaggctcaagcaattttctcacctcaacctcccaagtagctgggactataagcacatgccaccatgactggctaacttttgtattttttgtagagacagggtctccctatgttgctcaggctggtctcgaactcctggattcaaataatactctttgcctcagcctccaaagtgttaggattacaggcatgagccaaagcacctggcttagcaattttctggttgttattggtacagaagacgtcaactgaattttgtatgttcatcttgtatccagcaaccttgctgaaagttcttgttctaattgtctttatttccttggattttctattattttttgttcgttttcttctttctgattctaaatctctttttttttccttcttgttgtactgcgctagataggttctctagtacattgttgacaggaagaagtaatagaagacatttatctttgtctttttcccaactttaacagtaagtgagttgtttttttaactgtagatttagggcagatatcttttgttaggttaaccaaattcttatttctagttttccatgagttctttgttttaagtgtcttaaaggagtgctgagttttactattttatataatatataagttgtttcctcttacccacacctccattctttgttctaatcttgtcatctatcacatcttcatattaataagttgtacaacacagagttataacttttgttttaattgggtatacatcttttaagaaattaagagggaagaaatcaggcttttatatttattcatatatttaccgtttctggtgttcttcattccttctgacagatctgagtttccatctggtgtcatttcccttttacctgaagaacttcctttagcatttcttaatttgttttgacatttctttacttgaaaatgtctttgttacatgtaatgagaagtcatcctttttttttcccctgtacatacatttttttttccctgtggatgctttcaatattttgtctttctttatctttggttttcaacagttttaaacaagatgtgctgtggttgtggttttctttgtatttatctgcttaggtttcactggacttaaatttgcaattttgttcttccccaaatgtggccattttcaggggtttttttcatgttttgtttttatcctgtttcctctgttctctccttttgcaactctgatttcacatatgttaaattttatgctgtaccacagctcactgaggctctgttcattaaagatttttctttccttttcagatgggataatttcttttgatctccctttaaatggactaaccctgtattctgttgtctataatctgctgtaatcccatcaagtgaatttcccatttcagactttatatttttgtattttacatgattctgtgtggttcttttttaaagttttaatttgtttgataagagtttcctctgttcagttattattaatttcttgaacatatttatagtaggtacgttatagtccttgccaactgatttccacgtctgggtcatcttctgttcagtatccattgactgcttattttcttgactcaacttttctgtttattttcatgtctcgtaattttttattgtatactggatattgtggataatatgctttttgaccctcaattctctcttctcttaacgaatattgattccttgctggctagatttaaactccaaattctgcctccctggcattgggcaacatcattgatatctctgttcagttctttcagctatctaaatgttccttttctttggagcctttggagtctgtcctgtgttatatgattcaaggttcaactaaagatggtggtgaagtttacatagatattttagggttctcacttttctagtatttcctgcctcactttccagttgcctgctagttccaaatctcatcctttgatgcttcaagccaatatgattgtgacttccttcttgagtttcagtaactctgcacagtgtaggctggtaactgctgttatttgtgagtagattagtctagaataagctcctctacttttctgtgtgtgagtgtctcatgctttcactttcagcttttctgaatccttatgtttttggtgtatgtctcgtaaatagcatttagcttttactttttaaaaaaaatccagtttgacaatttagatatatttagtcattttgtcttaattttaataactgatgtattgggatttatttctaccattttgtgctgtctataggtgtggtttctctattattttaaattcctttctcattttattttaaagtgattgattttctatttcctcctttttcaactttgatttttaacttacacattctgtttttatttaattagttgttaccttttaattctcaacatatttgctctttaaaaagctaaaattaatctttctaccctatccctaaacacaatgaccttaaaatgctttaatttcaattgtctttcttccttctcacatgatacgttttctggcatttttatttatttactaaataattattgaactcttctaccttgtgccaagtactgttccagatgatgtagtaataacattaagccacataaagttcctgtcattttggagcttacaagataattaataaattaattaagatacattatgatgtaaattastacttggtgctacagtggaaagtaatgcattaggaaaagataaagaataacattgggggtggagatgctgtcttgtagattagtttctgctctcttcagacatttcataacatctttagggctcaagtatgaaaaacataattcccatgctggggatgtttacaatctaaccaaagagtcccggggaaaagatacatatatggaagccactggcacacggtgggtgaagctgtgccactgctgaaattcccagggaggatgtgtatagtgtcaggggtcttgagaacagatccggagaagagtagggaaccaataaagaagacttcaaagcatggtcagaaaagtaggagaacaagaaatgaccctgagagccaagagaagaggctttatttatagcctgcctattctaaaaataatttaagatggctaagatatcaagtagaatgaagctgagaaagagacttgtgttgctaggtaggacattacagttacttgattaacagatggtttcattgaagtgaagacttgccttagggatagagaaaaagacttcttgtgcagaagatggtaaaggaagaacaaatagaatgataattggagaggttggtgttgtagcaaaaacatgtagaaaatcttagagatttgggggattccatgaccagaaaataacatgagcccctggcctggaggaagttcctgctggatcctttacttcccagaaactgctcccctggtaggcggtgtattttcctgtgtctgagttcatagtgggcagaaagatgcrtattttgctgaaactccaacgcagtgttctgttgtaatgatctggcattaatcttcgtgtgattaaaaattaaagtatgagaagaaattagtaacttacctggcctttgcttttcagactctttagcatgatagttaagatttcctctgttctgaacacacccctttactcctgtctcccaattaattcttctgtttgctgttccccagacattccctgcaatttcttgcctccctattttaactcacactgttttgtccacttgagatattgttttgccttttcctaactcataccaattctctagtcattctccccaccagtttctcttttttgtgcgctatagcccgtcacaactctcggcatcttttgcaaagacttaaaytgtgaaatgacatgcaaactcactttgttgtctctccttctatattgcaagctcgttgaggatagggactgaacatttttcatgtttgtgtgcatcagactgcttagtgtagtgttttgcacatatttgagaaagtttgagtgaattagggatatgtgattctgtgatagactaagtaacgccgtgtctaagatgagcaggtcatatactaggttctagtttgtagctcttaaaatttatattgaagttctgcttttttgcagtctcctgtaaaagtagagtccttaatttagatcctccactgatttgtatcttcatttttttcttgacaggatatatacctatataaatcaataattataggttgcagattggtgtatcaggatgcttttcactgtagtagcagaatacccagttaaatcagtgagggctttatcatcttgcataacaagaagttcagacattkggaggtctggtcttagggttggtctggctccatgaaatcatgagggtcctgcgtgctctccatgttttcaatttgttatcctcagcatgtcattgatggcatgttgatgatggcttcccccatggcctcaagatggttacattacttctaagcatacactacttctgtactctccaacaatagccaaaggttgaaaagtgtagtttctccttcaacatctctatgagggatataactgtttctgaatgcttcccagcagacctccctttcagtaccattagtcaggatttggtcacttctattagctagaggaatagaatgaccgtggttggcttggaccagtcaggaataggtggcctagcagagaatggtcacttgaattcagttggaggtcaaatgcaatgaaaaatgtcaaggttggataaggaacaaacagtgtctcccacagtgstgtgtaggtgtctttggccttcccacctggaaagttaagatcctcacagtttcctaagagggagagagataattttgtatttccactgagcttggcattggatctcagtaatagtttattaactcactaattcatgtaatagacattaacggaacacattttgtgccacgtactgtgctcagtattggggaagaagctgaataaggcatgatcytggcactcaggtggtagctgcctacagttaagtggaacagggtggctgactaaggggggagaatagagttattctaaaataaactgattttaggacattcatttttcaacaggagatgtgggacatgtggatttgggatatgaattcatttgaaaaaccactttgggtaagttgatagttgggagtgaatgactttagggctctacttctcttacattggggtttgatcttacagctagcttcttaggttttaaaaattatgttgattkggggggcggttccaagatggccgaataggagcagctccagtctacagctcccagtgtgagcgacacagaagacgggtgatttttgcatttccaactgaggtaccgggttcatatcactggggattgtcggacagtgggtgcaggacagtgggtgtagcacaccgagctgaagcagggcgaggcatcacctcactcgggaagcacaaggggtcagggaattccctttcctagccaagggaaggagggacaaacggcacctggaacatcgggtcactcccaccctaatactgygcttttctgatggtcttagcaaacggcacaccaggagattatatcccgtgcctggctcggagggtcctacgcccacggagcctcgctcattgctagcatagcagtctgagattgaactgcaatgtggcagcgaggctgggggaggggcacccgccattgctgaggcttgagtaggtaaacaaagtggctgggaagctcgaactgggtggaacccaccgcagctcaaggaggcctgctgcctctgtagtctccacctctgggggcagggcatagcygaacaaaaggcagcagaaacctctgcggacttaaatgtccctgtctgacagcttggaagagagtagtgtttctcccagcatggagtttgagatctgagaatggacagactgcctcctcaagtgggtccctgaaccccaagtagcctaactgggaggcaccccccagtaggggcagactgacacttcacacggccgggtacccctctgagctgaaacttccagaggaacaatcaggcagcaacatttgctgttgaccagtattcgctgttctgcagcctccgctgctgatacccaggcaaacagggtctggagtggacctccagcaaactccaagagacctgcagctgagggtcctgactgttagaaggaaaactaacaaacagaaaggacaaccacaccagaaccccatctgtacatcaccatcatcaaagaccaaaggtagataaaaccacaaatatggggaaaaaacagagcagaaaaaatgaaaattctcaaaatcagagcacctctcctcctccaagggaacacagctcctcaccagcaacggaacaaagctggacagagaatgactttgacgagttgagtgaagaaggctgcagacgatcaaacttctccgagctaaaggaggaagttcgaacccaaygcaaagaagttaaaaaccttgaaaaaagattagacgaatggctaactagaataaccaatgcagagaagtccttaaaggacctgatggagctgaaaaccacagcacgagaactacatgacgaatgcgcaagcttcagtagcygattcgatcaactggaagaaagggtatcagtgatggaagatcaaatgaatgaaatgaagtgagaagagaagtttggagaaaaaagaataaaaagaaatgaacaaagcctccaagaaatatgggactatgtgaaaagaccaaatctacatctgattggtgtacctgaaagtgatggggagaatggaaccaagttggaaaacactctgcaggatattatccaggagaacttccccaaccaagcaaggcaggccaacattcagattcaggaaatacagagaaygccacaaagatactcctccagaagagcaactccaagacacataattgtcagattcaccaaagtcaaaatgaaggaaaaaatattaagggcagccagagagaaaggtcgggttacccacaaagggaatcccatcagactaacagctgatctctcagcagaaactctacaagccagaagagagtgggggccaatattcaacattcttaaagaaaagaattttcaacccagaatttcatatccagccaaactaagcttcacagtgaaggagaaataaaatactttacagacaagcaaatgctgagagatttkgtcaccaccaggcctgccctacgagagctcctaaaggaaacactaaacatggaaaggaagaaccggtaccagccactgcaaaaacatgccaaattgtaaagaccatcaatgccaggaagaaactgcatcaactaactagcaaaatagccagctgacatcataatgacaggatcaaattcacacataacaatattaaccttaaatgtaaatgggctaaattaaaagacacagactggcaaattggataaagagtcaagacccatcagtgtgttgtattcaggaaacccatctcgtgcagagacacacatgggctcaaaatacagggatggaggaagatccaccaagcaaatggaaaacaaaaaaaggcaggggttgcaatcctagtttctgataagtcagactttaaaccaacaaagatcaaaagagacaaagaaggccattacataatggtaaagggatcaattcaacaagaagagctatcttaaatatatatgcacccaatacaggagcagccagattcataaagcaagtccttagagacctacaaagagacttagactcccacgcaataataatgggagactttaacaccccactgtcaacattagacagatcaatgagacagaaagttaacaaggatatccaggaattgaactcagctctgcaccaagtggacctaatagacatctacaaaactctccaccccaaatcaacagaatatacattcttctcagcaccacaccgcagttactccaaaattgatcacatagttggaagtaaagcactcctcagcaaatgtaaaagaacagaaattacaacaaactgtctctcagaccacagtgcaaccaaactagaactcaggattaagaaactcactcaaaaccaccaaactacatggaaactgaacaatctgcttctgaatgactactgggtacataatgaaatgaaggcagaaataaagatgttctttgaaaccagcaagaacaaagacacaacataccagaatctctgggacacatttaaagcagtgtgtagagggaaatttatagcactaaatgcccacaagagaaagcaggaaagatccaaaattgacaccgtaacatcacaattaaaagaactagagaagcaagagcaaacacattcaaaagctagcaggaggcaagaaataactaagatcagagcagaactaaaggagatagagacacaaaaaacccttcaaaaaatcaatgaatccaggagctggttttttgaaaagatcaacaaaattgatagaccgctagcaagactaataaagaagaaaagagagaagaatcaaatagaygcaataaaaaatgatgaaggggatatcaccactgatcccacagaaatacaaactaccatcagagaatactataaacacctctacacaaataaactagaaaatctagaagaaatggataaattcctcgacacatacactctcccaagactaaaccaggaagaagttgaatctctgaatagatcaataacaggctctgaaattgaggcagtaattaatagcttaccacccaaaaaaagtccagaaccggcagattcacagccacattctaycagaggtacaaggaggagctggtaccattccttatgaaactattccaatcaatagaaaaagagggaatcctccctaactcattttatgaggccagcatcatcctgataccaaagcctggcagagacacaactttaaaaaaagagaattttagaccaatatccctgatgaacattgatgcaaaaatcctcaataaaatactggcaaaccgaatccagcagcacatcaaaaagcttatccaccatgatcaagtgggcttcatccctgggatgcaaggctggttcaacatacgcaaatcaataaatgtaatccagcatataaacagaaccaacgagaaaagccacatgattatctcaatagatgcagaaaaggccttcgacaaaattcaacagcctttcatgctaaaaactctgaataaattaggtattcatgggacatatctcaaaataataagagctatctatgacaaacccacagccaatatcatactgaatgggcaaaaactggaagcattccctttgaaaactggcacaagacagggatgccctctctcaccactccttttcaacatagtgttggaagttctggccagggcaatcaggcaggagaaagaaataaagggtattcaattaggaaaagaggaagtcaaattgtccctgtttgcagatgacatgattgtatatctagaaaaccccatcgtctcagcccaaaatctccttaagctcataggcaacttcagcaaagtctcagtatacaaaatcaatgtgcaaaaatcacaagcattcttatacaccaataacagacagccaaatcatgagtgaactcccattcacaattgcttcaaagagaataaaatacctaggaatccaacttacaagggatgtgaaggacctcttcaaggagaactacaaaccagtgctcaatgaaataaaagaggatacaaacaaatggaagaacattccatgctcatggataggaagaagcaatattgtgaaaatggccatactgcccaaagtaatttakagattcaatgccatccccatcaagctaccaatgactttcttcacagaattggaaaaaactactttaaagttcatatggagccaaaaaagagcccacattgtcaagtcaatcctaagccaaaagaacaaagctggaggcatcatgctacctgacttcaaactatactacaaggctacagtaaccaaaacagcatggtactggtaccaaaacagagatatagaccaatggaacagaacagagccctcagaaataataccacacatctacaactatctgatctttgacaaacctgacaaaaacaagaaatggggaaaggattccctatttaaccaatggtgctgggaaaactggctagccatatgtagaaagctgaaactggatcccttccttataccttatacaaaacttaattcaagatggattaaagacttaaatgtcagacctaaaaccagaaaaaccctagaagaaaaccwaggcaataccattcaggacataggcatgggcaaggacttcatgtctaaaacaccaaaagcaatggcaacaaaagacaaaattgacaaatgggatctcattaaactaaagagcttctgcacagcaaaagaaactaccatcagagtgaacaggcaacctacagaatgggagaaaatttttgcaatctacccatctgacaaagggctaatatccagaatctacaaagaactcaaacaaatttacaagaaaaaaacaaacccatcaacaagtgggcgaaggatatgaacagacacttctcaaaagaagacatttatgcagccaaaagacacatgaaaaaatgctcatcactggccatcagagaaatgcaaatcaaaaccacaatgagataacatctcacaccagttagaatggtgatcattaaaaagtcaggaaacaacacgtgctggagaggttgtggagaaataggaacacttttacactgctggtgggactgtaaactggttcaaccattgtggaagacagtgtggcaattcctcagggatctagaactagaagtaccatttgacccagccatcccattacttgttatatacccaaaggattatcaatcatgctactataaagacacatgcacacatatgtttattgtggcactattcacaatagcaaagacctggaaccaacccacatgtccaacaatgatagactggattaagaaaatgtggcacatatacaccatggaatactgtgcaaccataaaaatggatgagttcatgtcctttgtagggacatggatgaagctggaaaccatcattctcagcaaactatcacaaggacaaaaaaccaaacaccccatgttctcactcataggtgggaactgaacaatgagaacacttggacacaggaagggggacatcacacactggggtctgttgtgggatgggggaggggggagggatagcaattaggagatacacctaatataagtgatgagttaataggtgcagcacaccaacatggcatgtgtatacataygtaacaaacctgcacattgtgcatgtgtaccctmgaacctaaaagtattataataaaaaaaattatgttgattggactttatgcctcatatacaagcaagagaatggcttgtactaaaatcccagtttagtaatttgagaaatgtaacaataaagcatagtcccaatactaattaattagtacactcacttctgattagggaggtcaatctgaaggctaaataaggaccagtttcagaaattgaaagatacttgttatataggatttaacctgcttgaacttaacccagtaatcctgtcatgtgatctagaaatcattcccagagccattgctgaagatacaggatgaaagtttgtctgtgagctttgctttgcagtgttccaaatgaccatttgagttcttgttgtgtaagtatacatgagaaaggctctccattgtttatttaatctgagaaggtgcctctagaaataataccatttaaaatttaccaagtgtttactgtcatgtatgagtgtgttgttcattttctcatttagtttagtgcaatggggctataaggaaaatatgtttttctcatttaaaggaacaaagaggctcaggtttttgcaaatacagtaacattgctaggggtcacataactcataagtgttgctgcaactgaaatttgaactcatttgaatttcagcatttggcttaatagacactgatttctgtcttaatatgctgattgtgtgggggttcccaagacccacccgtaggttcagtgattggctagaaggactcacatgatccagcatcagttgtactaacagccaggatttattacagcacaggaaaaaggtgcacggggtgaagttcagaggcaaacagacacaagcttccaagagtcctctccctatggagtcacacaggatgtacataattcttccagcaatgaatcgtgacaacatgtgtgaaatgttgtgtactagggaacctcattagagagtcagtgcccgagatttttattgagtctggtcatgtaggcatctcctgcctaacacataccaaaattccagattcccggaaggaaagcagatgtttatacaaacaatacaatgttgtttgtaaagtttaggcacagtgaatcacgcttatcatttaggaaaagttttatatcaatgtagggaactgttcaccattaaagtttccacatgccagccaagggccaatctcgacaaccaagtccttctaaggatagcaatcttaggcctgttaacttttttcctgtacactgatttattcatttgaagcagttgtgattattatcattcagcttttgacaagtaatgagaaaagtacatattatggcaaactaaattatttaatggaatctgttttgtggagggtggagaggtcccagttgccgctgattttctggaaggatgcacacaacataaagctgtactcatggctcaagtttattacagcaaaggatacaatgcaggaagaaggtaaatggtagagtgggtaggcataggcttccaggtcctatctcagtgagaatcacagggacatgcttttctctccagcagtgagtgatagagacacatgcaagatgtctctagccagagaagcacacaagtgttacagtccagagttcttacagggagctagtcacataagcacattcctaccatatgaccagctctggtaactgaaactggggaccccacaccagacaccaggtacacataataaatcttaatgattactttaaaacaatgctgacagcctggtacatcctgactcactgcctggagcatacacaaaaagatcattaacaagtgactgttaacaatccaggaacatagttctcagagtttggctagggtcattgccgtgactccaggaatcccctagagattagcacaacctaagtaaaacggacctgctgtgttaactcgattcatacagttgaaatactgttggatttgttgaatgcaatatttaatgctagatatactctttagagtatgatattctaaatgtagaaacaataattgatggtaaaatagctgaccaattttgtttctctgagaagtttgtagattttttttttaattagggatttatagattcttttcttttagggtgacttttggatttcctatttttgtccacagctatttgtattatataatgatatgtgttatgttaaagagtaatacaaaaatattaacttaaagacagttatttcaaaattaaccttcactttgtgaaggtcttccttgtgattggctttataacacaatgggatccttttttacagaatttgcagaattgtggaaataccagttttgcagaaagcacatcagccatagttttttttaaaaaagaatgtctgattccaggatatggaatcaatctttgccgctttatttattgctagttgaaacctgctttatgttatacagaaacaacaaagtggatggtgacagtcccmtgcttaaaaatgggacattctgagttaacatagttaaatagattcccatatttttccttattgcagaactttacagaccctttagtaggataatatgcaatgtgaatctaccaggacaaatagagtatagactgtttcctcgacttacttgactctggaatgtctttagtgaagactgtctcagttattggtcctgcaataacagtgttctttagaacaaaatggaccagagggaaagactgtcttaaggacagggaaaggccattagagggttttaggtcaaagagagacagaaacaaaacaactgtagaaaaaacttactttaaacaaacaaaaccttgtatcatatgctgctttctcataaaacctgttcagaaacttccctatcttgatgtttctttgcctgtcaggtttccttaattgatatttctctttggaatgtgaatggcatgtctcttagattggtgtttaacagtgtgattagatgtgggtcgttacattcatgcttgtaccacctacagtacctgacacagtatcaagaacatcattggacaaaataaatatccagagagcatgaaatgagttgtgactcaaaaatacaggcatgtccatgttattgtactttgttttattgtacttcacagatactactttgktttttttttttttttttttttttcaacaaatggaaagtttgtggcaaccctacactgaaaaagtccataggcaccatttttccaacagcatctgctcactttgtgtctttatgtcacattttggtaattcttagagtatttcagaggttttcattattatatctgttgkggkgatttttgattagtgatctttgttgttattattgtaatcattttgaggtaccacaaacttgtgcccatacaaracggcaagtttaatcaataaatgtcttttctgactgctccgccgaccagccgtttccctgtctctctccctctcctcgggtatccctgttccccaagatacaacacatacaccaccacactctgctaagcaacagtattgaaaggatgcaaattaataaccctacagtggcctctaagcattcaagtgaaaggaagagtcatgtgtctctcacttaaaagctagaaaagataacgcttagtgaggaaggcatgtcgaaagcagagatgggccaaaagctgggcttcttgcgccatataacttgaaaagttctgaatggcaaggaagagttcttgaaggaagctactccagtgaacacacaaatgataagaaagcagaacagctttattgctgacaagacagttttagtagtctgcatagatcaaaccaaccacaacgttcccttaagtccagcctaatcaagagcagggccctaactcgtcaatgctatgaaggctgagagaggtgaggaagctgcagaagaaaagtttgaagctagcagagattggttcaggaggtttaaggaaacaagccatctccacaatgtaaaaacaagtgttgttgtagaagctgcagcaagttatccagaggatctagctaagaccgttgatgaaggtggctacactaaaaaacagatttgcaatgcagacaaaacagccttctattggaagaagatgccatctaagactttcataggtagagagaagtcagtgcctgactttaaagcgtcaaagaacagactgactttgttagtaggtgatagtgcagctagtaactttaagttgaagccaatgttcagttaccattctgaaaattctaggacccttaagaattacactaaatctattctgcctctgctctatacatggaacaacaaaggctggatgacagcatatctgtttacaacatggtttattgaataatttaattccactgttgagacttgctgcttaataaaaaagattcctttcaaaatattacttttcattgagaatgcacctggttacccaagagctgtgatggaggtgtgtgatgagaataatgttttcatgcctgcaaatgcaacatttattctgcagcccatgaatcaaagagtaattttgactgtcaagtcttatttaagaaatacatttcataaggccatagttgctgggtctgacccacagaccccgaccaagcgatggatgaacggatgcactcagacacaggtatccagtgagagtgggctaggagactcggctgctcatgtaccccaaggagggtgttgtaaagagttgtagcagctgtggccctgacaagctggtgctgcaggcatttatttatacagatttaatgacaaaggccttgagtcaacacacttttgggtaattaacatggtgcttccccccttccccaccccacacacacacacagccccagcagtcctgcactcagatgattaaaggccaggttctactaagtaaactaagttatctagatcagtttctttacatctccttgttatctaacctaagcgttcaggcacagggtgagagaatctggctgccttcagccaaatccttttctgaagcttttgtaaaatctcccggccttccaagaaggtttgcatctttctacaatttttcccaccacagtgaccaatctcctacacatagctcccatagacagtgattcctttggtggatctgagcaaagtaacagagtttcaccattctagatgccattaagaacatttctgattcatgggaggaggtcaaaacattgacaggagtttggaagaagctgagttcaactgcagatgtggtagcaatagcaagagaactagaattagaagtggagcctgaagatatggctgaattgctgcaatcttaagataaaacttgaatggatgagtagttacttcttatggatggggaaagaaaatagtttcttgagacagactctgctccttgtgaggatgctatgaacacagttgaaatgacaacaaaaaatttagaataatccataaacctagttgataaagcagtggcaaggggtttgagaggattggcttcaatttcgaaaaaagttctactctgggtaagatgccatcaaacagcattgcatgctgtagagaaatctttcatgaaaggaagagttgatgtggcaaacttcatttttgtcttattttaagaaattgcgacagccactccagcagccaccaccctgaacgatcagcagccatcaacactgaggcaagaccctccaccagcaaaaaaattacgattcgctgaaggcaaagatgattggtagaattttttagcagtaaaatttttaaattaaggtatatacattacttttaaagacaatgctgttgcgtacacactgctgtatagtatcaacataacttttatttgtactgggaatccaaaatatttatgactcattttactgaatatttgctttattttggtagtcaggaaccacacctgcagtatctctgaggtatgcctgtagcgaaacttcatttttttaaagaacaacaatatagtagacataaaagttaggtgctatgcatttattttagtaatgatatcattttgagaaacatttttggaattttattttagacttctcttgagtttggctttttttcccattaacattaacttattttttgtgatctttatgcttgtttgatttgtagaattgttccaccataaatatttaaatacttttaactactagatttcttttttcttttgtcagacgaagtctcacttttgtcccccagggtggagtgcagtggtgcgatctcagctcactgcaacctccacctcccgggttcaagcaattctcctgcctcagcctcccgagtagctgggattacaggtgcctgccaccacagccggctaatttttgtattttaagtagagacagggtttcaccatgttggccaggctggtctcaaaactcctgacctcaggtgatccccccaccttggcctcccaaagtgctaggattacaggtgtgagccaccatgtccagccttaactactagatttcttttgcagtatttggaatattattttaagtaattaaatgatcaatcatagctactacattctttttttgccttattaaaacctaccctttaagatcaggaataaaacaaggatgcctgttgttaccttcctttttcaataygttattaatactagaaatcttcgcaaggtagctgaatttaaaatcaacaaataaaaatacaggtgcatttttgtaaatcagcaataaaataccatttcaggtaggaaaaaattaaaghaacaagtattttctaacaaaattgtgttaaacctttaaaagaaaattataaaattttattggaagatgttaggaaaggtctaaataaatggagagagaatatttttatagatttaaagatgcttttggaaagatagcagatctctccagttatttatagatttatttcaatctagtcagaatcatgacaacttttatttttgggttaaaaagttgattctaaaatttttgaggaagacttaacaggtcaggagtagccaagacactcctctaaagaagttgtgataggtgagaagacttgttttaccatatatgaagaattagtataaagctgtaaaagttaagacaacagtatggtatagggagagatagatcaatagaagagaatatggaaacccagaaacttggcttgtgacaaagttggtattacactcctttagagagagctttccataaatagttcttggacagctggttatccacataggagggaatgacattgaatccctgcttaaatgggaaaagcaaacctttaacatttttagatattaaaacattataatgatttctagatagagaagattttcttaaaacatagaaaatatgaaccgtaaaagatgctactttttttgttttagagatgggggtcttgctatgttgcctaagttggtcttgaacttctggcctcaagcaatcctcccaccttggcttcccaaagtattgggactataggcattagccaccatacccagacaaagatacttcttttttattaagaacattgggaaaagggcttgggatggtggctcatacctgtaatcccagcactttgggaggctgaggtgggaggattgcctgagcccaggagtatgagaccagcctggccaatatggtgaaaccctctctttgcaaaaaaaatacaaaaattaggcgggcatgatggcgtgtgcctgtagtcctagctcggaggctgaagtgggaaggattcattgagcccaggaggttgaggcttcagtgagccatgattgtgccactgcattccaacctgggcaacagagggagaccctgtctccaaaacgctgggaaaagatactgcagtacatttaactcacacaaggctacattaggatcttcacagactaacaagaaaaacacaaaacaacacatctagtagagcagaacttcagtaggcatattagagaagaggaaatggaatgatcagtaatgccagagatggtggggaaatgcaaattaaaactatattaagataccaattacatcagattgtcaaaaataaaaatgtctgacagtaataagtgttgtcaacgatataacacatccaccacgtgcagtgatataacagttcacatctggtgggtggtttcagccacctgggaaaacaaattggtgatatctgatcatattgaaaatatgcatactgtgccacctaacaaccatacgtatatactttagatcaggggtcggtgtgatgactcatgagttaagaatggtttttaacatttttaagtgcttaaaaaaaataatattttgtaatttatagtgtgaaaattatatgaaattcaaattttggtgtccaaaaataagcttggaatatkgtcacattcatttatgtacctcttacagatgctttcatggtacaacactagagttaagttgttgcaacagacattgcatgactcaaaaagcctgaaatctttatcatctggccctttgcagaaaatatttactgacctcttctctaaataaatactcttgcacatgcgtactagtagacatgttcaggaatggtcatagcagtattgcttgtaataacggaaacctagaaagaacccaaatgtctgttaagagtagagaaataggtttgctaagccagcggaatactattcagtagtgaaatggaattggatgcatggatggatccaagcatatggataaatctcagaaacagtgttagaaaaaagcaagtcaggtttttccacttataagcacttcagaaacagtcaagtataaataaggcattgttaaagatactcgtgaggttaaattatcaggacaagkaaggaccgtaagaatagggattgcctttgaagagttggggaagagatgggatttgagagggaactttaaaaatcatgttcttattgttaaaccaggtggtggagatgtgtgttgtgttgtgatcatttatttccgtgacatgttttatacgtactcttttgatattttataagtttttgtgatctggggcattaaaaagtatcttttcaaatagtatagtctgtctcataatatataattatgacccacagagkggaagctcatcagcagactagaagctgctttttacctattgccccctcttccctggttcyccaagcattctggttgtgtcaggaacccaattcagattttcttaagcagaaaaggggactaataggattcctcgttgggtcactgaagccaaggaagagtcagggacttggtcactgtcagggtgctctgccactcatctgtatgtctctgcttggccacattgtttttggctgcaagtggccttctccatgtcgggggcagtgtgactgagcgcagtcctagagcacagccttccaggtctgtgactcaggccaaggagtcaggtcctgtggtcagcctggctaggtcatactgtggccaggcaactggatctgttaccagaagaaaccttttgaggaggggaggagaggttaagggtcagaatcatgagcccggcagccacttctgtttgtaatggttacatatgtattaattgtaaagcaatatgtgtggcattttgtcacacctttgtgtggatatcagggctgttttgatgttaacgctaagatgttgcctaagacatggcactgagacatggccgaggtgggaagaggggttagaaatgtctgttgagcatattattacctgttaaaaataaaaatacagcatgatcagctctcctaccactttatagtcacacctgtctccttcccttcttcccataaggacatttaaggcattaagtacttgagtctaaatagatgttacaaacttggtttaaaacataacacatatctggctgggcacggtggctcacgcctgtaatcccaacactttgggaggccgaggcaggcagatcacgaggtcaggagatcgagaccatcctggctaccacagtgaaaccccatctctacaaattcaaaaaatgagcagggcgtggtggcaggcacctgtagtcccagctactcgggaggctgatggcaggcacctgtagtcccagctactcgggaggctgaggcaggagaatggcgtgaaccggggaggtggagcttgcagtgagccgagatcgtgccactacactccagcctgggcaacagagtgagactgactcaaaaaaaaaaaaagaaaaaaaaacacatatctactattctgaatgactggaagggcatttaacccattggtgtttcattgggatgcaaatttgtagggagtttgtatcttttgcttttctgtttgccaggttctttgttttgaacatacattactttacaaacaggaaaaatataaacttttaaaggtattggtggaagtcagtttgtcatcttaaaaactgacattccactcaagacactaaacactgtattctctaatttgaaacattcgagccaataaattttataggagtttatttacatcatgactaccccaaatgataagcttgttcttctgacctctaaacttgagataacacccgggaaataactacagaaagagaatatccaggttttaatggaatgtggacatcaatctgggcaggaattttggattgattatttgctaattttttgttaaatacttatgttgaataagaagattccaagacctgaaaattggttctcctttttctttggctatcgaataaggcttctcagtgctaaatttcgatcagtaaccacttgacagctcaaaaactgtggcagaagtattggcctgaacactttataggaagctgggartataaattgaagcctacgagactggagccgtactcactttggctactaggggtaagccagaatagctgctacttggttttgacaattttggcttcagttatctttctacatattcacttttatattgctataaggtaggatccaagtttattttttaattatatggaaagccacttgtccctgcaccaattttctttgtagtagcatctttttagtttttcacacttgtatggatttgttttgggttaccatatggttttaagtacgtctgctttataattcagtccaggccaggcgtggtgactcacaccagtaatcccagcactttgggaggctgaggcgggcgtatcacttcaggtgacgcgtttgagaccagcctggtcaacatgatgaaacctcttctctactaaaaatacaaaaattagctaggcatggtggcatgcacctgtagacccagctacttgggaggctaaggcaggataattgcttgaacccaggtggcaaaggttgcagtgagccaggatcacacccctgcactccggcctgggtgacagagcaagactctgtttcaaaattaattaataagttaatggattaattaattaattaatccmttccccaaagcctcatttgggttttgataaaaaatatattgaatttatagattaattttgggaataaccctggattcattttytcatctattcattagttagttattyttttgkatccttcaataaagctccccagttttyttcacctcttgcacctgttgggttttcatagctattttgaatgtttttttttttttttttttttttttctgtgagatggagtctcgctctgttgcccaggctggagtgcagtggcgcaatctcagctcactgcaagttctgcctcccaggtcacaccattctcctgcctcagcctccttcccaagtagctgagactacaggcgcccgccaccatgcccggctaattttttgtatttttagtagagayggggtttcaccgtgttagccaggatggtctcgatctcctgacctcctgatccgcccgtggcctcccaaagtgctgggattataggcgtgagctgccgcacctggccggtttattttatatattctaaatagttataactaccatataggagcacgactgatgttatatgttcatctgtagtcatctgccttatgaaatcaataattagctctaatggtttatcttttgattcttaaataatttctatgtagaaatcataccatctgcagatgataattttgtttttttccccctaatccttaattcattttcttatctgttgcttggaccttcagtacagtgtcagactgaagtgaggatacataacttgccttattttaactgaagcttcatcattaaatatgatgtttattgtagattaaagaattccctttctagttctagtttgctgttgaagttttcggttgctgagtaatgaattacctaaaaatttaatggctttaagcaatgaagttattatctcatattttctttgggtcaggaatggaagagcagtgtattagttcatttttacactgctatgaagaactacctgagactcgataatttatgaagaaaaggggcttaattgactcacagttccacgggcttaccaggaagcatgactaggaggcctcaggaaacttacaatcatggcagaaggtgaaggggaagcaagcatgtcttaccatggaggagcaggagagagaaagaggtgggggaagtgccacacatttgtaaaccatcagatctcctaagaactcactcactatcccgagaacagcaagggggaaatctgcccccatgatccttttacctcccaccaggtcccttccccaatactggggattacmattcaacatgagatttgggtggggacaccgagccaaactatatcaagcatcttagcaggatattggctcaggatctttcatgaggttgtactcaagatgtcagctggagctgccgtcatctgaaggcttgcctggggctgctttcaagggggtctcactttcatgcctggcagcataatgttggttgtaagcaggaggcttcagtttcttactatgtggacctctgcataggaatgcttaagcatccttctgacatggcactggccttccccagagtgtgatcagagagagtgctgggggaggccatagagtgtttaatgactcagtcttcacttccatcatattctgttggttagaagcaagtcactaagtccagcccacactctaggaggaagttaaatgatacaaaaagtattttgtgtgtttcttttagtctgtctgccctacagagtagcataagtcaagggcttctgtctggatatctttacctcaggcctctcctttgagccctgtgtatatccaagcagccatggtagcatctctcattgaaggttcaaaggcacctcatactcaacatgtcccaaatcacacttaacgtttcttcccatcttctcctcccctccaaaaattggtcctttttcactggtccccatttccatgattgacacctttctctgtccagctgtacaagctaggattgagtttgtcccatcgtatctcttgtatcttcccacttttatcatctccagcttcatctcacatcacagtttccttttctttttcttcagttcactagcttttcagtgttgggctcctttctgctgtagagcctttactattcactgcctgtaatgcttattttccctcaaaccatgtctttcttagggaagcctttttgacaaagtcaaatctattatagatgtgtgtaragctgtgtaccttctttcaaagcagttatcacaattggaatttcacatttatatgattattaacgtctgcttccctggagccaactctgaacttcataaagtcagggagtgtgtgcattttgttcacccttgtattccctgcatttgacacattccctacatttactgtttgggtgactgaatgagttaataagtgaattaatacattkattatagttctgtttgagaaatagagcaaatagaatataaaattaataaaataatctaggctcttttatttgtattggaggataacacttgtcttttttaagtcttttagttttcttggcagaaactctagctgttaattaaataaatagatttgtcgaaggttctcatatgtaatacctctgtctggttagtatgatgtaaaactagtgatcctggctgtgggtggctgggagactgctgtgttctcaggagagaggagtaaagctaggatccaagagaatgaagctttgttttctcagaaagttactatccagctgagattctctcaaactttctggagagctttggttagaaatatgaggggtaggagaaaatcatttggccgtagaaaatactgattaatctttgggaaaatttggcatgtgatattaagaataggatcagggttaggcgtggtggtgcgtgcctgtaatcccagcagtttgggaggccgtggtgggtggatcacttgagaccaggaattcaagaccagcctgggtacaaagtgagaacctgtcaaaaacaaaaagagaagaagaagaagaagaagaagaaggaagggaggaagtgaggaagggaggaagtgaggaagggtggaagggagggaggaaaggagggaaggaaagagggagggaaggaaggaagggagggagggagggagagaggattggatcagaagtttactgatatgcaaatgggccctgacttaagattttttgactttgtgagagtgtaaaaccatcacmatttatgtgtaagtatggtattcagtaaattgcataagatattcaacactttattgtaaaataagctttgtgttagatgattttgcacaactatatgctaatgcaagtgttctgascacatttaaggtaggctaggctaagctataatgttctgttggttagttgtattaaaggcattttcgactttcgacttaagatgttttcaacttatgatgggtttattggtacattaccccatcataagtcgagaagcatctgtaattaatcactatactttgatattaactctaattttataactttaaaaataagtagttaaatgcatttcaaatggaaggttttaacttatgtggttgggacaaaataagcaacttttagttacttccaaaatgaattctggtatgtgtcttttgagaaaacataaaacagtttctctctttgtaaaactggcattgtttctttgaggtatcctctcccccatgtttgtttatttttaagttgattgagattgaatttatatacagtaaaattcatcattttaggttcagttktataagtttrtacagtggacacagttgtatgacccccagcccaagaaagttatggaatgttttcattgccacagattcatttatgggcaatcccctattcctttttcagcccttggcagccgctgatctgatttattgctggttgctgggtggtgtttcattgtataaatatagtgcaatttgtttatccattcatcagatgattgacatttggattgtttccagatattgatgattataagtaggctgctataaagatgtgcatacagggctgtgtgcagatatgttttcctttctcctgaataaataggaacgggattacagattcttgtggggagaaactcccctgttttccagagaggctgtaccattttgcattcccactggcaccgtattagagttccagttgctccaattcctttccagcacttgttgtttttcttttttcttttagctgttttaatcagttcatagtggtgtttcattgtggttttaatttaatgttgaatttcttttcatgtactcatttgccatctgaaaaaagtgtttggcttttttggtaaagtgacaattcagaccttctgcctattttattggattgtttgttttcttactgtgttttgaaagttttttatatattccggatactagtcgtctatcagatatgtgacttataaatattttctcccaaatttgtgacttgctctttattttctttcaaagaaaaattggaagttttagcttaatcaataaaggtgtatcacctgagtataaacagatattttcttaatggtgtcttttgaagattagttaggaagtccagtttattttttttaatggtttgtgcttttttgttctatctrgggaatctttgcctaaggtctcagggtctcaaaagattttattctgttttattccagatctagttcaaaaatttgagttaatatttgtatgtggtataggatatgggccaatatttgtgtttttattgtatatggatatctaattgttctgggactgttgaaaaaactgttatttctccataacaatggactgtatatgtgtggatctgttgtagagagcagggcttggcttagtgctaaggttagcactcactggtgcactgttgtcaccaataatgttgtctgttgtgacagacagtgcctttgctgtgccgaagattcccagatgatgttgttagtcttttcctcttagaagagtgggcagttgctcaggtgaaggcaacaccagcagcctctggaaaatgtgggatgtttgttctttaaactttatcagaggaacacagccctgatattcatgtgggcccttttctattttccctaagtgtcctccggtctgagaaataaacggagagagtacaaaagagaaattttaaagctgggagtctgggggagacatcacgtcagcaggttccgtgatgcccccgagccgtaaaaccagcaagtttttattagtgatttccaaaaggggagggagtgtacgaatagggtgtgggtcacagagttcacatgcttcacaaggtattaaaaaatatcacaaggcaaatggaggcagggcgagatcacaggatcgtggcgaaattaaaattgctaatgaagttttgggcacacattgtcattgataacatcttatcaggagacagggtttgagagcagacaaccggtctgatcaaaatttactaggcgggaatttcctcgtcctaataagcctgggagtgctacgggagaccggggcttatttcatcccttatctacaaccrtaaaagacagacgttcccaaagcggccatttcagagaccccttgggaaascattctctttctcagggatggtccttgctgagagaaagaattcagcaatatttctcctatttgcttttgaaagagagaaatatggctctgttccgcccggcccacaggcagccagactttaaggttatcttccttgttccctgaacatcactgttactctgttcttttttcaaggtgcccagatttcatattgtttaaacaatttgtgcagttaacacaaccatcacagggtcctgaggcgacattcattctcagcttaagaagatgatgagattaagagattaaagcaaagacaggcataggaaatcacaagaatattgattggggaagtgataagtgtccaagaaatcttcacaatttgttcagagattgcagtaaagacaggcataagaaattataaaagtattaatttggggaactaataaatgtccatgaaatcttcacaatttatgttcttctgccatggcttcagctggtccctccgttcggggtccctgacttcccgcaacaaaacttcttttgtttcctgaaccttattaaaggtctctggggcaaatgtgaaattccttttcaaggcttcctagattatggctaatctttctgaacaaggagatcatattaatattacttattaatggctatcatgaacctaaaaatatgatttatgactcaacaatgcattcataattttgcaccataactatttttataaagaaactgccaccacccctttaccttgaggaaaaaaacttcaaaatgtaattttaaaagtctgattttgtaatatattaattttttctagtaatgaaaaatattatatcaaaaatataaaattggccttgagtttcttggatcaaataatgaagtctgaagacattgttactatattactttggggtttgatgtcctgtagtctcttaaaggactgaaatttgttgttggacagttctcttcagctctgactcttttccccacctgctgatttgttctttgactgagctttgtgtgccttttggaacaaggacttggttttctttctatccttcattttaaggacagcgaaggacacacaaaagttgcttagtaagtggagaataaggaataactttacaataatggtggcaataaaggtagcaattctttcattaaatacattgtactagctttcattaaacaaattgaartaataattatttaattacatatgaaaactagaatcttacctgcaatgggtcgtgcaaattaacaatcttttaaacaactctttagaaagaaaaattatctgccatatttaaataaatgttttttcattcttttacatcttatatctttgatgacaattgcaaacattggtggcaacatacttggaactttatcttcaattttctaaagacataagtagcctttttttttttattgaacataaacaacaaagtaaaaaaaatcaagttccttacatgttatttgctcttcaccagatttcttcctggtacggttatgatctcaaagaaacatctcaaagaagacattttctaagagttttctcttagaagcttacagagatgagcaagccttctgtgacctcattcccttgcggggaacagtaatagaaaccccaaattaccagtggcctcgtcctaagagccaaaccctgtggacattctttctttgttatctcagcctcatagagggtctaacattgtttatccatactccttccttcctctgacttttcatgcctctctcagaggggtctgttttctgcagtatgtggaaggtgatgggtgtcctggagtttcagcccccttttttctctctgccattttcatcggccacatcgtcccctctgccaaccccagctgctgcttgtgtatgtatgcctaacaaacctgccttttcacatcagacccagttactcccctgactgcctattgacacctcgacatgaggcccctcacattcagtgtgaactaactgaactgatgatttagtccgtatttccttkcattgttgcattaccatcatctgtctagctagttaccttggccttaaatctgggaatcattttttgcctctcctttatcttcctttctccccatactccatgtagggtgtgccacacacccctcttctcccaaacactccctcttcactgcacttcaccttcaatcttaaaagctaattgtgcacccttgcgaaacttaagtagaagtagatgaaaagttatacttacatttaactattctgcaggcatttttttcaaataggattttagagaccgtaaaaccacatttgaaattcagatgttgcaccagcaatcagastgctttgccagtgatcaaaagaggcagcttttcatatgaaataacacaaaatataaatgtatgtatatagtttatctggtgagaacttttgttccatgacattgtgcactctaatgctttaggttctcccctcacctcagttaccatagttatcagtaagttgctcactacaggtgacccagtatcaggtattgagtaagcatgattttgaggtaagaacatgacagtagcatccttgttttcatcttgcagtcagggagtattggtttgatgaaaggaggaatataggcaagagatcaaagcccctagasagatgagcataaataataactttacatttataagtatcacttagtgttttctcaggttgctctctagcaaccttgtgaagtaggcaagaactgctgtatatatttcatggataaactacaggcctgccctgaattgttcaggtaagtgcatctctgttggccaccatggaacttgttgcataaagttgcccttgtaagaagctgttatcttgcccacattctggtccttccagggcatctgcatttgtagctttcagcatagacacagtgcagactctgtttcctcactccacttcataggaatgcacttggtttatatttctcctggtcttcagtgacacaggctttgagccttagagtcagctgctgagcaggagattctctacctctctgaggtctctcaggctgcttcatcatgctccaagatgaattccttacgcttaagacacctatgctcaaactatcccaaatgacttttcaaaattggtaaccattcctctagtcattttctcatcatggtataacataataaagggaggtagtagggtgggaaatggaaactaaaaatcagggaagtgtataaaattattgtcagagccaagactaaatgtcagatcttatgacatatacttttcttttccattatactttccacgaatctgtttcctgaatgattggtgactgttgcagttttagaatgggattcagtgtgaaagaggaacgagagttaactcaggaagctgctgtagtgcaggctacaaggagaactctattaattcttgagcctgggtactgaatgtggacagttgaaatgcactgggaatcactagttgcctaaccccctatggtaaytaatagcttgacttttaccttaacgtataatacagcagttgagtaggaaggtagttaagacccaggtgtttgatgggtgtgaaatagtagctcactgttgttttaatttgcatttcctaattgtagggaattgagcacttttctacatgtttattggctatttaggtttccattctacaaagtacctgtttatgtcctttacctattttcctattggattgttstatattgatttgtaggaattatttatatagtcctgatactctttatatattttataagcatttttccaagtctgattttcaaacatagtcttcatagtgaaatttcttattcttaatgaaattaataattcatattacttaatgtttataatattaaattaattttataattcacttttgatgttctgaatttttaagttaatcttttttcctttctttctctrtagggtatgaaygtgatttctgatgaaactggattggaataattttcatgatctttgtatatttatatatatatatttttaaattttgcatttgacttaaagtgccatgagaaaatttgcatactgcaaggtggtcctagccacctccttgatttgggtactcttggatatgttcctgctgctttacttcagtgaatgcaacaaatgtgatgaaaaaaaggagagaggacttcctgctggagatggtgagtgacattttataatagagctgttttaactactatatcactggtttttactaactaatttggataatataaaattttaacttttttagattaactgtagtctgtgacttcctgtgggagatatgaggatcatattgatagttctccaatgggttcatccagcagttaaaagcatgaaagtatcatatatagaattgctgaattcgayttttgtgttcaatatttagtgtagttaatttcctgtaagttactttatgttactaaataatgtgggtatctcatagttgggatatcaaaattgtacagaagattagtctaatgccaaaatgctgagtggagcattaaaattgcattataaggtatcaaaagagattactcctcccctcccatctcattcctaaggggaagaaatttttatagatagatgtgatctgtagaagttgttgttgttgttgttaatgttttagatagctgcagttagcacttttagggagaacttttttgaaaagattgggtgatagaatagaggctgcagtgagatcattgcaatatctagtatggaaaggaaataaatatacaaatataaaggagggaggtaataggtagtactgatatttttggcagaggacattggaaaattcagttttaaactccttttattcaacaaacaaatgttgccattttttaaaaaattctttttttttttttttgtttttaaccataatgaaaatgactgcattgcaagagtcagtaatccagttgttctgggctctgaactctgtgattagttatagaatacatggctatacagcagttctactatttttagaaattatatacaaataattactctttaaacatgttttctttaagcatatagccacatttaaattttttatacttttatgatgagaagggcctttggtcccccaaaatttacaatagaaaaaaaatattgatttgtattgttaactgtaccaacttaactttaattgttatatgtgggcttacataactggttctatttatatcttcttgggaaatctgcctaaaattaggcttagttgctagcactgaattccagtaatgcctaggctaattcctaacttaaattttcactttttccaaatgttttaatacatttttcatccaaagtcagcctattagtttgcataatatttactttatagctctgctgttgagtatctttgttgggtgacaaaatgttgccaccttaactgttgctagaactgtattcatactgtctatgtttaaatcaaagaacaggtattacgattcatcagtcagaaacttgagtattcttttcccaaatagaatggaataaatttcccctcaccctaccttaattcattgccatttataataagctcatggtgttctatcttaaatgtaaagacttgacagtgagaaagaataggctctatagcatgtgtagattcacttgaattttttttgacttttatatgtgctgggcaaggtactaggtgctgttgatacacagctgaacaaaaaaataagacaaaattcctcccttcagggaactcacagtctaatggaatagaaataacaatagtaaatatcagcgtaataaatatcactttaggaatgtgcacaagagtagaaaggaaggaatgccttggggtgtctgagaagctgcaataaggaagtatgttccagcttagtatcagcttgagcaggtgtttgttaggagaggagaagaccttccaagcaaaggaaagaaggatgtgcaagattagcaagtgagaacgagttgataggagaacaagagcacaggaggtggcagaggccatgtcacacaaggccttttatggcatgctaggggttttggacttcatctgtagacagcggcatggcgctgaagcactttaaacaagggagtaaggcctgatcggacctggacttctggaagaatgctttggtggtcatgtaactggtggactggaagaggacgaggcaggtagcagataccagtctgagactgttgtgagagtttggaaaagagcttggaacagacactaaaatgacactggagatggagaggaaataaatatgtatgaaaagcatttaagtagtggagtttacataacctggggggccatcgaatgtagggaataagagaaagagaaaagtctaaggtggctttcatgtctccatggttggacgaattgatgctccttagaagaggagcagytttgatgaaaaggtggatgcatgaagttgagtttggaattttttttttcatttttcttatttatttattcatgaatgagatggaatgtcgctctgtcaccaaggctggagtgcagtggcacaatctcggctcactgctgcctctgcctcctgaattcaagcaattctcctgcctcagcctcttgagtacctgcagttacaggcgcacgccaccacacccagttaatttttgtattttagcagagatggggtttcaccatgttgccaggttgttctcgaactcctgacctcaggtgatccacctgcctcagcctcccaaagggctgggattacaggtgtgaacaaccgcacccaacctgagtttggaatatttaactttgaggaactggtagcgatgttctgcagtagagaatggtcgagatggagaaaatagatggtagtttaagtcttttctgtacctgaggctgtgcatggtatgtgtagagttggaagacacagactccctgttggagagcccctcctggagggtcactgaaggaagagaaggcttcccaggaagtcagagtggaatgaaaagccccaaggagtaggtcatagaagcccagccaagggtggcatttgctcagaggttttacctaaaataaagtgtttctgatagtttggtatggggcttcttgtgaccctggcaagtgtcatttcagggaatggtaactgtggaagtcagtggattctggattcaatatactggagaaacagtagggatgtggctgttctttaggaagcttcagcatgaagggaagcatgtagtatacggtagttacaagagagaaatggagccgaagttggttttctatgtatttattattatttatgtatgttcaggaagaggtttaaactataggggaaaggaggaatacttgaaagaacaaattctcagcagatgagacagtggggtatcagaaacgtgaaaaggattctcctcaaagagcatccacaggttattatagttttgacaaccactagtggcataagtttcaaagaaaaagactgggttttgtacaaaagtacaagctaaaggagcaaaagtctgaaagtaacggaggtatgagatggcctccttgcctctggaggaaaggagaacgaatcattctcccagaaacagttgtgaggttaaatggactctggaggagagctagacttcagttaagtctgtagatggagcctgtgtattgtggagaccagacagtggagaggctttacaacagcctgggggtgtcagggtgttcaggggacagactgagaaggacctccaagcgtgagggaagggctgagccgtaggctggaggggaagtacatagctaaggggagataatctttgaggtccctggtagtcttaagggaagaaatgattaggggaagagcacagttgatgctaataagcaacagtttgaaaaatctgctttgatatgaagtttcagtgcagtaggtgctgagaggtcttaagtcttttcagagcccagaggttgttaaggttctgctagtgacaaayttctgtggtgcatttgaagagatgtttactaaagaggatcagggagagggaatgggtaatggcaccaaggatgccaactttctagtggaattagcatgtacattatgtgacctcaaagtttctctttttttttttttttttaaagacagagtcttactctgtcacccaggctggagtgcaatggcgtgatctcagctcactgcaacctccgtctcctgggttcaagcgattctcctgtcccagcctcccgagttgctgggattacaggcacccgccaccatgcccagctaatttttgtatttttagtagagacggagtttcaccatgttgaccaggctggtctcaaactcctgacctcaggtgatctgcctgtttcagcctcccaaagtgctgggattacaggagtgagctgctgtgcctggcatcaaagtctctcttaatagaacacatagggcctcctggatctttgttttaaaacaaacaaccaaaacaaaacaacaaaaagcattgagcagtattacactccagagtgactttttcatattggaagtacctaatttctgaacgttctgctttacagctctgatttcggtgaaatttagcaaattttactgtctctgctgtgaaaaaagttttcctaggtttgaatagaatggattgatgtcattgtgataatgctgaagacttcctgtaacattgttgttgatatgctgtacttaagagttttctaagattcttctatttacttgttacttgcctgcttcaaggaatagtgagtctttggtgactccagaggggtttgttttttctgagtcgttctcttaagtctatacttgtattttatacctgaggctatctgaaaatagcagagttctgctgctgctagagttagattgggctcccttgaaagaatacgggtagtgggggttatggcctaggaatatttttacactcttctgctttccagaattagcccatttatccactttatggatttgggtgttatatagagtgttcagtatttttaaagatgcagtttcaagtagtaattgattcttcatgtcagtactgcattttcagatcattaaaatattaatgatttaacttttcatgtacttatgctggaattatttcaactgttgaacattaggaagccttggagaacatggtttatggaaaaaacttacaatgataaaaaactttaaaatattactagtaaaggctataataactttataacaaatttttaagtgttgatttttatatatgcagcgcaggtaaattgaacatgaaattggaaattgacaaggatgttgaagtagcagaaagttaccagtgagttaaggtatagatgatattttgatgtttaaaaaatcagatagtgtactgcattttattgcatcttacatacctttgtttatagaatattctgtataccaccgtaaaagtgataacattccagttaccattgtgagccacattccaatttcagaaatgttaaaatatagtaggaaacattttgaaatagtgaatatagtgcataaggacagtaaaaatgttaattgtgtagtaagatcagaaaatagtttgggagaaatgattttagccttttattagtatatttaccccaaaaagaagtcatataactttataccgctttaktctactttcctgagagaaacacacataagaaatttgaaaaatatccttaaagtgtattcaaaggcatgccagtggtttgtgtatgttaatcttatttgggggctttcagagtgaacctgtagttttcttggtaattaccttttctaaaacatgatacttatctacagtgtcatgtaaatgaaacttaactgaagtatataataaaatatgtttgttctcacataatactttggaataacacctttgtccctcccttgtcaaagtgatttgattcttagaaatgagctgcatgtagaattttatgcaaagatattttctttagttcatgaaatgacatccaaactcatttcagtttctttctaataaaattttcacagaacctacttttaatacacatagaagactggcagtagagaacatggaaagtttatacttaccatctttttagttgctttctaatgctataaatgcattaatagtaacatatattcactaaccacatgcatttcatccaaactcgtttgccaagaaaattagtttaatagtccatttaattctgtaggatattgtattttcttattaataattagagtattgtggtrcattctctaaatcattcagtagacatgtaacttttgattaatgataattttaaatgtggctctgaaatttcatatgtaacagtaggttagagtacataatgcaggcactatgttagattttcagattaataaatatcaggtgatgaaatgtgcaaaatagtgcatcagcaggattgtatatgctgtacatttttgcctgattctttaagatctcaaaaccaactttaagcttctggttatataatttcatgtgtaataagcaattaagtttatattttgtagtatttatagtaataatttctccagtcctccttaatgcccccctccaccatggaaattctcaaacagaaacaaaagtagagagaatagaaaatcatggctgggagcggtggctcacacctgtaatcccagcactttgggaggccaaggtgggcagatcacctgaggtcagaagttcaagaccagcctggccaacatggtgaaaccccatttctactgaaaatacaaaaattagccagatatggtggcgcgtgtctgtaataccagctactggagaggctgagacaggacaattcgcttgaatctgggagacmaaggttgcagtgagccaagattgcaccactgcactctagtttgggtgacagagcgagactctgtcttaaaaaaaaaaatcaaaaaaaaaaaattaaactctcatgtatccatcatctggcttcaagagttgtcaactcatggctagttttgtggcatggatacctctttctctttgtctccctcagacctgttttgtttgttgytgaagaagaaattgaggtatttctcttttccagtttcctgcagtctggatttgcatccctttaatggtgcatgccatgtccctttgtcccgtatatttcctgtaaattaggtctagaggcttgatcaggttgaggatctttttccccctagtaaaaacacagatggtatatgtatatgttaatactcttcatttaaaaactgagcagcatgaaaacgtttctattttgatttttctataaagcattttatactaaaatagagcatgggtaacagaaggatatttataatcagggccactagatgtctcccacctactctttatgttatctgtgccatccacaaaagatttttgtcaccttcagaactctgccggttccttttgaccactgatgtaccaatctcaaaatctgttggttgttctttactttcagagactggcaagtagaaatgactatacgagtttaacagtatttgatttttaaagctttaaaggctgattttatatggagtattacacttctgtacttatagtttttactacacttgttgatgatttttgtcattgagaatttttaaaaactctaccaactctcatatttaaggagcttacttactgggcaaacattaggcaggacttgtttttaaaaactatgttacttgagtttcctataatttttaaagtaattttctactattttaatgttccacataaaatcccaatttatcctgagaacaggggaaaactaatgcacacttttttcatcatcattttctgaaatctatttttaaattctggacgtggttgaggacacagtgaatagtttcatatcctgcagctctggtattggtaggtggctttgtaccactggctgaaacaatcaccctaaagtcagctttaccagctcgtcctgttcttgtacagatgaagcctgactgaagagagatggcttttctgctgccttgatgccactattttttgtttagaaatgttttgaggatgcctaaaaaacaatctacaagagaataaaactttagattttaaaataagtaatgcataaaatatattttcatcccatttttgacctcacctcattctttagccatcccttatakatgagaagtttaacatagcaccttccaaatttaatatatcccagaacctgtttttcttggacatttattaacgtctcaaaaacataaggaagaaagtttgggaagtgctgatcaggcacattgctctttttatgtctgtatcaagagataacattacttttgatgagaattcttgttctaatgggaggggtacataagacaggtttgacaatcattataatgagagatagcaattggttagagacataagaaccctgaatgaaataatgtgatagtcaagactagtaaataaccactatagagagattcagaaaagctacagggaagagaagccattttagttgggcatgggaaggcaaatagggatttggtgttgcagcgatggaagccgtgaggggatgtgagcaaaggcatggaagcaggagaatgtgaggcacgttggaaggaaggcagtgggtggctgtttgactgcaagatgaagtactgtgggatgggaggaaaaggtctagcaggtgatagttttggaaaattaggttcaattccccattacagaggttggactctaggaggccataagaataacaatgaaggctgcactttaaggagatcagtgtggcagtagtttttgagttgggagccaacaccatgcagtgactcaggtgagtggggcaaggtgacgaagtcttgagtcaggacastggtgtggaggtagaggacaagacagccmcttgaaagggttaacagcctaggagagggtgggctcagaaagggttctggttgttgagggcacagttcaaacacaaatgttattaaatagaatcrtgaatcaatcaattgctatgaaattaatgttagttaagtttcttcctattcttagttctagagccagtacaaaagcctcatgaaggtcctggagaaatggggaaaccagtcgtcattcctaaagaggatcaagaaaagatgaaagagatgtttaaaatcaatcagttcaatttaatggcaagtgagatgattgcactcaacagatctttaccagatgttaggttagaagggtaagtacttactgtggtcctgatagtatgtgaatgaaaagtatattctgaattttcagtaaattgcacttgagtgctgattgttcttaaggcaaatgttatatcactatgttactacttaccccacttagaaaataattaaatgctgatagaaataatatctcaagcttctactgattattagcactatgtatttcaggcattggaagataattatttatcttaatggattagaaggggattttaaactttattattaccaaaatactcacatactcaactttttacaaaaagatttaagttgtatgtaacttgaaacagtgaaatacacagtcgtaagtatacagctcactgaattttttgctatgtatacacctgtgtaaccatcagccaaatcaagacatagaatgatcccatcacccctgaaagtctccttatgttttttgtagtcattacttacatccccagaggcagccgttatattgacctctctaaacatagattagttttgtctctttttgaactttttatgatggatccacaccattttttgtgcctttaagattcatattgttgcatgtatcagaattttattcttttctactgcaaatagtgatttgtaatatgaatatgccattgtttatttatacattgatagacctttggattatttctactttttgacccctataaataaagctattgtgacattcttgttcatgtcttttggaggacttaagtgcccattaccgtatgctrtgtactagagaaaggaataggttatgcatttatatagcattagcatgtgctaccaaatattttcccaaaatgtttataccaatttacactcctatcagcaatatattagttagatgtctagttgctccataagaagaaggtaatacaaggtactagagtaccataggcccagttaaaagcaagcaaactatacagaaaataggtagagtaagtgaacatgtacattctgtgctgaggccccctaaactccttgctctcattgatgctggcagccaagcttgcctcctccagagaagagactggaagatctttctcatcagaattggataggcctagagagaagggtaagtacctagtgtggtcctgatagtatatgaatgaaaagtatgtgctgaatttccaacaaattgcactttagtgctgattgacttgggaaagtttccaacttaatggcacagcctgatcacccttatggaaactcatagtcattgagtcctactcatgtgtttaggcctcatattcagcctcttggtcttccattcttaataacaaataggtaagcaaggaatactagacatctcaggaaaccctcaacaaacagagaaaagcaactttgaggaaacaaaaactattaaggtagaacacataaagagaaataactaataacctcaacaaaatagagaatatattacaaccataaaatgagaataggatattattcaaaagatacactgagagaaccagaaagagcttttgaaaataaagaaaaatgcaccaaagagatggacaacagtaaaattatatgaacattgaaataacaatcaagaaatccaatattttaataataggagtctcaaaaagaattttaaaaatagggaagagaaaatttatccacaaaattttccataactgaactgcacaaattttcaaattgaaagagcccaccaactttttgggacaatagatgaaaatagactgtactccaagacattgtgactttcagaacactgaggatttcaacccccaggggggaraaaagaccttttacaggtttcttaagaggcgaaagaaggtcacaatcaaaaggttattaatcagaatgccttcagacttctcagcaactctagaaacaaaggagcaaaattctaaaggaaaataatttccaatctaaaatcttatattcagccaaacttgcaataaagtgcacaggttaaataaggatatttttggacatgcaagatctcaaaacattgaactcccaagcatccattctcaggaagttactagagataggacgctaccatttaaaaccttggttttaaataaaccaaggacaagagagacatagaatgtaaaaaacaggagattcagcttgtgtaagaaatggtgagaatgaccagaaggtgatgaagggagagcctgagtgagagttgcacaggcagaggcgaccagcccagatggagccagtgagaaaattccagaagagacttcaaaaagataccattgaagttacacctgatatggctgaatgtctagagtagatttagacaattgataggaagtttgggattgaaatacatagaaaaccatagtaagaaaaaaattaaatgagcattaccttcagggaaaactttaaaaaaattgttcagagaaaacaaaagtaatcatagtttactactacatggcttagccatgaataagtcataataaggtaactgttgaatattgtgcatgtaaaaattaaaccaaggagatgaagagtatctctttatctggcaagttgattaagtggagatcagtcaagagaagcttaatttgtaaagatttttcacaaaccatttgctttcctgaaaatttaaacattgttgaagaaaactatagactctccacagtctacagttaaaatgatgcctgtattataaacaaccttacatttacttcaagagcctcaatcaactattattgtttctggtagaattgtttttgtcattttaataacccccctaagtatatcaccactcttaacacattttattaaatatttatgtctttttgtctttatgtggtttttgaagatacttttattaatgagtgccttttaagtgcattgtaagtcaccagtttttggacattgaacagctttatgatattaggaatagtgttgaaatggtgtgatacaaatgcttgtgcaccaagtttcacacttgaagactcttcagacttgacgaagtccacttttgtgaaagctgccaatacacagtccttctggccaactgctgggtctctgtgggactgggctgcctaggaggtagcgcagagtcactactaccactgagtagcctttttatatcttcactctatctctggactgataaccttttttaaaaaaaaaaagttttagaagactttttattatggaaaatttcaaatgtatacaaaaatagagataataatgtaatgaaccctcttgtatttaccacccagcttcaacaattcctaacagttttgtcttacgaattcttataccctctgagatgtccgtcaacaatctttgcctcctggtattgacacctctttgtagtctccatcttgcactaagattggtctgtgtgagcaatagaacatggtgcaagtaaaatggagtatctccttcaatattatgttatcaaatatgctgtggctttcatgttggtcttttactcttgctgtgatcatttgctctgggataagcccctggacacaataggtgcagccctatgtcgacacccgtgtggtttatggctttttgtgaacaaccaaagaagtaagattagaagcatattctccagccccaagcaaagacaaaacatttctaaatatttcaatatgtagctctgaaagataaggactcatagaaaagaaaaataaaaatgattataccattttcacccctaaaaataacataaacaatgatactttcatatcataaaatacccagttaatattccaacttccctagttatgacatatatatttctttttttatagcgtaggtgtcaggatcaaaattgcagctggtggatattctcttaagtctcttttagtctgtaggttccttctctgttttttttccttacagtttattatttgaagaatccaggtagaatrccttacatcttttctcagcctacattttgctgactgcatcactgtggtgtcatttgaacatgttcttcagttccctgtcctgtgaattggtagttagacctaaaggcatatcgtaccaatatccttaaagtcaagtaaattgtgtggttgtggtattaaaggtgtgagatctggcccataatatgcattgttattatggacaggttcattacatgtttcatttgtctactttccctttttgtagctcctgttagctaggcattaagtgcactaaggaagaaaatatgttatcaaagttgatgatgtgaatgctgcatatcaaaacttgtgaaatgtagctaattccatgcttaggtgataatatatacctttaaatgcatatgacttttttaaaaagaagatggaaagttactgaactaaccatcttaagaaattagaaaaggaacacattaaagagaataagtagaaggaagagtggaaacttaaaacttggaaacttaggaaataaaaacgtacagtagaggaacagcaaagtcaaaagttcatgggaaaaaatgattaaaaaatgataaaattgactaatcaagaaaataagagagtcacaaatccataaaaggtggcgtcattacagatccagaccttaaaagataatatatcacaaagatgagaaattataaagtagaatacaaacatcgagtatagaggctcaacaaagctgaaagttctttggaaaaaaatcaacaaaatcaaaaaacgctctcctaaatagcagataatggtatgaaaaagacagcatccctacacatcttgcagacgtttgaaagattatatgtagattatatgaggttttttaaaatagtcaaactcgtagaggcagggtgtagaatagtagttgccagggtccggtggcaggggagaaatgaggagatgctgattagtgggcataaagtttcagttatgcaagatgaataaggactagatacctgctatacagtattgtgcctgtagataacaatgctgcattgtacccttaaaaacctattaaaaaggtagatctcatggtaagtgttcttaccacaatgacgtaaagataagattataagtgaatattataaaatcccaattttttaaaatttagatgaaattagtagttcctagaaaaatataacttagtaaaattgacatcagagaaaagaaagtataagttctatagctattaagtagaattaattatttaaaagcattacacacagccgggcgcactgactcacgcctgtaatcccagcactatgggaggccgaggtgggcggatcatgaggtcaggagatcaagaccatcctagctaacatggtgaaaccctgtctctactaaaactacaaaaaattagccaggcgtggtggcacrcacctgtagtcccagctactcaggaggctgaggcagaagaatggcatgagccggggaggcggagcttgtagtgagcccagatcacaccactgcactccagcctgagcaacagagagagactccatctcgaagaaaaaaaaaaatctttacacacagacattcacacagttagacataaacacagacttccaggcatagatggctttgccaatgaaaatgaagcaacatatcaaacttatttcatgaaatcagcatgatcttgatatgaaaatctgacaaggttattacaacaaagaaatattacagaccagtagtctcgatacagatgcagatttataagtgaaatccagcaatatatagaataaatgatacattaaaaataaattggtttattccagacatgtgaagttggtttaggatttgaagatcatttagattcaccacatttataggaaaacaggcgataagttatgtgatcatttcattagatacaggaaaaacatttgataaaatttgtcactgtcatgataaaaccccttagcaaactagaatagaagggaacttctttaatctgacaaaagatttctagaaaaacaaaaccctcccagcaaatatctatatttaataataatgttgtaagctttccctttgagatctggaacatgacacagatgcctgttaacaccacttctgttcagtgtcttactggaggtcttagccagtgtaaggaggcaagcaaaagaactcactgttatgaggactggaagagaggaattaaaatttattaaaatttattactttaagaagttcattaaaattttattatttgcagttgacatgattgtgtataacaaaaatccaaaagaattagaggattagaataaaaaagtgtttagagaccggtcacggtgactcacacctgtaaccctagcactttgggcacctgaagcaggaagattgcttgagtccaggaattcaagaccagcctgagcaacattgatgagaccccatctctacaaaaaaattaaataactagctggacacagtggtgcatgcctatagtcccagctgctcaggaggctgaggcagaaggataacttgagctcaggagttcgagattgcagtgagccatgattacaccacactgcactccagcctcrgtgacagtgtgagactctgcctcaaaaaaaaagaaaaaaaatattcagtaaggttgaaggttttaaggtctatattaaaaagaaaaatacgttacatttctatatgttgttttcttacaaaagctagaaaataaaacaattttaaatattacttataatgtagtctgaaaatatcaaatatccaagaaaggctcttcagagtaaattctaaagcaaagaaaaattaaatacctaaataaatggagaactatcccacattcatggggtcagactccttaatattataaagatgttggttctttctacattcattagtaggtttgatgcagtgccaatcataaccacgtatacatgtgtaatttgacaagttgattctcaaatgtgactggaaatgcaaagacctggaagagctagacattcttatagaattattaagatttcttagaaaactgtaataattaagataatgtggtatcgttgcaaggatagacaagcagatcagtggaacacaatagcgagttcatgaccagttctgtacatacttgaacacttggtttaggacaacggtggcactatgtggcagtaggagaaggatgatcttctaaaaaatgaacaaatgaatgaygctgggtcaacttgatataattcaagacaaaactgaaactgcatctttacctcacatcatacagaaaaatcaattttatatgtattacctgaaataaatgtgaaggcaaaccagcaaagccctaaaagatcacataggagaaaatatctttatgatcttggggtaggaaaggactttgttttaggtgtatttgtactagatggctggactttttttttcttttaaatgacagcctaccatttatttatttaattttttgcttctctcgtgctcatgttcataggcagcctaccattgaakggactctcactctgtatatacacacatatatatttttgagagacagggtcttgctctgttgcccagactggagtgcagtggcacagtcacagctgactgcagcctcaacctcctgggctcaaacaatcatccgacctcagcctcccgagtaacaaggactacaggtacacaccactacactcggctaattttttaaacgttttgtagagatgggggtctcacgccacgttgcccaggctgggactttgtattttaaatttaatctttggtttttaatagatgacttttgtgtatattatgacttgatctacatgtattatgacttgatatatttgaacttcttttaggttgaaccatatgaaattgatattcaaccacttttgacctacgaaaatgacaatttcataaagtttgacttaataaatcttgctttctgtttagtatctttttcatttttttcctcctttcctgcttttctaattgatacagtttcaactggtaaagttttagtattcatgtttttctgtctcttggtttggaagccgtacacttttcctttattagtaagacctaggtatattgtaattgtcaaggtgtagatttatctttatgtatctacatgttcagtgcacatagtatacttttgatgtgagcactgatattattcttcaattgtgggacattcctagctgtaatctcaaatactgctgcttcactatttcctccaatctgttcttttggagctacttatatgcatatactagagcttctcaatctatactcttattttttctctgtttgttccttttcaaattgtctctaggtaaatttctcattaatatcttgatagtggcaaagtccaagtctggctctgccatttactggctatgtggtttaggacaagttgtctgacttttctatacctcaggtccttatctctaagataaagagaattacaagggtggttgtgaggatttgtaaagtgctttgcacacttcctggaatctaggatacagagaaggcctctgttcaaggagtgagctccaggtccctgtttgattctcaggagaagctgactccaaagggacttttccatctctacttttttttctttatttttctactcatttcctgacttccaaagcagattcacaatgaaatgccaagtggtaaatattagatggtattttcttcagcctcagctatgctggacagaggtagttagctgctttccattcctgctccccgaggtggaaggaagaatggtgtgggatggcccttggagtgcagctttttcaccaccttttggaacccagagaaaccttgcttatgttctaagacatgggcttaactggtgtgtagctggctgtgcccagatcttcctgtctgccaataacttctactgccttgtacagtctctaagagcatgtttcctgaaggaaactggagggaagaatgacattattacactgttcagaagagttaaatagaagtaacagtccctgaataacttttctaatgtgtgatcttagggaaggaagtgtaagacagattccaaatcatctagtaagccaaatccatcctatatagttagtcttagatatttaaaaagtaattttaatagcatttattgaatgctttattatataccagtgttatacacattgtcatattcaaacagttgggcaaagtagtagtaatgtgctcagtttacaaatggggaaacttggacttagggaaattaaatgatttgtccaaagtatagttagtaagtgacgcaagtgaaatttgaacctaggtctcagggacaaaatatgtgctctgaatcactatgctttgcccttagttttatggttagatcttagttgatcttctctgaatgagagtgtacagaggagaaattttgtaacattgccaaacactgcctggcaggtagccagacatcttatgagatattgagttgtcattgataaatgctagtgacagatgaaatttaatgggagaaaaagaatacattgaaaatcatagcttgaagggacatggaggagagcattggattatacatgcatagtcaccttgatgtggaaatttcttgaaaattcttttcttggctcttctttcatactatagttcttgacatatatatggatgattgatgagcagtataagttttatcataatttgcagatttaacttgtagttctgttacttactagctgctatcatgagcaatctactttatttaagcctcagtttcctcatctgtaaaatttggagagtaattcctctgtcttagggttgttataagcatacatgggataacatatttaaacctcttaatgcagtttcaggaatttaataaaaagtcaggaggaccctttcaggccagtgccctgggataggataaatagagtaggacttttttagagatggagtctcactttgttgcccaggctggtctcaaactcttgggctcaagtgatcctcttgccacagccttgcaaagtgctggattgcagacatgagcccctgcatccagccagagtaggactataacaattgaaaaatattagtaatagtaaataccaagcgacttctgtagttctgtatttctgaattgttaggtacagtcatgtgttatttaatgactgaggtatgttctgagaaataggtcattagacaattttgtcattgtgtaaacattatagagtgcacttacacaaacctagatggtacagcctactacacacctaggctatatggtatagcctattactcccagtctattaacctgcatagtatatttctctactgaatactgtaggcaattgtagtacaatagtgtttgtgtatctaaacatagaaaagatacagtataaatatggtataaaagatgaaaaattgtacacctgtatagggcacttaccatgaatggagcttgcagaagtggaacttgctctgggtgagtaagtgagtgctgagtgaatgtgaaggcctaagacattactgtatacactactgtagactttatcaacactgtacacttagsctcttctaaatgtattttgcagattaagtaattacgctagtatgttgatggtggctacagtgacactaggccataggtatttttcagttccattataatgatatgggactactgtcatatatgtggtctgttgttgtgggggtgctattgaagctcagcggggtgaatgccctgggtatccaccacattccactggcaaccgcacagtatgagggagaggaaaacaaatggaagcacactggaaccggggagggaagtttcttcctcctgcattgtccctgcagcaccttctacctacagagcttaggcatgcctcatgcatactgcaaaggagaaaagcttataggggccagtttgtatgtatatatttcaatagaaagttaagactcttccctttcttcctaacctataccttgctgttaaacctgtatgtaacttttagaaattagcataaactggcggagtgcagtggctcacgcctgtaatcccagcattttgggaggccgaggtgggcagatcacgaggtcagaagattgagaccgtcctggctaacacggtgaaaccccgtctctagtaaaaatacaaaaaattagtcgggcgtggtggcaggcacctgtaggaccagctactggggaggctgaggcaggagaatggcgtgaacccgggaggtggagcttgcagtgagctgagatcacgccactgcactccagcctgagcgacagagcgagactccgtctcaaaaaaaaaaaaaaaaaaaaaaaaaaaagctcgttttcataactgaggataaaagtctcacttgggcragtgtggaagaaagctgcttcctgaacatggcctgtggcctttctgctcatcctcagctctgtgttctatgaacccatccccctacccacttcaaaccccaaaacacaaaaggacaggtggtttcttgattggaaaagcttagctagaatgctaaagggctctttggttcttctcaagtgccttgtggctcttccaggttaggggtgtgtgtttgtgtgtgtttgtacctgttctgaggttaattatggttgtttaatattttctctatgtttcctcatttgctttgagagaatattaatttatgaatttgttatggtctctgattaaccatttgatttaaaaaattatttcctttttatcatctgttcttctggatcctaatattgcttctctctctgattcttccatccagtttctttctattgttcttataatcttacaatcttacttcctttccatacagttttagaattttattctttaacatattatacaagtagtaaatttgggttatcacttctcttctgcagaacctgctgtctccacatttttctgtcttcctttctgtttcctagccatagacatggctaacagtaccatttgtatctgtacatctttcatgcatcacttgattttattattttattttattttggtaaggtagcagctatatagccaccttggctgtttcctgcttcccaattctacaataataataagtaggattcacttgggaaaagagattgtatgtgtggcataataagattcagctaagtaatggaagaaactctttttctgacccccttttacccatacataggccattcctgacttcagagtcttattccaggagtctgtgcatcaggcattccagatacagcttgctcagctatgatgtacctgaaactagtactaattatatacataaatattctagccaccatttataacagagttttgatgggaaactattttcagaagtattattaggactgctgaggacacatcttttccccctctagcctagtcttttgggccacacctctttagcctagacttaggaggagggagctgcagacagggtggcaggctgtgtgggccttcttgtggtggttagagtgaacatagggagcaagcagtgaagtggaaatgaggctgtggattttctggatcagtgggtagagggaaggttactgttagtaggagacggagaccatcctgtgaaaggggtcttgggaatggtgaagagggagagaggggctgcagtggaatatatcgaaggacagggacagctacttgtttctccttgtctcctggcagaaagaaaggacaagggctgatggggcccctacgatgacttctttcaacccttttaccttgtcatctttttacccttcgcttttccttttcttccaactgccaactggcagccctagggtagagtgttcgataagaagttacttcarcagcttcagaasaggagtcttgcttgtgttttcttcatttcctccccatccttcccttttcccactcccactgacaggcgattacagttgagactggggagtggaaagtttgaggagcttgagagagagcagggaataaaggaagaaagaggagggtggagcaactgttagaatcggggatacctgggagataattatatatgcactgtttaggggggcttatgttctaaagcacatcccttgatctcaggttacctgccgctgttactgttctctgataggctgttatctagtaatttcatctagctaacaaggttgaaagaagagaccatgttgcctaacaaagtgctggaaacatacaattattatgtggattttgtgtgcatatcttttgagtgtgtttggtatttctgattattgcatgctcaggcataaatagtctttagtgaacgagatacatgttgatatttaattatggcrgtggccccatcaagagttggaacagcagggcatgggctgtggagtcttcagtcaggttctgttgcctcctcgctatccctgccctgtttctcatctgtgaaatgtggctccaagcatccgtcttatagaatgactaggaagagtaagagcctggtacaygataggtactcactaaatatttctcttcttttgtggaaggtatatttttgtttagattattaaactacgtaaactccagtggttctaattctttgtctaatagggtctttgaaatacattcagttttgggcagataatatagctttatttcattctccattaaaatgaatcacctgaaaacattcatcaggaggaagtacctaattttaagaatataaatgacatctttgaaataattttaatctaaatatatcactttaaataggtgytatttattaaacacataacattaaccaagacttaaatgaaaaggtaccaaggatcccaccactagagcaaactgcttttattgttctatcacccttctagtccagattcctttattatgcaatcttaacagtcactttttataaaggcatttgctttgtctctaggtgtaaaacaaaggtgtatccagataatcttcctacaacaagtgtggtgattgttttccacaatgaggcttggagcacacttctgcgaactgtccatagtgtcattaatcgctcaccaagacacatgatagaagaaattgttctagtagatgatgccagtgaaagaggtaaattttaaattttaatgccaataatttgctacaccttttgtcactaacggttaaaactagttgctataatttttaacctaataattttatacaaaattctaatttatcccaaaaatatggcatttggattcattcacatatgtaaaaaagtacacccttgtgaaacttaaaatattactttaattagtaattaatttaatttgtgtgttgcatcttaatcttgtttcaaaaagaaataatgctctataacataaactattatgcaggacagtgaaaaaactctcatcattttgttaggattttctctgtgggaagctgcaggactgagtcagtagagagagactggattctgcttacatccatgaatggagaaatgtagttccatgtttagtaggaaatatctctgacagcaaaatggagctttagctgggtgaacctttgttctccagatttttcttaggtttccctattttctccatttctaagtttcaggaatgatctatagctaggtgcataaaaggattaggaaggatgaaaaggtgggatgtaatatgactctcatagtaaatctctacagactcttgcccacgtccttctaggagtctcagaatttttcacaaggctaaaatctcccaaactatttcatgaaatactctttgggaaaggacatattaattaatggtggcttggtcaatattatttattctgaatccttactagagatttcacactacagagtaccatatagaaaaggctctgcttagtccatcagtaaagaaacttgcttaacttagatacccagtatttcctaattttcttattcatagctcatctgtttaggaatcattggtgtcatgtgttccaccaatgttcctgtgttcgcatgagaaaaatttagagctacagaaaataatttcctacttcttttcttccttcatcagccttaaatgatctaccattttaacctcttttgctagtatcttcaactttcttgcctattctcccattgcatctgctatgatttagttaagtatcatactttctccttcctgtgtccacactgaatacatgcatttaaccgaaattaagtttattcacatcaaatatcaattatttggagtaattaatacaataaaaacaatttaaatcttattgctttgccagtttatacagttgcacatgaagaaaaggataaatcctaccttttaaagtaatttatatcttacctttttaatcaaattaaagagatactttataatcacacaagacatttaaatagtataatacattatataattacatgtcagaaggaatgagagcagttaagaataccacacgtaaagaaataattgttgacaacagaagtataaaccttatgtggataatctatttgctaggacttaatccctctgtaagaaaattaacctaagttaatataaggaggaatatatacaaacatttatcctgcaaatgacttgtgcttggtttacttacgtgtcaatatttgctagattaaatatattcttccagaagagatacttaacctgagataaaatgaattattttttcatttcctcctttgtttttctctctcgttctgtgaatgcccaagaaggctgtgtagaataataagtttttgtagaatatggcctaatttaaaaggtgcagggtcccacaacaagtgacagagaaactcacctatagcagttctctctttcctttccctcatgcagccctcacccaacaccccaatctgtgtacatctgtgagaggaaactggtgtgagcagatgtctacctcactgctccacctgaggcttagtctctaggcagggtcctggagtgcygctccagagtccctgctcaggggtctgattctcctttatcttcctgccttggaagcctcaaatatccgggttaccatttccggtatctgggagacagtagatctttgtttttgtggttataatttgcagtcttgctttccaggttgagaatcatctaatgtatttttctttggctccattgtttaagtcgtaattgttagacccagaaaccagagcaagctgtttgcttttatgtaactctttacatctgctttttttcctattcatgagacacatctaaggcaccatcatttctcacctggatatggaaatagactaactagtcaaactaatgtccccacatactcttaccccctcccatctgttcaccatggtgcctccagagtgagcttttttaaagcatgcaaatttgatcatttcgcttccatgcttaaaacccctccactaaggcctgtatgacctggccccacctggcatctccagtcacatcttgaaccattcccatacttcttccctctgtccagttttcttctttcagtttgttaaagaatatcatccttcttcctatctcagggccttcaattgtactgattttgttccctctccctggaacattgttctctagggaacatttatctccaccatctccccagcactgttaacattgaatcatccatcagagttcagctcagatgtgatgtatttagagaggcctttcttgacctctccagacctgtcacatccctctgaaaacatctcataacactctactcctctgcagctctaaccagggtttgaattayttgtctgtttaatagataccttcccccagtagactgtatactttgtcaggtctatttgctcaccattatctcytcagttcccacagtgcctgttatataacaacagtctagaattatataatgaatgggtgaaagaataatgtacactggtatatttaatcttcacatttacttcttctctgtgcaaacttcctaattgggttgtgtagcatagatagtgtgcccatggcctctgaatacttgatttcaagttaacctgctgagtaactctatttattaaagaagtatgaagtaggtgctataattattcctgttttattgatgaggaaaatgaggcttagcatggtagaggagtatccaaaccctgtataaatccagagcctgacctcttarttgctgtgtacctcacttctgattgcttctggtgcaactttactgttacaggatctgtaataaagtcagaatttggacgaatccctagtttatgtcagaagttatgtaattttcatctcagaaagttatcttaagacttagaatttatgtaatgtttctaatctgagaagactattattttttcattttatacaaaaagcagaggtttatatttagtagaggttaggagttagatttattagattctgaattctttattcttccctttattcttctctactactccttagagttttggctaatatttctcagacattgatgtgaatagtgaaattttttcctgatgttcacactctctgacaacctcacactctgagaaatgcatagggatccatttataggccaatagttataaaggtgtcctaagaagattctcccttgtttttagatgtaatagtagcttctaactataatctcttaactcatggcttcatttttgtaaaatgagacttggataattcctaatcccccacccatccctgagtccataattctgtatcgactgaaaagaagacacctatatcctaatgtaattgtgtgaaagcaacaaagatgtcaaacaaagatgccaagaaaatttgtggaagagcaaattttgtgagttacccgaccacagaatcatgcatttttttttttaattttgttcataaacaagacagtatagctttcaaagacatatgggacttggggattagattgctttagttctgaagaaacgttttaaactaatatttttggaaaaacttgttgggagacgcattgtttatgacacatccagtcttgattgatctaaggtactaaaatatatcttataccctactgcatgaaattctatcaaattctggatacaaagtattttaaatttgtgcttgatcaggtgcttccacagacctgaattgttctctctatagagttcccttctaggattctcttgttgtagataaaaagatgggctttaaagtcaggcagacctgggtttgaatcttggatccatcccttaagctgtatcaccttaatcaaattcatgtaatatgctgagccttagattttcatttctaaattatgcataataacttcatagggtcattgtgagcattaaatgagataaaatatataatgagactagcattacatatgttagcattatgctaaacagacacaaaatgttaacagttactacaaaatgttgctcttctctgggattggcactacccttacctttttactcagaatcaatttagatccttctgaccctaagacttggttcataaaatcacagtgatatctttcagataactttttagctcaaatattagaaaatatattagcagaaatgggaaagatcagtgttttggtgtagtgggacacataggcctttctcttttacagctttttatatccctgattatttcattattgagtcattttgtcttgttgagtcaaataggcaagaattgttttactcccatttgtcttttccacctcactatgtaggaagccttttggatctctacttttagtatttaattaatagatatgaggataatctctctaggggttccagtagttccatctcaaatattttcttccctagagagattatcctcatacttattgtatggtgactagttggaaaggcatttggccatattaccaccaatagcagagttctctagcataaattctgtaaaccaacctgatcggaaaaatgttttctctttgctttgaggaagttgcaccttttctgctttttaaagtcagttgtgaactttggaggtaaggtttatcttatcctatatgcttgcctgtgtcctgaggagcataacctcttatctgaactctccaggatagctattgatttcatacacccacatactctccctttccccttttgcccactttttctcttttcttcttcaattgccctttcctttttaaactttttttcttacacctaattgtcagtttaaggatctctatttggccttgcagttaacagtccagcatttcttttccaagtgtgaccccactttctgccccctgattaaaaaaaaaaaaaaaaaaaaagtatagtcaaagaccatggtaatcaacaagacaatttgtttgtgcttctgaggaaatttcacaattttctgaactctacagctattacatattctgtgtcttctctctgttgaggtctggatttaatgctttctttgtattgctgatccttaagcatgattagagaaagaattgagtctaacagagttacttagcgaaacataggagcattcctatccttggttaagtctgagcacaaaggcattctcctaattctgcatataataaaatagaggcagctgtagtccattctcttggggaatataaaggcttcctttagcagaatgggtttatgagtcagggagcctcactgagagtgttcagtaagggtatgttgaataaattttccaaatcaaaattactttcatctgaatagtgccaggccacactggtttgcatgttttcttttgttcattttccagactttttgaaaaggcctttagagagttatgtgaaaaaactaaaagtaccagttcatgtaattcgaatggaacaacgttctggattgatcagagctagattaaaaggagctgctgtgtctaaaggccaagtgatcaccttcctggatgcccattgtgagtgtacagtgggatggctggagcctctcttggccaggatcaaacatgacaggtaattttctggtgtctgtaagtttgcttttagtacatttgtcctaaactatatggtgagttgccaaattctatattttttaaataaatataaaagtaatttcctcccaagtttgctttaaaatatccgtgaagaggactctaaaggaaatatccagaagaccacattctgaagcctggcaggaatgtttgcaaactgttgtactaatgaggagtgattaggaagcatgtcattggaatgtatactatatgctgtgttcaccaagctggagcagaacagatagatggtgaactcagggaagacagcataaaacccttcacttgtccttgcactctaaagctaatgctggagcaggcagatcctctcagcttgtagtgcagcaagaagtagaagagaatggagagaagcacattgtgtcctgaaatgcttaattttgtatggaaagcaccataatcttagataatacaggaagaacagtggtgtaatgaacacctrtggttatagtttttcatgttacacatttttcaaagaactccctatttctggcttagttcttgtgcatcaggagagaacctgacttcagtctgctagacctatgttggttgaatttctgcttgtcattgtaatttgaggtagagactgtccatgtttagattttagtggagtgaacttttactagtcaagtggaacacggtgggagctaaagccacagcatctattctgtttgatagcaaatgctggatctatattttttccctttcaaagatgaataaataggaaaactcagcattgggccaatcaatgggaaagtagagcagctttagaaaagagaacattgccctgaagaatcaaaagaataggatatctgtaaattattttctttaaataatagatgacgttttagggaatatttgctcgcctgaagataacacacaacccatagagagaaagcaaggtgaggtgatgacagaagtatggaagggagtcagctgaaatagcaaccacagtgacttccagtttgggctgcatggtggattcgatattctgaataacttttccaactgaaaaagctggataaaagacaaaacaaattttaaatgcatcattgagttggcacaaaaggaagaaatttgcaaatctcgaaaagaagtgagagcaaatgtgcagtccaaacactaaagccagctttcgctggtagggtttctgctgaactttggggtcactaagcttctgccttgagagacaaataagatggaaggataggagacaaaaacctaggtcctgcctcaggtgagaaggttaatagcaaacacctgtataaagctgggctcttgaaatctgtatcttagtataaagcaagaatgaaaaattaatcccaccacatcagagaaaacttgcctgtctcaaccttggtatgcagtggcagaggggaaacaaatctcccctaagaatttgtaaacaatatagaaaaagaggaaacgaaccaaactctttttatgaggctggtataactgtgatatgaaaaccagaaaagtactacaaggaaaattacagtgcaaatctgttcatgaatgctagtacaaaaatctcacaataccagcaaactaaaccagcaatatacacacacacacgtgcacgtatgcgtgtaaaaaacatatcatgatatcatgactgcttggtttagcgtaatattacaaaaactaattcgtttaatacatcccattaatgtatttttaaaactgtgattacaaacttattaaacacctctgatcactcccatagatwatgaaaaagggttcactgaaatttaacatgaatttattgttagaaaatacttagcaaactattatacagtggaagtttactaatccaagaaaggatggcttaaaaaaaaaaaaaaagcctttgcaagcagaaatcatgttaatggagaaatgttggaagcattttttaaaaagatgtggaagaagatgttaatgccctcaatcaccagttagtattattagaagtctttcttaggttttgcagtactacagtaaataaagaacatttatttattggaaaaaggaaaagcattgttgtcaattgtgtatgtgtttgtgaagaaaacgaatctatacataaaataatagaaacaataagaatttagcaatgttgccaaacacgagattactatagaaaagttcaggctagagcagtggctcacgcctgtaatcccagctctttgggagaccgaggtgggcagatcacttgaacccaggagttcgagaccagtctggccaacatggcgaaaccccagctctactaaaaatacaaaaaattaggcagtcgtggtggtgcatgcctatagtcccaactacttgggaggctgagtcgggaggatcgcttgaactcaggaagtcaaggctgcaatgagccaagagtgcaccattgccctctagcctgggcaacaggagtgagactccatctccaaacaaaagaatgaaaagtttatttcacaccaacaaggaatacttagaaaatataatgcaaaaagaaaagataccattcgtaatagcaatggcagtcatagactacacataggaatatgtttatcaaaagatttactgaaattcacgaaaaaatcttgagagagaaatggataggaaagtcaatatcataagagtatcaattctacccaaattcatatataaattcagtgcatttccaattgaaatctccacagaattttctttgagagactgtacaggccgattctagcattgatacggaactgtaaaaagaaaaaaaatagttgggatgcttctgaagaagaatcagatctaagggggcttgccttactaggcgtcaagacttattttaaagctgtgttaattatggcagtggtatattgatgcaggaattcacaaatagactagtgaaacagggtagggtctagaaaccagctcatttttgtatgtaatcttgatttatgacagagcagtcactcatagttacagcagaagaaaaagggaccattacataaatagtggtggaacaactggttatccatagaagaaataaatgaagttggatacttactgtatatcatagttaaaatcagtcccttgaagattaaagtcttaaatataaaaaacaaaaaaaaaatttttttaattagttgagtgtggtgttatgtgatcccagccgtggtcccagctactcaggaagctgaggtgggaagatcacttgaggaggtcgaggctgcagtggcccctgattgcactactgcattccagcctgggtggtgacagagtagtgataccctgtttcaagggaaaaaataaaaaataaaaacacttactatacaattgttctgtagttggcattaaacaggaatgttttgaaagatttcttaacttgcttttatgacatcaggagaacagtggtgtgtcccatcatcgatgtgatcagtgatgatacttttgagtacatggcaggctctgatatgacctatggtgggttcaactggaagctcaattttcgctggtatcctgttccccaaagagaaatggacagaaggaaaggtgatcggactcttcctgtcaggtaattaatttgtcagacattttgcctaaagtgttattggcagaaggttgtggagctttgggaatcatatcaaatggataagtgtattttgagaaacgtgaagcattcgtataccttatggtagttaacagccatctttcacatatgtgagtgttttaaagaaggatttctcctctaataaaattagaaatttttgcttattctataaatctagtgcacatgagaaatgatgacatgcgtgttttttcattcctttatgaacattttgcaaatgcgtcagatctgtactttaattcagttattaaggataataatacttagcttaattaattgtgtcagtatgtgaagatactacctaaaactgggtccttgcattaaaatgtacaattttaaattcagacttgtaccatctggatgacagttattgactggtaaagttagaaaagcttgtgtaaaacataaaaatagctagaattgacacaaaatataaaaaaattcattaatccatttattctctgattttttttctctacttggtcatatatagatttttttttcaggatggaataaaaatcttcatgctctttttagaacatgaaattgagacctttgagctcttctgagccatcctagaatttagccccattgtaccgacctgctacttctgtattaagagttccttcagaaccaggcttcagcttttctgtttttgggcctcctgcgtctgccttcccttgaattcaagttcagttctggcaacactgaagagattttccactgactgtgtgctkttttccttagcctgagttcttagtagtagtagtgcaagggacttttcttctctttagctgttagtgcaattcactatctaaatcaggggttcctaaacatttcaaaaatgacaaaattttttgaaaatctggtgaaagctatgggtcttctctaatggagaaaaatgcacatgtacatgcagaagatttagcacacaaaaaactcaggtcaagaaaaccctgtattaaatgataattctgaattttggctgtttcttttaaatccttttctcattctttttttcttctaaaatcaaaataagtccaaaccttttttggaaacaactgtttcctctggaaaggcaatgagtacattttagggttcatcttaaaatataatcttcgtggtatctttggtccctgtaacttatttttttctcctggttggagtttactttttctccatacttgttctttataaaaatcaaatgggctgatattcatttatttaaatcttccttcatttcttaataatttctctgcttaatttcacatgttcccactccctttgcatacctgagccctattttgatgaattagactcctcttttgcagaaaatataccacacagtcaggaaggaacatattgattttattctatattttgtctcctctccttaaagatttctagtgggtattaggaaaagacctcactgtttccatccagtttatcttatgtatttatactatttgccaccctttagaacatggcatggtaactctaacctcaatctacttggttaatatagtcaactgccttgaagttgctaggatctgtggagtgggtgcacagtcagatggagaggattgtgaggaacagctttaatttaaggagtttgagatctaaactcagttaggacctgagggccaagaaagatagaaagtactcttaggactgtgacagagagggatgtctgggcagaagcatgacacagcaagtctagcagtcagcatgaccatggtgcaggtcatgtgtgaagaccaaataacacagcataaaacacagaaagcccctggggcgtatgaaagtttatgaagagtgtgagaataagtacttactcagtagttataaatagttatgaaacagcttttaaaaacaaaaactgattgattgtaaattttaaattgctaatggtatagcattattgaatttcaggacacctaccatggcaggaggccttttttcaatagacagagattactttcaggaaattggaacatatgatgctggaatggatatttggggaggagaaaacctagaaatttcctttagggtaagttcccttmaaaaaawttaatcttttatttaacttcaagtatagatgtgcattgattattcatgtatctctacataaaaaataaaaattgaatttaatacaagtttaatgtaacttcagagccttcagtccataaaaaggactgatagtaagggttcattataaactattgaagcaaataatttagttacctttgaagttcagctataaaacttacacaagattccctagttgtttttaatttttattattttcaaggaagtaatttaagctctaaaagctaatatatagtttggatatgctactttgctgctttactctcaaaaacataaatttcacatttaaacataaatttcacattttgtaatatgctttttattttagtgtgaaaattttttttatataaaacctagtcactttaccagctttatatttttcaataaaaatgcgaaagaattctaaaatgactctaaattaatttaacccagtctacatataaagtctttgcatttcatgttcactagaatcaacatatcrtttaaatggcattgcatatttttgcaaataaccaactttagacacatagcttattatagtggaaatcacactgacgtgtactgtaatctgaaccagcgagctcactttgttcccagtgaatcgctttgccttcttgtcaaagagagggttggactcaatatcaccttggagatcctatccagctctaacacttataatcctgggaaaacttgaaggtaggaacactgaatatttaacaaaatcagaactttccaaaatgttattttaattataaagagttatgagatttttaacttggtggggggaatgtattttgaaagaaacagaaggatttcattaaattaaggatgtaagcccatacttgatcatctttcttctgcccctttttttgtttttattgttctaacaaagacaacaaaacatgcttttactgtctcactgaagaacttacaatggatctagttgagattcctaggttctgtttcatgtacaagccgtgacgcaggtttggagaggggtgaacagatgagcatctggctggttactccatggtcaggttttgtttggtggttgtttttaaccatgagccacattaataaatacattatacattctgcacacacaaaacataaaatttaaacattttatgaaacagtatgtccttgttaacaagtacaggttgcaattcatcaatttgaatttatgattctcttaggtataatggcctgcagttagaaaaatactgctctagatcccatatcttttctgtatttagcctttaacctatgttttctttattttaatcttcaacttttggtttgatcagaacccaaattagagaaatgtttctcttgaggaagcactggctttgtaacctaaccatacagccggagcccatcatgtgcccctgattttgcgaaattccaactgtggaacccaatagatgtcaatacttttttaaaaactatcaatgtcatatatggtctttgctgttattttcagatttggtagtatggaggtactttggaagctttttaccagtaactacaatatgttccatttaagtttaaacaaaagccaaacccctatttaattgaaaagaaaaatactatgggaaaactaaggtgaacatttcctgattactcagctacatgttacatggtcatctctgcygttttcagatttggcagtgtggaggaactttggaaattgttacatgctcacatgttggacatgtgtttcggaaagctacaccttacacgtttccaggaggcacagggcagattatcaataaaaataacagacgacttgcagaagtgtggatggatgaattcaagaatttcttctatataatttctccaggttagcgttgttttgcattagaaatacaaggctgtacctttgttgaccctgatcctggaggagaagtaagaaggttagaagtgaagctttgagcagaggtgaacacctgcctcataaggtcattgtaaggaatgaatgaaatcacacacagtatagaaagtgcttggcagaatgcctagaataatatataattaacagtaataaattatccaggtcagtgttgctagcccaggttttrcagatgttctattttttttaaaacctaactgcaacatttagtatttattcctgtgaagtttcatcttgttaaattttcagccatttttctagcttatatgactttttcttgattcttggagttttcattcaacataacaaaaccactgtttttgcagtgggtcatgaacgttctctataagcaggccctcaatgctgtcataggaggctttcgtcaagtatcacaaggccactgagagcccaaaacgtgccacagggccttctttccggaaactttgctattcagagttttgtaggaacagttgttccatcagctataagtcggcctgacattgttactagtccatccttattttttagttactgcaagactgtcaagtggcagggtgcacagttcagtgagttgtgtgagagaagcctgactgcaaacaattgctctgtttaatatttgagcaaaatagaccttgatttttttgtttgtgccttaacatatattgaagtttactgatcccatatcacttatatttcattctcacataaatgtcatttttctctgaaaaattaaaacacattttaatgtattttccttgctttatacttttggtggattcatggtgtctccacttgtatagtcacatatcacccagctgataccactgttctgattcatctggcttattagattcaatatataaacatgtgttacctaaaacaacactaataattcagagtcaattatttctttcaacaggtgttacaaaggtagattatggagatatatcgtcaagagttggtctaagacacaaactacaatgcaaacctttttcctggkacctagagaatatatatcctgattctcaaattccacgtcactatttctcattgggagaggtaagaaatatatatatatatattctatgtggktattatgttcttacttttttattaaaaaaaaataggagttagttaaacttccaataaggaaagtaccttcatgttaacrtttaacttctcttgcttccttcctccttcttaccacgtaagtctaaactatattctttttttcccattcctcctccctgaaagttgatttccactgagttgatgcgcctggagataagctgtgtactgtggggtctgtttttccctattctgtctatagtgatgtgtttcctaaacagactgcaccatctgcaattgtggatctgtaaaatctgtatatatattaaaaaaaaaaagacttctttgcaggtctttgtgaacttgtaattataagatggcttttagaaaaaaatatgaagccaagtagggaaagaaatccaacctttttgtgatagaaatcaatagaaggacaatatttccttttataagtcacagcagcaaatgatgatatgtgtagacagggccacaagcaggcctaccccaggattaaatctcaggaaaagtggcctcccactctgaagaaggttgtcacttcttcagtcctttcattcattcaacaaatatttgagtacctctagtatatgacaagtactgttttaagtactaggaatacagcaataagtaaagcagagatcctgctcttgttgatcttacagtccatgagtaagacagattatgaaaggcacacaatatgtcaggtggtggtaagggcagaagggatagagaatgactgacaagtgagcgtgggtagtagtactgttttatgtaaggaagttgaaagagtacggaagttgaaagagtcctgtcaaggtgattttgagcagagatctgaagaaagtgaatgagcaggtcatacgartttttagggaaagagtattctgggcacagggaagaacaagtataaaggtttctaagatgacartgtacttagcgcgttccagaaacagcagggagaccagttgtctggaatagagtgaacaaggtggagagtagtagaagataaggtcaaagacaaagtgagggtcaaatcatataaagcttttaggttatagtgagaactttgcattttgcattttattctgaatcaaatggaagctatcgaaagataccagcaaacttccactagaaaaggatcacattgtatgctatgtggagaaaaactatatggaaacaggagtagagctggtgtattgttgaagagagtaaaggattatgtcwggtttctatcaagcttgagacactgactgtaaagttgccattactgagatgggaaaacctacaggaagagcagatgctcaagggaatcaacagtagtttgggacacatcaaatttgagatccaagtgaagatatgaataggtctttacatttaagaatattcactttgggggagaggttgtgatagagatgttaacttaggttgtcagcatataggatggtttttaaagccacaaaactgtatgaggtcacctgaggaggagaaaatgttaagtatgagagagaagaccgaggacaatgccagagggaatgccacagtttagaaatcatggagatgagaaggaatcagcaaaaaagattgagaaggagtaggcagtgaaataggagaacctagagagtggtgtcgccaagactaagggaaagacgtgtttcaggaaagaggaagtgatcagctgtatcgaatactgcagagaaattgaggaagatgagtacttagaattggttattgcatttggctagggacatgttatcagtagcctatctcacagtgttgagagagttccccatggatgttgttaaaaactctgttttgaagagagaatggaagaagcaacatagatgaatgtgtacaagtcttgcaaggaattttcttgtaaaagagagaagataaataggtggtagctggaggagaatatgggcttaaaggggtttttatttctttattaagataaaactgtgctgatatgagcaacccaaaagagaaaatttaaagatgcaaaagaaagagccaacttaacacccattagaatggccactatcaaaaaaacagagaatgacacatgttggcaaggatactgaaaaattggaacccttgtgcattgttggtgtgaatgtaaaatggtacaactgctatttaaaaatagtatggaggtttctcaaaaaatgctcaaaaaagagaactacgatattatccagcaattccacctcagggtatgtatccaaaggaaatgaackcagggtctgaagagttacttttacttacatgtttataacagcactattcacaatagccaagaagtagaagcactccacrtgtccgttcattctggcccagctagcaatgcttaggcattgtccaaaattgggtcagttcaaagtaaaaaactcctccttcttggttctaaagacaagctacagagtgactgctataaatcgtgatacaacgtacaatggaatatttttcagtcttaaaaaggaaggaaattctgatacatgctacaacatggatgaaccttgaggaccttatgttaagcataatacgacagtcaccaaaagagaaatgctgtatgattctccttatataaggcagctagaatagtcaaactcatagaaacagaaagtagaatggtggttaccagggctgagggaagggcctaaagaagagttacttcatgggcatagagtttcacatttgcaagatgaaaaagttctggagatttgtttcacaacagcctgaatatacttaacactactaaactgtacacttgaaaacagtttagatggtaaattttatgttatgtgtttctgcaccagaataaaaagaaagaagggatctgttgttatgggtgtcatgtatttgggtggataggaggtgaaatctgtacacaagtagagggtgttgggtgggggtgggaagaagagaggtcatctcttatcatggggaggaaggtagaggaatgggaacaagtgcagggcagctgtaggtttggaggtggaaactggcagtttgtggtggaagtgtgaggaccttctcttctggtggcttgtttcctcagttgaacacaagattatgggctgagagtgaagaaggtgttggtgagggggaattggggaaagagaaaaggatgtaaaatagaaatgtaagataagggaaagcaagtagatcactgaaggaagccagatggtggagagttggtgaagccatctggcctggtgttttcttcagtgccagggcaggcacagacttacgcatttatcctaacagttactaaggctacttcaggattgacttgagctccctacctctgaaccttgttgtgatttaaggaatttgttttcaaacaagtgagggctacattgagtttcttgagcctttcattctcactgatgcctcattaatgggaatgtgttttcctttgctgtgacctcgtactggtcaaagaaggcccagggtgagtggtgcgccagggaaagatttctagcagtcactctgcagcttgtctttagaaccaaaaatgaggagttttttgtttttgttttgttttttttgagctgacccaattttggacaatgcctaggcattgttagctgggccagagttygggcgtgtgacaaagaaacacttgtctgctccatggtagatgactgccaaggcaagcttgcgtcttacctgcctcttgccagctggcttctgggcaagtcgcagcgtttaccctctgtggcctgcttgttatcgccttattaacttaacagctggccttaagccttgtacgcccttaataccaggccacatcctacaggttaaaagtgtcatttctagattggaggtcattcttaagagtacccaccatagtgcagcccagggatcttatgcttctgatcacagcttcacccatgtgagccttcctttgctagcaacagtaatttagcctttcatagatctcttctcatgcttcaagggtccagggaaacctgaaatcataggatttttcagcagaaagggaaatcagaaaatgtaaatatgactagggtaatagatataatttagrgcatctggcttcagctaacgctgacgttcgtagttcctgtaggacctgaacaaatgtgtttcattgtggtatctgatagttgttaactcaggagctgagtattctaaacaacaaaaagtaaacaatctagacctttactggtttagtcagttttaggggctgaccaattgcttttccaggcagatctaataatcctaacatttactgagcatgtactttatgtcaagcacaaatctgaatgcttkatgaatattaaagcacaacactataggattgtgctgttatttccacttcacagataagtaaactgagacacaaataaatggtttaaaaaacacggctaaactcacarccatctggtttgagagcctgtgctgttaacccctaatgtccgtattctttctcaaatctaaccagtatttcccttgcagcagagagtagaaaagtgaatccagattcactaatgctagattataaaaatggtttaacaaagctcttacattgtccaccctaatggagatactgattctggaggagactaatagtagaaacaaagaaacttaagctctaacctcttgcctggttttccaagaatgggtgcattcacaattattttcaattcctaatgtcaaaaatagtagttttaaagtggcagtcaggtacagctaagttgctacttccaaaggggggttgaagagttgctgggtctgtggataaaggaaagaaaaccaacggttactgtgtgcctgctatgtatctgtccctgctagagcctctgtatgtattatctcatttagagcacttaacaaacctgagagagagagagatttatccctgctttaccaatgagaaagggttcttatagcagtgtttttaattctgtgttgtaaataatattgatatctgatgtccccaaggtgctcaattagaaaggcgaagtgctggggagaaggaggtagattttgaggtcaaatatgtttgggcaatactattttacatcttacatccatctgtaccaccattccccrgtcctaccaatagtcatgatatattaaaaggctttgagaagtccttcaacaaagaaacctatttaaatttatttaactagtatttcccaaacatatctgatcataaaacaccttttttattggggcaccttgcaagatgctgttcttcagattgtggtttttggaatcacagtcttagagtaaataacctgcccaaggtctcatggctagtcaggaatgaagcaccatctgcatgtccccacaatctaaactctcacccctacagacactttgaaagtgtggatattcacacactgtaagtcagacaytgctgtgattcaagtagaaaagtttgtttctaacagctcctcaccctttatgatactctcagtttgtacatcgtttctagattgttttggcttgattcagtggcgtgcctggccacgtaaggaaagatgagttaatcagccataaacaattcctatgaagaggaccattaacccactgatctttccccttgaaataacttagatctcctaggatttacactgtttcagaaagtacaaacyaaacttgggcactttccacgtgactttcatagggtggccaatggtgtgagaacttgggtttattagcatgttgtgcaacttttcccatcgttggcaagtagctcctcacaaatggtggaagattttctcctatgtgtcagcatctagacctgcacatctgacgtgtcggctacactgaatttaattaaaattaggccacgcctggtgactcacacctgtaatggcagcactttgggaagccgaggtgggtggatcacttgagatcaggagttcgagaccagcctggccaacatgccgaaaccccatctctactaaaaatatgaaaaattagctgagtgtggtggcccgcatctgtagtcccagctactcgggaggctgaggcgcgagaattgcttgaaccttgggggtagaggttgcagtgagccaagattgtgccactgcattccagcctgggtgacagagcaagagactgtctgaaaatataaaataaaataaaataaatgaaaataaatgtaattaaaagtaaatagaatttaaagcctggttcttcagtcacaatagccacatttgaagtgctcaatagccacacatgactagtggctgctaccatattagcacaaatatagacatttccatcatctcagaaagttctactggatggtgctggagacattaacaactgctgttttaaaacagccaacacggccaggcgccggtggctcacgcctgtaatcccagcactttgggaggccgaggtgggtggatcatgacgtcaggatttcaagaccagcctggccaagatggtgaaatcctgtctctacaaaaaaaaataaaaaataaattagccgggcatggtggcaggcgcctgtaatcccagctacttgggaggctgaggcagagaattgcttgaacccgggaggcagaggttgcagtgagccgatgtcgcaccattgcactgcagcctgggcgacagagtgagactctgtctcaaaaataaaataaataaaataaaataagccaacacaggaggttacccatctgtctctgtatcatgtactgctaccctgtcatttcactcatttctccttcccaggtcctaagttgaagtggtcatatttgccttgtcaaatctattgttttcaaatcttataactaatgtatgccccctctaattctctctactctgaaataatttggaattatcataacataattcatagggatgtatcatatcaaattcccaagccatcctgtcagtagataccttcctacttggttaaggagaatatcaggaccatattgatattcaggagtatctacttcaaccaagaaaagctcccttcttttcccatatcaaatctgccttttatttaagggttcctgataatttagaatctcagttgctgttagatgtcctgatgactactgaatatgttaccaaacaaggctcacttcttgcttttctctttccaagatagtcaagaggtgacttgaaaggagtgaactaaaggaattggtagtgtaataagaccactgagcagttagctgtagactgtgtgtacaccaagaaatgggataaaatcctctgaagagtgggagactccagaaagaatctagcccatttgttccttaaacttcaaaataccccttatcagaaggttctcactctttttagaagtccaacaaataagacatttgcctagaacatccttaagagctagtcctcaattcttgaatgtattttctcttccttctatattttccaaattctgctgttttaaaattcttttttcaaatgtcagattttgaataaccaacccaaatacctattttcatcccagtataaacttgaaacaagtatgtgttgtcaccctttctaccctccacatctcattagaaagctggtaattggttatatagtcttaaagctatatggaattacaattttgaacatttgattcagcatccctagaaaatgtttgttcctcattttccctttctccaaaggctcttcaaacttaactcccggcaaacaaacctattaggtggtcctctccctcctagaatcctagaggacaaaacttaccccatagtcaacctaattttccatgtccttgaggaaaacatcttacacaccccatagatgaggtagtccacatgtatcactacacagaaaagaatgttctctgaaaactctatattctctagccaggcggtatatagagggacccacctggagagcagatgtcccttcagctacaaagaagccacatatttgttgagccaaacagaatcctctgtcctctaatgtgaaattcacttagggactctaacatcatagctgtgctctttcagaagtgtaatctccagtttctcccctttacatcagaggagtgcctccaggcgccaccaggagcctgaatctgggtctctgaccatgccacccacctcacctgggcctcactgaccatatgttgttgatgcagtttagttactcctcactctaacagctaatgggaagcagtggtttccagtccttggagaaactccactttcaacatctaatggtcagtagtaaccccaaaggatagaggcccagatctcgcatgtcaggaattagttataggaatcttgtaaggatggtataagctgttatgtacaaatctcttacaaaatagaggcagggtctcatcatgttggccaggtaggtcccaaactcttgagctcaagggatcctcctgcctcggcctcccaaagtgctaggattctacatgcatgagccaccacgccccgccaagaattgcattttttgttttgaattttggtaaaagataggcaattatttaagcaaatggccattccatatgagagcgagagaagctgaagataacactggtgttaatctaataattcctgtggcatttatcatctttctttagccacctttatttacatctgcatttgggggaagaaatagaggaaaacaggattggagagtttataatttatatcaaaagtataaggaaataattattttttgtgaatatatgagataaatactcatctttatcacaatatraacttttttttttttctttaagagacagggccttgctctgtcacttaagttgaagtgcagtggcacaattatagcttactgcagccttgaactcttgggctcaagtgatcctcccacctcagcctcccgaataactgggactacaggcgtgagccaccatgcctaagatttgtatttttattttttgtagagacaaggtcttgctatgttgcaagtcttgaactcctaggctcaggcgatcctactgtcttggcctcttaaagtgctcgggttatagacatgggtcactgtgattggcccaatctgagcgaaattctttttcaagtgagatagccatcatcgtctggtattaattgatcacctaccaggatgaaggaaggtgtgctttatgcaaattggtattttaccataaaatcttttatacaacctaayacaacctatttatgagggaataggtttcacaattaatggataaaaaatgaygatgtaaattatgtggtaaaagaactcttggaaacatataatgtattggaccctgagaaaaaaacattttgaaatttctagcttgaataattggacaagttgtgggaatagtaataaaaatagggatatcaggaaaacgggaaattttggagaaatgataatgaggtttgttttaggtagcacttctcaagaggggatggggtggggacgtattaaaatgtgaagatgattaagtgttcatattagaaaattgagaaattctgttttgaacgaaccgagtttgagattttggtggaatagcaagatggatgtgactagtgrtaaagtgacagtgcagattattactgtctctgagcytgttcatgctggactctgaattaggtgcctggatacattgtcttacrtagcatcagcacagaactgacattagcatagaactgacattacccccccagttcctgatctcaaaaggtttaggtaacttktatttaaacctgagtcttctatgtcagaaccctggtttttattcctggctgcttgggaatattggaataatatgcagactgtatatgtgtttatagaagtaactggcttttttgtggttttaactttacccctactttatctatcacacaaaattagttaccttttttaaaaagtctacatgacatgacagatgtagtttctcttctggcttaacctgctgacagtaccgtacataggaatagatttaagactttcaaacatctgttaatttaccatatgcttttaaaactgcaacagtttagaggaaacaaaatatcaaggggcattacctaaaatattcctcctaattctgatgactgacttaaattccttttatgtaatccacaaatgtctagtgaaagagtagagtttgtaccacactatgcttaagcttccaggtaagacaagttccaagctctttgactagagtcatcttagtctctcctaagtcatcagagtagttatcagaattaatgttcttgtcttgattgataatagtgtcatcagggagttaattttttaaatcattaaccaaagtagagtttgttgaactcaatacaaatttgaaaggaataacttgaaaaaaatgaaaaaagaaattgtaaggattttcccccataaacacagaaaattacataaacagttgtaagacctttctagaccaatgaattttagatactcagacagcgataggccaataggccatttcagagtagggccagggaaagtttaggttgatatttagtgtatatgtgtgtgtatctgtctgtctaattaacttctccaactcctgatattttcattatttattgtcccatagatacgaaatgtggaaacgaatcagtgtctagataacatggctagaaaagagaatgaaaaagttggaatttttaattgccatggtatggggggtaatcaggtgagtatcttagaaaactcttaaamgggataattttcagattgtttttactttgccttttttttataccatgacatcattcaggaaatattttccttcctttaaagagaaaataataaagacttttaggtgaaggaagctttcaatccagtgatttttttttttaatgaaacatttgtgaaaggcccatkgtgagaactatgtttacattgctgagcacaaaatttattttgccctttttattcaaacagatgacaacccttgacaatacattcagtgtatacagagagctcaaggtcatttttgcttcagcttgtaagcaagaaaatgagtaacataacatcaatgtaaattagtggtagcttttctgagtcactttattcttcattactttaataaagtacataaatcatgtaccttgaaatacttgtattttccctgacagctaattgggcatttaaaatgctgactaatttattttttctgtttatgtgtgtgcatttttatttccaggttttctcttatactgccaacaaagaaattagaacagatgacctttgcttggatgtttccaaacttaatggcccagttacaatgctcaaatgccaccacctaaaaggcaaccaactctgggagtatgacccagtggtaagttatgcagttgcctatagtaataaaattatgtgtgtcactgggtatatttatatactttatatctaaaggaatgagttcttgtggaccttgaatatggatcaaacttgtcttatacactaaatattgacaggcgggaaaaataagtaaaataaatgtgttttaatctccctaataattaaattttagtcttataaaatcacagttgcctccaatccctgggtccttgtttactgagtagccactgttccttctgtatgtcttcaagttctatagtctagtttgggagaaatgaggcagaaagtaggcttttaaaattacttaattaaacacttcagtgaaagataagttttaattaataaagttctctggcttgtgatgatttcccagtgacatatatgacagaacctttcctatttatctttccttttgtctggaacctttctctccaccaccatcaaatgggctcacatggaagtacttaaaaggtattagttcaattaaagcatccgtggtaaacctctttccacctatttgcctaatttttcaacttgtgcttttgccaggttctggaaccagcaccaacatcttcaatatttctttctctggttctttttaatttggcttaacttctgtaaggcatttagtgccactaaacagatgacttttttttttttttttgaggcagggtcttgctctgtcacccaggctagagtgcagtggtacagtcacagctcacacaacctccacctcccaggctcaagctatcctcccacctcagcctctagaggagctgggaccacaggcacacgccatcatgcctggctaatttttgtaattttgtggagacagagtttcaccatgttgtccaggctggtcttgagcacttaggctcaagcgatccacccgcctcagtctctcaaagtgctgggattacaggcatgagccatcatatctggcctgatattttctaatttatttttttttattttttattttatttatttatttttttgagatggagtctcgctcttatcgcccaggctggagtgcagtggtgcaatctcggctcatgcaacctccacctccctggttcaagctattctcctgcctcagcctcctgagtagctgggattacaggtgcccgccaccatgcccggctaatttttgtacttttagtagagacagggtttctccatgttggccaggctggtcttgaactcctgacctcaggtgatctgcccacctcggcctcccaaagtgctgggattacaggcatgagccactgcacccagcctggcctgatattttcatatcctcttatgccttggccataagatgcactactgtttaggttcttctcttagtttgctctctgttccttttgttggcctggctctctctccttcttcgtcctactccttaaatggaaatgttgtcccaagttactgactttggccatctttcctccctttactgtgtcatacaccaaccatggtctactttaatcatcaatatgctgttctctgaacataccttatactttcctagttcacatctaagataatatgsttccctctgcctgacacaccttacccattcttaagaacccagctttgacatcacttccatgaatcctaacctgaaattaactctgtcaatcttaattacagtcatctctgacctctataaagctgtacttgtttgtagttatttatctagcaatcttttctccactattagattgttagatcctagaggacagagatcatcttttataratcctgggtctcctttcacaatgtcaggctatagaaaaaatgatattacctataataatagctcagttaatatggccattggaaatggcctgaatgctctgttctagggtttcccatggtatgtgccactgccattttgggtgtgactgccccatgcattgcagggtatgtagcatctctggctccagatagtaagtgctagtggcaccccatagccrttgtgacaaccacaaaattttaawawtgaaaaacctyttaagtttattggaaaatgacagtatattaattaggcagtatttttagaaacctatttattatagctaaaacaaatagggatttatttttcttacataagtctagaggtaagtaaattcagtggcatagtgatgtcagggataacgttgttgtaatattcttagcttttccttgtggccayaaggtggttgctgcagctttatcgcatcccaactccaggcagaaagaaaagggaaagaggaatggtacactaccacatgtgttgctctttattagcaaagtaaaaggtttttctggaacccccttagcaggctctgcttatgtcttatggaccagaacatcccatggtgacccccagctgcaaaggaagctgggaaagcaagtctttggttttctagtcgttagagtgtgagatggccaagagatagagggattgggaaagactgttggctagccaacctacacagtctaccacaacagtattccaaaagtaaatgtttgatgaaacaggtaagaagctggagataagagtatttagaaagagccggccgggcgcggtggctcaagcctgtaatcccagcactttgggaggccgaggtgggcggatgacgaggtcaggagatcgagaccacagtgaaacctcgtctctactaaaaatacaaaaaatacaccatacaggcatggtggcaggcacctgtagtcccagatactcaggaggctgaggcaggagaatggcgtgaacccaggaggcggagtttgcagtgagccgataccgcgccactgcactccagcctgggcgacagagtgagactccatctcaaaaaataaaattaaattttaaaaaaaagagccagttatgagtgtgaagttttaaaacttctagatcgctttgcaaggttttttcctgctgagataaaacattaatgctggggattgatttctcccagaagcagactcgaagataaagttgagcattcaggatgtttgttagggagcactttctgggccaatatctgtaaaaggaatacctccctctccctgggcagagggagaagttgagttgcaatgcaggtccaacagcctgagcagactacagggaaagcactggaggggaacagcccatcagaatcgtcctgcctccatccattgaaaacttaacagtctagaaaaataacagaatacttatgtccattatctgtaatctaaaatcatgaattcttagatttcaaagcaaccctagaaattaaacccaggatactttttatacaagtagaaattgaaactcagaattaatttcccaaggaaattaattgcccaaggtctctgagcagccagatagtatgactagatctcaaatctggaattctagattctcgatccaggtttctttgcacagtaccacgctatttttgattaatagttttgagtcttgcttgtattacatattacataaaatttacaataaggcactgggctcttttgctttgactacttgtatctgtcctwtctggaataaaatgcagattttagacctagttacatctagaaattaggagtaggagcttggcaaattattttttctaggatgcaggtagactttactaaatgattaattatagcttttatcctctccttcaaaggttacggttagatgcttgtcacttgcttgtcctgatgccttagtccagctctctctgaatggagactagttggtgttgcctgagtcctctgaggagtgctgtgatgacagcatcctacccacaaggttccaagccacaaggctctgtgcctgctgtcagcagccagagttgtayctggaacagggttctccaccagagtctaggcttcctgggggtgctgctcaccttccaagttatggggattctgtcctgatgtcgaayagttaaatactcagcacagagcaataacctatgtgtttgtgatgggtttattttaatgaatctagatgagtgaaatgcacatttttagaaactaggttaagagagaccaactctcccaactaaattttttgttgtgcctagttgggggttttttgtttttagtaatagtgaccatgggcctgatgagggaggccactgggataagctttgcgggaactcccggaatgtttgagaggttctcttgttctggtctttcctgagactgaagccactggcagcaatgtgcaygctgagccgcagcrctctggctgctggattgtgtccatgactgctcaggacgttgccaggatgttgtgttttccaataataagcattactctataaatgcaaattaccattgtatgtaaatgtcattgtaccatttatcaagcatttactctgggataggcagcactttatgtacattatctcagtgtttcctcataaaaacccggtgaggtatttttgtccccattttatagatgaggaaactgggtctcaaagagtttaggtttttgctcagaagcatatagttggtgtgtgacaaatctggaaatcaccccaggaatgtctgactgcaaagcccctcctctcaataaactacacaaagtctgcattaaaaaaagaaaaaaaaattcccacagccatgctgactctcttctaggttctagtcttatatttggaagcattaaagatagaatcctgaacctaaagacagtatcagtagtgacatctgcaaagatagactgtcatctgccaggtcctactttgaccacaacacggaagaataataaatgactggaagcctaagtagttgtatacaattattagattttgttttaagttctaataggtgcaaaaaaggcctcatgaaaatgaaatgtttcagataaaagaactacattaaaatagagccatgagtaaaagaatcagataactatgtgttaaacattttacatttccttcgagttaatttacatttgtagagtaatgcttaatgcacattcctgtatacaactactttgaagtccttaacatgaccagagcatattatcacaatcattggtgtggatcattgttaactatctatctgttaattcttacctgccctgccctttcaaaattatcctaataacatgttgctgcatcaaatctagaacttaaataagtggataaaatatatagctatgtctgttaaccatttattaagaatctcttttgtaggtgaggcactatgtactttatcttcattatctatgtagtttcccaaaatctgctcaaaatatgtaatgtgatcctaatttttaaaatgagaaacctcaagttacccaggctgtgaactcaactccacattcctgtgcttttctttctgtaccacaccatctcctttaaccaccaggatagcctctgggtttgctatggacataggcataagattgattttactaaatatcagctgtcccaacattcttatgattttgagttatcagaaagacctgagtttctaaaaacttgagctttggaatcacagaattaacttgaacagccttatcatagagaaatgaaacaattttgaaatagctgtttgaaaataggttgaggatcctaaattaggaaccactaatctggtctttttttgttgtttaggaaactgaagcacaaaaaagagaagcttctcatagtgttacagagcttatgccagaattaggacttagaatttaggtcatcttgcagcaagtcaagtgtaccctactggaccccagtgcctttctccctccctcatacctctttatcgacctacatatctacctacttctctctctctctctctctctctctgtttctccatccatccacctacctaccttttctccgktgtcttttaaataatgtatattaccaaaaaaaacaccttttctgcagaggaacttaatcaccaaaactgatgcttgaggtgttttgttttcttccactctcatgttaagattttttctatttcagaaattaaccctgcagcatgtgaacagtaatcagtgcctggataaagccacagaagaggatagccaggtgcccagcattagagactgcaatggaagtcggtcccagcagtggcttcttcgaaacgtcaccctgccagaaatattctgagaccaaatttacaaaaaaacraaaaaaataaggattgactgggctacctcagcatacatttctgccacattcttaagtagcaaaaaaggaaaagtgctttcctcctctgcaggatgtaaggtttatcagccattaaaacttagacttctctagcttttcactagctgtgaaccagccttcctgtccatggacgtgaaactgcatagtaatgagactgtgcacactgatgtttacaagattgaaagagtctttctccgaaaatcatggtaaagaatactgagacaatgaaaaaaaatcaacaaaatatgctttctggagaactgtaccttttatggtttgcttgcacatcagtagtttctgctgaacgtgctgtcataatgaagagatttccaagattttttttcctgattagaactggtagccagtatattaaatattgatataaaaataaaagaactggaaccagattcagaatcatgaaaacaacatttttacaacaacaaaaaaactatattaaacagggtttaaaggaaattaaaacagaactatgagaagtacaatttgttatagtatagtatcaaatttctatatagattttatacctcagtggggaaaaataactgattccaatgacattcattttgttttcatctgtgatagtcatggatgcttttattttccttggggtgctgaaattgagctgaaaaaaaaaggctctttgaatatagttttaatttctctctacagttttttttgtttggtttgtgggctgttggaattgtaatttttaattgccttctaaaaaatggaaatttaacaatgtctgatctcagctgaacaaattagatgtttcagttgctcttgggtcaactggcttacagatttacatgtgcacacacacacaaatttcttatcacattttcgacttcttcacttgacctaactgattatgcgaaatacccaagattcatgctactgtaccacagatttgttttcacagcaataaatcttcagttctttgtttatgattccacttaacaaaaggcctgcagaagtgatttattatttgggtatttggagataatacatttgatggttttttggaaaacctttttcactccatactcagatatgcttcattgtcaaatgcatatttagattagattattgaattgtaatgtttatctgctgctttttttaaataaaatttgactgaaaatgtttaattggcattttttaatgacttagccaaagaagtgcagctattattccatattaataggcttgcatttcttttcctaaatcttatttaggctaaatcagttttatttttctctgattttttttaataccacagaatcacctgagtgtcaattgaaagttgtcaattaaaaggtaaccttttaatctcgtaggaggaatctcattaagacatttttcctgatatgtagagcagtctgttggcaaaaatgcatatattttctttcatatttgtaaaattatatttaatggaattcttttctttgattatcaaggactttcactgcaggcagtgctatttcttgtgcctaagaatgtttccaaaagtcgcatcgctaatgatatttgccaagttgagtgtacacaaagtttctcatatcctgttcaagttaatcaacrtcaagcacrtggggatgctttagggtgagtctatagtacaaaatgcataaaccatgtccccaggaaatttgaaaggaagcaggtgctgaatggaatttttttccttttccatgagctgtgttaattctatctccagtaggcctaatgcttgaataagcaagatgtctaatcaataaattattttcatgctcagaatttcaggtttttgtactccagcatagcttggtcttatttcttactgtatgaaagcttaacagcaatgtgatttaaggttttgttttaaatgggagatgtaagtgatttaattcatgggtacttttagaacmtgatagataatcccattgcctttatttttctaattaaagaattcctaaatactttgaaaatacaaaatattcctgaatagttgtgccttacattggttttatttgaagttagagtggatccctgtttatcataattacttrtaattaggcagatgcttatcactctattataactcaaattgggaagaaaagaatgaaaaagaaaacaatggctgggtactggctcatacctgtaattttagcattttgggaaggtgagacgataggaccacttgagggcaggagtttgaggttgcagtgagctatgatggtgccactgcactccagcctgggcaacagagaagaaaccatgtatcttaaaaaaaaagaaaaaatgaaggatgaaaaagtgggattattatttaaccagtgaagaattcataaatgtgacaattaaggataatttgaatctcacaaatctattcaccccaccccagtcaaggtctattttaatatatctatcttcattggcattcttgagaaatagtgctgccattgaacattgggaatattcatccattctgcagatggaggacatcgtgcaggccatgtcctcattgctcccattctacatttagctgagaaacagaggttcctcttygtaaggatttgatgctcttctcatcttccaagaagtataccaagagcaaatttaactctatagttacctgttcttcaaagaaaaaagaaacttaraaggtagtgtttctgaggtcataactgtgaggggttgtatacaaagaatgagtcactttttaagccatttggaaaattagatctgtttctaattagatgacattttctccattctctgatttcctgaagattgccaagcatttgcttgataatctaccaggactgataattttgcagaatatgaggcaaatatatgaaattcagttgtgtatctatatcctagcaacaaacacttgaaaatataacgttaaaatatgccatttgtaatagcatcaaataagtcaaacttctaagtaggaagaaagttaacaacaagacctctactctgaaaactacaaaacagtgctgggaagaattatagagcaccaaaataaatggctattctatgctcatggattgaaagactgcataatggtaagatgtcagttccccacaaattgttatctagattcaatgagatcaaaatcccacaaggccatcttgtagaaattggcaaatacatatatgaaaatgcaacagattctaagtagccaagataattttgaagaagaaaaataaaattggagcacttgtactacccaatgtcaagacttgctctaaagctacaacagttaagagagtatggtactagagttaggataaacaacaaatagaaatagacatgtccagaaatagacccacatgtatatggttattggcttttcaacaaaaacaagctattcaatagaaaaagggaagatttttcagttggagttgaagtaactggatgtctgggaaaaagcaatgttaataatgccttcttcataccatgcacagtttattcaaaatggattatagaactaaatgtgaatggcaaaacaataaatcttgtaaaaggaaaccgactatcttcatgacattggggtagacaaggatatcttaggcgaagacatctcaggaaggttaaacaaaaaaactgacagatttcatcaaaattagatacttctcatcaaaaagatacttttaaagtgaaaaggcaagccacggcctaagagaaaataatcacaatacacggaaccaaaggaaagcaaagaacattttaaaaccattgtaacagcaacccagtttaacaatgagtgagttgaatacatacttcacagaagctctccagatgcaggagtagcataggaaatggcactcaaacatcagccatcagggaatgtagaatgaaaccacaaggaaataccactgcatacccgccaaatggtgagaatgtggaactgatagaaatccaagatggtttaatcacctcaggaaacagtttgccggttgcttataaagataaacataatgcctaccctgtgacttagtgaytccacttctaaagatctacccaagataaatgagggtatgtttttacaataagacttgtacaagaatagcaattttatttataatattcccaatctgaaaactacccaaatatccaccaacaagctaatagataatcaagtaatggtatgtttatacattggatactagtctgcaattgaaagaatgggctgggcttaatagctaacacctgtgatcctaacaatttgggaggccaaggcaggatcacttgagcccaggagttcaagactatcctgggcaagatggcaagacaccatctcgacagaaaaatttaaaaatcagctgggcatggtggtaggcgcctgtagtcccacctactcagcaggctgaagtgggaggatcccttgagcccaagagttcaaggctgcagtgagttgtgatcatgccactgctctccagcctaagtgacagattgagaccttgtctctaaaaataataatgatatactggcaaaacaatgtagataaatcttaaaaacgaacaaaaaaagctagacatattccatttataaagctcaaaaacaaatatggaatggttatctttgggggtaagtatagactgaagaagagcataggagaactttctggaatgatggaatgttctatatctcaattgcagtagtggtaacatacacatatatatgtatgtgtgtatatattttaaaatatagtgagctgtatacttgggatatatgcattttactgtatgtaaattatgcctcagtaaagtgctggggaaagtgatgaaggtattcaccctgctggcatcaaggttttctgaaaagtcctgcactgctacaaaacacccaaaggctgaataagttaccgcaaatgtacttcaaagtggaatgctgaactcagcagaaaatatggaaaattcctaaatgccagatttgaaaaatgataaacatgaacttgggtgataattgtaactcttatatatgaaagcccttcctcttctaagaacaaagtataatgcctagagtttggggaacgggagcttaggccttgggcctgaacaaagttggggaattaaaccaaagataacagctgggtatggtggctcacgcttgtaattccagcagtttgggaggccgaggtgtgtagatcacccgaggtcaggagttcgaacttcacatggccaacatggtgaaaccccatttctactaaaaatgcaaaaattagctgggcgtggtggcgcacgcccataatcccagctactcaggaggctgagacaggagaatcgcttgaacccgggaggcagaggttgtaggcagaggttgcagtgagtcgagaccacaccactacactccagcctgggcgaaagagtgagactctgtctcaacaaaaacaaccagccaaaaatccctgcatcttcagttggaatattaacaggtgttaacacctacaagtgaagggtggatagggaagtcagcctcttgaaaaggaaaccaaagggtaatctgactgactttgccccttttccaggtagtaaatgagatgatggtgctgcctctgtaatcataggcctcctttcacagagatcagggatttaatgccacattcatgaagtctgcagatcaagaaaataaagtgaatcttagatttataccacttcctgaaaaccatcagaataaaacaagtcttggcagggcacatggctcacacctttaatcccagcacttcgggaggccaaggtgagtggatcacttgtggccagggtttgagaccagcctggctaacatggcgaaatcccatctctactaaaatacaaaaattatccagtgtggtggygcccacctgtagtcctatctacttggggggctgaggcatgagaattacttgaatctgggaggcggaggttgcagtgagccgaggtcgcgacactgcactccagcctggacaaaagagcgagactctctaaaaaaaaaaaaagaataaagtcctttksggggraaaaaawaaaaacctgtcaatccccacccccatactcccactaactaaattcagatacgaaattactatcaaaaagagtaagtaagccatcatgtgtgaatattaaaaaaattaattctagcttctggcagtgcgagactagcttgtatcagactaaagcttagtaacttaataatttggaacaaaatattatttaaagagtgatgccccaggtgagtgaacagaaactgtagggcatttgacccctgttaaaaaggtgtgttcactggataggatctcagcttttccccagagagcatccaccatgcactcagcacactgaaggtagagttcatgcagatggtgacgaataatattaggctgaggagtcagatcttatttgagagcaaacagaggctggaaattgaggaaggaaatcctagactgcaaggagtcagaaaaagaagtccccaaatctacatacaaacttccctcagatggttggctgattaaatagtgtgcacaggatgaaactccaggaaggtcagagaaaaacaaccaccggaaggcagaaagatctaagcagcagtctcagcagttgcccagcaccacaaacacagaggtcgaagttcaaatttggaggggcttggtaaacactgttaactttatggtgagatccaagaagggcatgtgtagaaattaagaccatttctaagaccttagggctgtttctagagccaactacaaaatggaaattgaccacatctaataaagtggctattttattgattatttttgaaaatagtcaataaaaagcagacccactagtgacctagatgttggaattggcagacaaattcttcaaaataagtatcagtgttttaaaaatgtatacagagaaatgtggatataataagtataataatgggaagtttcagaagaggtctgaaaacggggaaaaaaatcctaaaaccaaaaaagtatctaaaatcaaaaactcattgggatttacagcaaattggacacacacaagaaaggatcagtgaacttgagcacaggtcaataaaaaatgtccaaactgaaccacagagaaaaaagataaagggattaaaaaaaaaaaaacagccttgatgatcaaatacatgcattgacctggaaggagagaagatagagagtggaggctctgaaggagactcttattttctccattctgtggttgctggtaattcttggcttgtcagatgcctcactccaatctctgccattgtcttcacttggcattactctctgcatgtttttgtgtctttcttctctgcctcctcttataaggacactagttacattgaatttatagcccactttaatccattatgaccttatcttaactggatctgcatagactccgcartgagtcgaattgtgtccacaggtaagaaagacatgtttagtcctacccactaatacgtcagaatgtgacattatttggaagtcgggtctttacagaggtaagcaaattaaratgagatcattacggtgaaccctagcccagtatgactgatggccttattaaaaggggaaatgacacagacacatagagaaggaagatgatgtgcagatacagagaaacaccatccacaaaccaaagggtgtctgaatctaccacaacctaggagaggcatgaagcagataacccctcacaatcctcagaaagaaccaaccctgccaacaccttgattttaggcatctaacctccaaaacagtcaaaaattattgtggtttaaaccactcaatttatagtactttgttacaacagccccaggaaattaatataaatcatatttctaaattgagtctcatgctgatattctgaatagatgaaattcggatacactattcaacctaatacatctactaaacgtttaaagaagaattaacaacaatcattcacaaactcttacaaaaagaagagggaacatttctcaatttattctatgaagccagcattagcctgataccaaagccagacagacataacaagggaaaacaaaacaagctgaagaccaatatttctgatgaatatacaggtataccctcatcttattgtactttgcagatactgtgtttttttaataaattgaaggtttgtggcaacccagcatcaagcaagtctcacagtgccatttttccaacattgtgtgctaatttcatgtctctgtgtcacattttggtaattcttgcaatatttcaaacttttttattattagaatatctgttacagggttcagtggtatttgatgatactattgtaattgtttgggggcatcacagactacacccgtatgagaggatgaacttaaatgataaattgtgtgtgtgtgcatgcatgtgtgcgtgcatgtggactgttacactcattggtccttctgctgtctctctccctctcctcagccctctttattccctgggacacagaaatttttaaataaggccaattaataatcctacattggtctcttacgtgttagagtgaaaagaagattcacatatctctcattttaaattgaaagctagaaatgattaagcttagtgaggaagccatgttgaaagctgagatagtccaaaaactaggcctcttgcaccagttagccaagttgtgaatgcaaaagaaaagtgcctggaggatatttaaaatgctgctccagtgaacacacaaacgataggaaagcaaaatagccttattgctgatatggagaaagttttaatggtctggatagaagatcaaaccaactgcaacatttccttaagcaaaatcctaattcagaacacagccatagctgtctccaattctatgaagacagagcagagaggaagctgtggaagtaaagtttgaaaataagaggttgttcatgaggtataaggaaagaagacatctccataacataaaagtgtaaggtgaaacatcaagtgcgaatacagaagctgcagcaagttatccagaaaatctaagatcattgaagaaggtggctacactaaacaatagattttcaatatagacaaaagagccttctgttgattttaggcatctagcctaaaatggaagaagatgccatctaggactttaatgggtagagaggagaagttgatacctgtcttcaaagtaaagactgactcttttgttaggggctgttgcagctggtgacattaagttgaagccaatgctcattcaccattccagaaatccttgtgcccttaagaattatgctaaatctactctgactgtgttctacaagtagaacaacaaagcctggatgacagcatatctgtttatagcatggtttactaaatattttaagcccactgttgagacctactgctcagaaaaaaagattcctttcaaaacattactgctcattgacagtgcacctagttacccaagagctctgatggagatgtaaaacaagattaatattttcatgcctgctaacacagcattcattctgcagcccatgaccaaggattaattcagactttcaagtcttattatttaagaaataagatttaataaggctatagctgtcatggatagtgatttctctgatagacctgggcaaagtaaattgaaaaccttctgaaaaggatccaccattctaaattccattaagaacattcatgattcatgagagggggtcaaataccaacacgaacaggagtttggaagaagttgattccaaccttcatgggtgactttgagggatccaaaacttcagtagaggaaatacctgcagatgtagaaatagcaagagaactagaattatcctgaagatgtgtctgaatactkcaatctcatcataaaacttgaattgatgaagagttgcttcttatggatgagcaaagaaaatgttttcttgagatgaaatcctcgtggtgaaaatgctgtgaacatagtagaaatgacaacaaaagatttgtaatattccataaagttagttgataaagcagagggaaggtttaagaaaaccccaattttgaaagaacttctgctgtgggtaagatgctatcatatagcatcagaaaaatcttctgtgaaaggaaggctcaatcaatgtagcaaatttcattgtcttattttaagaaatttctacaaccacccaaccttcagcaaccaccaccttgaacagtcaacagccatcaacattgaggcaagactctccactaacaaaaagattgggactcattaaagactcaggtgaacattagcattttttggcagtaaagtatttttaattaagaatatacattgttttgtttttagacataatggtattgcacacttaggctacagtatagtgtaaacataacttttatatgcactgggaaacaaaaaattgtgtgactcactttattaatgcaatattcactttactgctgttgtgtggaactgaacctgcaatatctctgaggtgtgcctgtagatgcaaatagcctctacaggatactagtaaaccaaatgcagcagcatattaaaaggattatacaccatgatgaagtggtatttatcctatggatgcaaagttgttttaacatttgaaaatcaatccatrtgatacaccatgttaatagaataaagaacaaaagccamawgatcatcttaataaagaacaggaaatccaacatgcttttacggttaaaacaaacaaaaccgggactaaaagggaatgtcctcgatttgataatgggccccaatgaaaagtccacagctatcatcatatttaatggtgaaagactggatgcttttcccctaagatcaggaacatgacaaggatgtctattcttgccacatctattcaacattgtactgaaagttctagccagaacaactagtcaagaaaatgcacccagattgaagaggaagaaataaaactgtttttgcagatgacatcattttgtatctagaaaatttcagggaacccgctaaaaaactatgagaactaataaatgagttcagcaaggttgcaggacaaaagatcaaatacaaaactcagttgtatttacatacaccatcaatgaacagttcaaaactgaaaattttttaaattccatttaaaatagtgtcaaaatatttaggaataaatgtaattaaaaagtgcaagagagggacaaatggccaactagatgcagccaggaagagcatcttccaccaagagagaccaaaatatagagtaaaccatcatactttgaacagatctttggggagaaagcactgagagtcaatggagagatgatgcagacaccagggctgaagagagaggaagctgggaaccctgcatggggttgccaagctctgaaacttattcctggccctgaacaactcctaagaaagggatggatgaagtaactgcagaccagcccattctcattacagatctccaagatcctagctgcaggaraccctataaccccatggacatatgagttggcagggagaactacctggagagtcagcagagatagagtttgagcctctgtggaacccagkgggggttgcatggggacagctgtaacaaaacacggccataggtgctcatcccgggctctacatatttctctatgaggctgtaacctttgttgactactgaacctggagagagcagggctgtctttcctgcatgaccagggcatagctgacctgtgcacccacctgtccactgactgatcccagaatccctttttggccactcccataggagcgggcacaaagcacagcctacactgccccagtagagtgcttttgctagcaactaccgctagagcatttttgttggcgtcctgggaggaccttgagcacccccagcccctgcatggctggtgctcaaccttgaggggccagaggacaaagccatggacccagtcctaacctcccagggttagagcatgcagcccaggagtactgagctgagatctgtggctggaacttaagtgaaggaagaaccctctctctcaaagtgctgggaagagtgaggcatgggttcgtgggctgacacaggagctgggtgtgcctgcttctgctgggccagtctgggagggatgtagactctctggcagccacagcctctccccggggggcctcatggccctgaatgcctaacagcccagcaatctgggtgcagaaggcttgggacaaaagctggtcaggccaaattctgggacgctcatcaggagaccctattgagggtggagctgggcaggtcccacagctgactgctggcaaaaaacccaaggcatgggcaccccaccagctgcatacccacaacaacactgccctgcccacagatgccccgcccttgacctactgcatcaacagaccacctacagatataccccacaacctgctctgactctgccaagcacagaggaccttggtgggcctccagagagctgtgggtctcctggtgacctaatctttggcttggaccacctcaaagggagggaggagcacagctcaccagagccgcctttgaggctaaggaaaggcaggcacggcaccagtgattggagggggctcctttaagacccaggaatggacttggtgaggggatcatctctctcccaaccctgtctgccccacgacagagcactgctgccaatgcattgaaatacactgagaggcacatggctcagctasagtctatctacaagcccttactgtttttgttcttcttcttattattataccttttaagttccagggtacatgtgcacaacgtgcaggtttgttacatatgtatacacgtgccatgttgttgtgctgcacccatcaactcgtcatttacattaggcatttctcctaatgctatcccctcttccccccaccccacgacaggccccggtgtgtgatgttccccaccctgggtccaagtgttctcattgttcaattcccacctatgaatgagaacactcagtgtttgattttctgtccttgcgatagtttgctcagaatgatggtttctagcttyatccatgtccctacaaaggacatgaactcatccttttttatggctgcatattattccatggtgtatatgtgccacgttttcttaatccagtctatcattgwtsgacatttgggttrgttccaagtctttgctattgtgaatagtgccacaataaacatacgtgtgcatgtgtctttatagcagcatgatttatgatcctttaggtatatacccagtaatgggatcgctgggtcaaatggtatttctagttctagatccttgaggaatcgctacactgtcttccacaatgatagaactagtttacagtcccaccaacagtgtaaaagtcttcctatttctccacatcctccccagcacctattgtttcctgacttttaatgatcaccattctaactggtgtgagatggtatctcattgtggttttgatttgcatttctgtgatggccagtgatgatgaccttttttgtgtgtgtctgttggctgcataaatgtcttcttttgagaagtgtctgttcgtatacttcacccactttttgatggggttgattttttcttgtaaatttgtataagttctttgtagattctggatattagccctttgtcagatgggtagattgcaaaaattttctcccattctgtaggttgcctgttcactctgatggtagtttcttttgctgtgcagaagctctttagtttaattagatcccatttgtctattttggcttttgttaccattgcttttggtgttttagacatgaagtccttgcccatgcctatgtcctgaatggtattgcctaggttttcttctagggtttttatggttttaggtctaayatttaagtatttaatccttcttgaattaacttttgtataaggtgtaaagaagggatccagtttcagctttctacatatggctagccagttttcccagcaccatttattaaatagggaatcatttccccatttcttgtttttgtcaggtttgtcaaagatcagatggttgtagatgtatggtattatttctgagggctctgttctgttccattggtctatatctctgttttggtaccagtaccatgctgttttggttactgtagccttgtagtatagtttgaagtcaggtaacgtgatgcctccagctttgttctttttgcttaggattgtcttggcaatgtggcctttttttggttccatatgaactttaaagtagtttttttttccaattctgtgaagaaagtcattggtagcttcctggggatgtacaagcccttactcttaagcataatctactgattgcagcctgaattacaccaccaaaaaatacttcctgctttcattgcctgtgaaacccagtgcagtgttctagcaacaaataaaaatcctgtgaagagccttggccctctaaaagcatccagaaacaaagccaatcaactatactcaacttacactacagtcaaaccctcaaggtaaataaagaccataaaaagccccatccaaatcacagcaacttcaaaagataaaggaacaccagccctcacagatgagagggaactagcacaaggactccggcaattctaaaagccagagtgttttcttacctccaaacaattgcacaagctccccagaagtggctgttaaccagattgaaatggctgaaatgacagacatagaattcagaatctagatagcaaggaagctaaaaaaaaaaaaagagagaaagttgaagctaaaaaaaaaaaaagaaataaaaaagaaaaaaacaggagaaagttgaaacccaatccaaggagaacagtaaaataatacaagagttgaaagatggtataacctttttaagaaagaaccaaaactgaactccaggaactgaaaaattgactacaggaatttcagaatacaattggaaacattaacaacagaatagatgaagctgaggaaagaatctcacagctcaaagactcctccttcaaataaactcaggtagacaaaaataaagaaaaaatgaacctttaaaaatgaacaaaacctcagaaatatgggattataaaaagggaccaaacttacgactaattggcactcctgaaagagaaaaaagaataatcaacttggaacacatgtttgaggatattgcccatgaaaacttccctaagcttgctagagaagtcaacatgcaacttcgataaatttagagaacccctgcgagatactatataagatgaccatccctgagatacatagttaccagattctccaaggtcaacacctcagaaaaaatcttacaggcagctatagagaaggaacaggtcacttacaaagggaaccccttcaggtgaacagtggacattccagcagaaaccttacaagccagaagagttgggacctgctttccagcatccttaaagaaaagaaattccaaccaagaatttcatatcttaccaaactaagcttcctaagtgaaggagaaataaaaccattttcagacacacaagtgctaagggaattcattatcgctagacctgtcttacaagaggtccttaggaagtgctaaacatgaaaatgaaagaacaatacctgccaccacaaaaacacacttaagtacatagtccacagacactataaagcaactacacaagcaagcctatataacaaccagctaacaacaataacaggatcaaatcttcacatatctatattaacctttaatgtaaacagactaaatgccccagttaaaaggcatagagtggcaagttggataaaagaaaaagacccmagtgtctgctgtctttaagagacccatctcacatgtaacaacagccataggctcaaattaaaagaatggagaaagatctatcatgcaaacagaaaccaaaaaagagcaggagtttctattattacatcagaaaaacagactcgaagccagcaatgataaaaaaaggacaaagaagggcattacatagtgataaagggttcaattcagcagtacttaactatcataaatatatacacacacaacattggagcacctagattcataacaagttcttatagacctatgaagagacttagccacataataatagtgggaaacccaaaacctcactgacagcattagacagatcattgaggcagaaaactaataaakatattctggaattaaactcaatacttgaccagttggacctaatagacatctggagaatactccatccaacaactacagaatatacattctcctcatctgcacatggaacatactccaagactgactacatgccataaagcaagtatcaataaattcaaaaaaatcgaaatcataccaaccacacactcagaccacagtgcaataaaaatagaagtcaataccaagatctctcaaaactacacaattacatggaaattaaacaacttgctcctgaataacttttgggtaaagaatgaaactaaggcagaaatcaaaaaaatcatttaaaactaatggaaatagagatgcaacatagtagaatctttgggatacacctaaagcagcggtaaaaggaacgtttatagtgccaaatgcctacaacaaaaagttggaaagatctcaaattaacaacctaacaccacacctagaggaactagataaacaagacaaaaccaacaccaaaactagcagaagaaaagaaataactaaaatcagagcagaactgaaagaaatttagatgsaaaaatccatacaaaagatcaagcaaaccaaaagttgtttttttgaaagaataaacaagatagaccactagctagattagcaaagaaaaaagaagatccaaataagcacaattggaaatgacaaaggtgacattacaactgaccccacagaaataagaaaaactcctcagagattattatgaacatttctatgtacacaactagaaaaatctagatgaaacggataatgtcctggaaacacataacctcccaagattgaaccaggaagaaattgaaaccctgaacagaccaataatgagttccaaaattgaatcagtaataataataataataataataataataataagccttgccaaccaaaaaaaaaaaaaaagccctggaccagatggattcacagcctaactctaccagatgcacaaagaagagctggtacctttcctactgaaactattccaaaaaaatcaaagaagagggactcctccctaacttattctatgaagcaagcatcattctgataccaaaacctgccagagagatgatgaagaaaaaaaacttctggccaatgtccctgataaatatagacacaaaaaatcctcaacaaaatactagctaaacgaattcagcagcacatcaaaaagttaattcaccacaatcaagtaggcttcattcctgggatgcaagtttgttttgacatatgcaatcaataaatgtgattcaccacataaacagaattggaaacaaaaacaatatgatcatctcaatagacacagaaaacaatttcgataaaattcaacatcccttcaggttaaaaaccctgaacaaaataggcgttgaagaaacatacctcaaaataataagagccatctatgacaaatccacagccaacatcatactaaatgggcaaaagctggaagcattcctcttgagaactggaacaagacaaggatgctcactttcaccactcctatttaatatagtactggaagtcctagcagagcaatcaggcaagagaaagaaataaaaggcatccaaataggaaaagaagaagtcaaactatctcttcactgatgatatgattgtacgcctagaaaaccctaaagactccaccagaaggctcctggaactgataaatgactttggtaaagtttcagaatacaaatcaatgtacaaaaatcagtagcatttctatataccaataatgttcaagctgagagccaaatcaagaacacaataccatttataatagcaacaaaaagaataaaatacctaggaatacagtaactaaggagatgaaagatctgtacaatgagaattacaaaacactgctgaaagaaatcagagatgacacaaacagaaaaacatttcatgctcatggataggaagaatcaatgtcattaaaatggccatactgctcaaagaaatctacagattcaatgctattcctgtcagactaccaataacatttttcacaaatttagaaaatctattctaaaattcatatggaagcagaawagagcccgaatagccaaagcaatcctaagcaaaaataacacagctggaagcatcacattatctgacttcaaactatactacaagcctactgtaacctaaacagcctggtgctggcacaaaaacggacacatagaccaacagaacagaatagaggacccagaaataaaggcacacagctacaaccatctgatcttcaataatgttgacaaaaataagcaatggggaaagacttcccattcaataaatggtgttgtgatagataactggctagccatatggagaagaatgaaactggatccctacctattaccatatacagaaattaactcaagatggattaaaaacttaaatgttagacctcaaactattaaaatcctagaagaaaacctaggaaatacctttcttgatattggctttggcaaaagatttatggctaagttctcaaaagcaagtgcaacaaaaacaaaaattgacaagtgggacctaactaaagagcttcagcacagcaagagaaactatcagcagaataaatagaaaacctacagaatgggagaaaatattcacaaactatgcatccaacagagaggcctgatatccagaatctataaggaacttaaacaattcagcaagcaaagaacaaataaccacattaaaaagtggccaaaggacatgaacagacacttctcaaaagaagacatacaagtggccaagaaacatgaaaaaaaaagcttaacatcactactaatcactaatcagagaaatgcaaaccaaaaccacaacgagataccatctcacaccaataacaatggcctttgtttaaaagtctaaaacaacaaatgccagtgaggatgtggggaaaaggaaacacacacttccagtgggaatgttaatgacatggtttggctctgtgtccccacccaaatttcatcttgtagttaccataatttccacatgttgtgggatgggcccggtgggagatgactgaattatgggggcgggtctttcccatgctgttcttgtgatagcaaataagtctcacgagatctgatggtatcataagggagtttccctgcacaagctctctttgcctatcaccatccacgtaaaatatgacttgatcctccttgtcttctgccatgattgtgaggcctccccagccatgtgtaactgtgtatccaattgaacctctttcttttgtaaattgcccagtctcgggtatgtctttatcagcagtgtgaaaacagactaataaagtaaattagtccagccactgtggagaacaatttggagatttcttaagaaccaagagttgaactaccatttgatttagcaattccattactgggtatacagtcaaaagaaagtaaactgttctaccaaaaaaataagtgtacctgtatgttcattgcagcatggttcacaaaagcaaagacatggattcaacccaggtgcctatcaactctggattgagtaaagaaaatatggtacatatacaccatggaatactatgcagccataaaaaggagcaaaatcaagtcctttgtagcaacattggatgaaggtggaggccattatcctaagcaaactactgcagaaacagaaaaccaaatctacatgttctcacttataagtgggaatgcacaacaagtacacatggacagaaagatgagagcaatagatattgggaaatacaagaggtgagagggagggagggaggcaagggctgaaaaactatctattgggtactatgctcaccccctcagagatagattcatttactccaaacctcagcatcacacaatatacgtttgtaacaaaattgcatatgtacccctgaacctgtaataaaagttgaagaaaaaaaaacccaaaaaaagtgtaagacttacatgctgagaacaaaaacatcactgaaagaaattaaagaagatctaaataaacacacattgatgaatcaaaaagcctaatattaagatgcttgttttaagtttgtttaatatacttggcatctcagcatccatttttaggtctgatgtaagttatttgaaacccagttgtactccatcacctttggcttttaaaatttctcctccctttgtggtcgtttccagtacagcctgctttttcctcatcctactgactcaaaaacccaacacagctcacagctgctggctacaataaatcctaatggtcaacaccagagtcacaaaaataagttccccattcagcaggtttttgttaactaatcagtctacaactcctgagagaaagcctaaaggttaatgcctatggaacttaatgaaggtatagtaccacgagtcccccttcccactttctcctctctcaccctccccgcctgcccccttctgcactacacctcttgttggctccagatgtcccaacacctcataggcacccctaacctctctgggacctgtgagtaataaatttcttctgtttcacaaactttggtttcactttctcattgtgtctcacctgacagacacacttgaacctaattatycccccagtcagggctctcttagagggtggctatcttagcttatagccactgtcaagaaagagaccccaagaccaaattagaaaaaataaaacaaaacataataatagaactcacaacaatggtactactctctgtcctgtttggagtcaggttccagctcatgctgaggtccgaagcgagtggatggacgagcagatagctgaaagaacgctgcgggggctgtaggcaggtgaaaggttgttttattcagtaactctcttagcagcagctcactcacactagctctgtcacactgttcgccttgtcttggctgcttagcccggcggctcccacacacagctgcatggctggctctcccttcagggtcagcagcttaactctttctctctctctgtgggtacaagtgagcagagctgtgttctggctccctcctgtccatctgcaaagacggacagctctggctctctctctccttctctgggcacaagcgcacctgtacagtgtcagcaggtcagtaataccttttacagacaatagtggcttagagccaaatgatgagccttcttatgttatggctacatggctaagataacaagtggagttatatgcctgtgctgtaaactcactgagtcactctagatgtttacctcagcctatccatgaccaaagcacagccatgttctttacactccccagatctgaaaatttagtacaatccctatcaaaatctcaagtgtctttttttttttttttttttttttgcgtaacttgacaagctgattctaaaatctatacggaaaatcaatgtacacagaagagtcaaaacaattttgaaaaaaaaraacaacattggagtactcacaccctaagatttacggtcttactacaaagctacaataatagagaaagccaacattgcactgtagttcctatagaggggtgaagggagggagtgggacatggtgtgaggatagtcatatagatcaactgaacagaattcagagtctagaaataacctttatatttaggtcaattgattttcaacaagagtacaaagaaaatacaatggaataatagtcttttcaacaaatggtggtgggacaactgggtatctgcctgcaaaaggaaggtggacccctacatcacaccatatgtaaaaagtaactcaaaatgaatcaaagacataaatataagagctaaaaccataaaactcttagaaggaaacatgcatgatcttcatgaccttggattagacaatgacttcatagacatgaaaccaaaagcaccagcaaaagtaggaaacaaataagctggacttctccagaacttaaaagttttgtggttttaaggatgcaatcaagaaagtgaaaagatgacttacacagtggaacaaactattggttaattatgtattttttaagaataaacttggatccaaggccagccatggtggttcatacctgtaatgctgacactttgggaggatgagatggaaagatcacttgaggccaggaatttgagaccagcctgggcaacatagcaagacccccatytctacaaatttttctttttttaatagctgggtgtggtggtgcgtacctgtagcccagctacttgagaggttgaggtgggtggattgcttgagcccaggggtttaagactgcagtgagctatgattgtgctactgcatatcagcctcagcaacagagcatgacacagtctctaaaaaataaggctgtgcagacagagcagtcccaggagcctgagctcctgcctcataggctgtaaagaacttttcactttctgtcctcagtttcagcttttgccagatttcagaacagcaggccaacattgcactgtagctcytatacaggggtaaagggagggagtgggacatggtctcaattcataattatgccatttaaatgaccaaagttaaggggtcagttgtgagaggagactggcattgtggaaagaatacaggctttgaagtcagatagccacaggttcaaatccaaagatctaggcctcagtcttgtcctctctaaaatgcctgcctcattggggaattacaacatcttgatagagatagcattaacaaatgatttttcccttctgctgttctcatcatttccttctgctggggctggtgtcaggggcaggggagcaactgtccctagctgtgtgccagaccagaccaaggaccatctgcagctgggcagctggaagtggatccagtgcagaagcatgtaaatctgattccacttaaccgatacatgactcagcttaactctagcaaagagatgtttgaagctgcaaaaagtgaaaagaaacaagatagtatttactcttcagcaattccattgttactaagcccaggccacttggcttcacactacaccctgagtgtgccttccaaggaagacagactcacttaccacaggcagccacaggaataaaaagctggcgtgggacagaaaattctccataccacagccagagtaacttttttgaaacttttgtcagctcatgctgctcctctgctcaaaaccagcctttctggcccactcacattgaaatgcaagtcctcgccatggcctataaggcccacatgacgtggctcctgcatgctgctcagccctgcctcaggccctttctgtcccttcatgatgcctggccacactgtcctgcaggagaaaagtctcagccagtctcatgattgcagactcaaaacttctagatatgatattaccagatagaattcaacattttattaaaagaacaatttacttcaggttgggattatctcaaaatgtagctaaggttcaatagaaaatctatgaatgtactgaaccaacggatgtggrataaaacattagtaacttgttgcaaaagcatatgtttaacatacatcttaaaaaattattgcgctataattttacttcaaacgaacagctaaaactatgtttaacgacaaaaccctagagactttgctatttaaatcaagaacaaaacaaggatgcctgctatcaccattactgcttgacagtgttcaggaagttaagcagtagtgcactcctggcaacgcattaggacacgaaacagaaaggagaggcagaaaacatcatcaagatcaacaatttgttctcattatttgcagatgatggtcatttatttgttcattaaaccaccaaatatacccttgagccacctctatgtctcacaccgctcaaggactcagaatgccaaactccctgcccttgtggatctaacatggcagggggaagaaaataaataaacagcaagttaacaatgaagaakgtgccatgaagaaaaataaaccaactgacagagtgacagagcagacagggccattctagagcaggtggacagcctacatgaagaggggatgtttgacctaaaggcacaaaagmgcaagccatggagcaagtagaggcagtgttccaggtgggagaacagtgagggtcaaagccctgagaccagcagatcatcatgcaggacgactaacaaggcagtgtggccaggcattgtgaggggaaaggaagggcctgaggcagggctgagcagcacgcaggagccacatcacatgggccttacaggccattacgaggacttgtatttcaatgtgagtgggtcagaaaggctggttttgagcagaggagcagaatgagctgacaaaaatctcaaaaaagtcactctggctgtggtgtggataattttctattaggactaagagtggcaactggggtccagtaaggagtatgttttaagaacccagtgagtgacaagaattgggagrtagtaacagcatggggttgtggattttgaatataaaaccaacagacttgaggatgcgtgggatgtaggatgygagagaaacaaaggagtcaaggacagtgtttcaccttttggcctgaggaacaggtagtgatcattgcagtcagagaaccatggtggaggaggccgtaaggtcaggaggtctgtgcaccttatcatgccaaatggcacatgatgttaaaataaaatgttttgagtaatcagaacgtagttaattgtgctccaggatggatcatacacagagccgtacccatatctgatttacatgttgaaatttgagaattttgagatgatgagacttagatgagatttttcaacttgatgagaccttgaggaaccttgggatgggatgaatgtattttgtatgtgggatagttgcaaatcttcaggagtcagagggcaaattattgtaggtagaataatgatttccaaagatggccagtttccaatccttggaaatagtatattagcacaggtgaattaaggttacagatggaaattcggttgctaatcacctgaccttcagatgggaatattatcctggattatcccaggattatcccttggttccaatgtaatcccaatgcccttaaatgtgaaggagggaggcaacatctctctgtcagtgtcagagagttgtgatgtaagaaagactccactggcctttgctggctttgaagatggaaagagaccaccagccaaaggaagtaagcagcttagaagctggaaaagtcgagaaaacagattatcctcttaaacttccagaaaggaaaacagctacactgacaccttgattttagcctagtaaaacccaatttgaacttctgacctccagaattgtaagataatagggttttgtctttaagccactagtttgtgctactttgttacagcagcattaggaaactaatactaagggaggagaccacccctcatattgtcttatgcccaatttctgcctccaaagaaagaaaatgtaaaaactgaaaggcagaaatgaaatccacaagcagacagcccagcgccacaccctgggcctggtagttaaggatcaacccctgacctaatcggttatgttatctatagattacagacattgtatagaaaagcactgtgaaaatccctattctgttttgttccaatctaattactggtgcatgcaccccccagtcacgtaccccctgcttgctcaattgatcacaacccttcacgcgcacccccttagagttgtgagccctttaaagggacaggaattgctcactcggggagctcagctcttgagacaggagtcttgccaatgcccccagccgaataaaccccttccttctttaactcggtgtctgaggagttttgtctgcagctcatcctgctacaatacaatgttggattacactgattgattttaaaatattgaactatgcttgcatccctggaataaacctcacttagtcatggtatatagttcttttatacattgaattgtgtttgctaatattttgttaagaatttttgcatctatattcgtgagcaatattggtctgtagtttacttttttgtactatcattatgtggtttggtagcagtttaatgttgacttcataaagtgggttgagaagtgttcccttctcttctattttctggaaaaaatgtataaacttagtatagaattcttcaagtgtttggtagaattatccaggtaaaccayctggaggtggacatttcttttacgtatttttaaactaaaaatttctctaaattgttacaggacagtttaagtgatctatttcagatttagtgagtttggttagtttgtacttttcaaggaattgttccacttcatctaagttgttgaatttttgtgtataaagttgtgtgtattactcccttattatccttttgatgtcttcaatgtctgtaatgatatcccctgtttcactcctgatactgctgatttatcttatttcttttctttatttgtcagtcttactagaagtttgtcaatattattgaccttttcaacaaatccattttggtttcattgattcttttctattattttttgttttcaattccatttatgtctacccttacttttattattcccttccttttccttgctttgagcttatttcagtctaggttctcaaggtaagagcttacattattgatttgagatgttcctcccttcttatgcacatgtttagtgccataaatttccttctcagcactactttggttgtgcctcacattttgatatgttgtattttcaatgctactcagttcaatttctttaattgcccttgaggtttcttctttagcccgtggcttatttagaagtatgttgtttagtttccaagtacttcgtgattttcctatttttttctgttactgattcacaatttaaacctattatggtgaaggaacacaacctattttgtttcagttcttttaaatgtgttgtggttttcaaaataataagagccatctggaacaaacccacagccaacatcatactgaacagacaaaagctggaagcattccccttgaaaatcaacacaagataaggatgacttctctcaccattcatattcgacatagtattggaagtcctggccagagcaatcaggcaagagaaagaaataaaggcattcaaataggaagagaggaagtcaagctatccctgtttgcagacaacatgatcctatacctagaaaaccccatggtctcagccgaaaagctccttaagctgataaacaactttaacaaagccttacgatacaaaatcaatgtacaaaaatcactaagtgttcctatacgccaacagcagtcaagccaagagccaaatcaggaactcaatctcattcacaattgtcataaaaagaataaaacgcctaagaatacagctaaccagggaggtgaaagatgtcacaatgagaactacaaaacactgctaaaagaaatcagagatgacacaaacaaatggaaaaacattccatgctcatggataggaagaatcgatactgttaaaatagccattctgcacaaagaaatttatagattcaatgctattcctaataaactaccaataacattcttcatagaactagggaaaactactttaaaattcatatggaaccaaaaaatagcccaaatagttgaacaatcttaagcaaaaagaaaaaagctggagacatcatgccaccagacttgaaactatacttcagggctacagtaaccaaaacagggtgttactggtataaaaacagacacatagaccaatgaaacagaatagagagcccagaaataagaccactcacctacaacgatatgatctttgacaaagctgacaaaacaagcaatgggaaaaggactccctaatcaataaatggtgccaggataactggctagccatatgcagaagactgaaacttgtccccttccttacaacatatacaaaaattaactcaaggtggattaaagacttaaaggtaaaacccaaaactataaaaacctggaagaaaaactaggcaataccattctgaacataggaatgaacaaaaatttcatgacaaagatgccaaaagcaattacaacaaaagcaaaaattggcaaatgggatctaattaaactaaagagcttctgcacagtaaaagaaattatcagcaaagtaaacagacaacttacagaatggaagaaaatttttgcaactgtgcatctgacaaaggcccaatatctagcatctataaggaacttaaatttacaaggaaaaaataaacaagcccattaaaaagtggacaaaatacatgaacagacacttttcaaaagaagacatacatgtggccaacaaacatatgaaaaaaaagctcagcattgattattagagaaatgcaaatcaaaaccacaatgagatatcatctcacacctcttagaatggatattaataaaatgtcaaaaaatagcagatgctggcaaggtcgtggagaaaaaggaatgcttatacactgctggtgggagtgtaaattagttcattgtggaaaaaagtgtggcaattcctcaaagacctaaaaacagaaataccagttgacttggcaatgccattactctatacatacccagaggaatataaatagttctatcacaaagacacatacgtgcatatgcaacactattcacaataacaaagacatggaatcaacaatccacctaaatgccaatcaatggtwgactgaataaagaaaatgttgtacatttacatatacatatacaccatggaaaactatgcagccagaaaaaaggatgagacaatgtcctttgcaggaacacggatggagctggaggccattatccttagcaaattaacacagggaaagaaaactaaataccgcacattctcacttataagtgggagctaaattatgagaacacatagatatgtagaggggaacaatagaaactgggacctatctgaacgtgaagggtgggaggagggagaggatcaggaaaaataactaatgggtactaggcttaatacttgggtgatgaaataatctgacacaagtttacctatgtaacaaacctgcacatgtacccctgaacttagaataaaagttaaaaaagaaaaaagaaaaggaaataaatgtgttaaggtttgttttatggcccaggatatatctatcttgataaatattccacggacacttgaaaagagtgtgtaatctactgttgttgggtaaagtgttctataaatgtcmattagattctgttggttgatgatgatgttgaattctcctatatccttgctaattttctgtctaattcttctatgaattgtaaattctctaaatatatttgtagatttgtctatttctcctttgaggtttttttttttttttgtcttgttttgttttttgacagagtctcagtgtgtcacccaggttggagtgcaatcgcacaatctcagctcactgcagccttcacctcccagctcaaatgatcctcctgcctcagcctccgaagtagctgggactacgggcaagtgctagcacacccggctaatttttctattttttgtagagacggggtttcgccatgttgcccaggctggtcttgaattcctgggctcaagcaatccaccaatcttggtctcccaacatgctgggattataggcatgagccatcatacctggcctctcctttcagctctatcagtttttgctgtattggtccatacacatataagatttttatgtgttcttggttcattgactctttaatcatttgtaatcgtctgccatcacttcttggccttttgactaagatcaagtgtaatgatcctctgtctccagcaatgttctttgccctgaagtctaccttatctgataatagagctgcagctacttcatttcaattaatgtttgcatggtacaacttttcccattcttttactttcaatatacatatgttatcatattaaaagtgaattgcttgtacctggatatagttggaacatttaaaaaattcagcctgccagtcttcatcttttaattggtatatttagatcattcacttttaatgttattagtgatatgttagccttaagtctgtcactttatttttttgttttctggttgtttcctctgcttttaatttcctggtttgttttttgttcttgcctttgtgcaaggcttgcatttttatttaccttctagagatttttattttcttatggcatttttgaatgtatcttttgtatcatcttttttaagcagttgctcaaggtgttttagtattaatacataacaccacagtctatgttcagttcaagtgycctattaggtttttaaygttcattttaaaaaattgtgttgtgmgtatacacgtaaggtttttggattggaatcagttttcttattatttatattatagaaaataatgagcatatacttctgtgtccccaggacaatgtgatgagatccaggacaatgtgatgagatccaggtcaaatgtcctatacatacaaaatctgtattgtaagtgagggacagcgaaaagtccattttagccatttatgttcaagagaaagaaacaaccacctccctctccccttctgaaagattcttcttagaaatgtcttaactctaacactttggattaaatacatatctctagaagttaaataagctcaatgtgttagtccagtttacaaatgtctctgtgtcctgggtttcatcccttttgaaatttcaatgcctaggaaaataatattataacattgtctaggtgcctatcctgkatggtaactstttgactcttggggagataagagaaggcctgttggatggaagctattagctccgtcattagggcaacaaatgactgcagacttaatcctaatgatatgtggaaagtaacatgtttctaggagaagtaaaaacaacattttctatctctgttgagtattaatttctgagtccctggtgtttgaggtttttacaggaatgctgagaatccaggcgtgatttcttttcccacaaaactttgcctccctttaagtctctttactcttctcccatatgtaatataattgtcttcactatttcttctacatacactgagaaacacatcagaaaatagcaacttttgcttcaaccttcaaacataacctagcaaactcaagagcaaaaggaaaatctactgtatttacttgaaatttttaccctttckgggttttttcttccttttttttttttttttgagacaaagtctcactctgttgcctaggatggagtgcagtgatgcaatcacagctcgctgcagacttgacctcccaggctcaggtgatactcccagctcagcctcccgagtagttgggactacaggtatgcaccaccgtgcccagctaatttttgtatttttgtattttttgtagaaacaggatttcaccatgttgcctaggctggtctcaaactcctaggctcaagttatccacctgcctcagcctcccaaaatgctaggattataggcgtgagccactatacctggcctctttcttcctttttgatgttccaagattccttgttttttttttttttttttttgtgacagctttataattcatataacatacaatttgcccasagtgtacaattcagtrgttttttttagtatagtcacagagttttacaaccattatcacaatccattttagaacattttaatcactgcaaaaagaaactccacgccctttagctatcaccccccaatcctaggtaaccattagtctactttctctgtagggttgcctattctgaacattttatataaatggaacacagcaatatgtggtgttttgttactagcttctttcatttaacataatattttcaaaattcatccatattccattgtgtggctatgccatatttaatttatgcatcagttgatggacatttaggttgtttctacttttaggctattatgaataatgctactatgaacattcatgtacaaattttgtgtagacatatattttcattttttttgagtacatacgagtgaaattgttgggtcacatcgcagctctacgtttaacattttaaagaactgttaaacagttttttgaagcagctatatcattttacattcccaccaccactgtataaggattctaattgctttacatccttgccaacacttgttattatctgtctatttccataatagccatccttgtgggtgtggaacagtatctcattgccattttgaattgcatttccctaatggctaataatgttgagcctcttttcttctgtttatttgcatatgttctttggagaaatgtctattcagatcatttgcccattaaaaaatatgactgtattgtaagagtttttttatatattatcaatacaagtcccttatcaaatatatgatttgaaaatatttttccccttatgtgggctaatgttttcactttcttcatggtatcctttgaagtacaaaagttttatattttgatgaaatacaatttatctatttttttctttggttgctgkgcttttggtgtcatatttaagagaccattgccaaacccaaggtcacaaggatttacttatctgtgtttttttctaagagttttagtcaacaaaaataagcaactgagaaaggattccctatttaataataaatggtgctgggatagctggctagccatatgcagaagaatgaaactagacctccacctttcaccacgtataaaaattaactcaagatggattaaagatttaaacttaagaccttaaactataagaatcctagaagaaaaccaagaatacacaattctggacatcagccttggggaaaaaattatgactaactcttcaaaagcagttgcaacaaaaacaaaaaaattgacaaatgagaccaaattaaagcaaggagcttctgtacagcaaaagaaactagcaacagagtaaacaggcaaactacagaatggaagaaaatattcaaaaactatgcatctgacaaaagtctaaccaccagaatctataaggaactcaattcaacaagcaaataataataattataaccccattaaaaagtggacaaaagacatgaatgatacttgttaaaagaagatgtgtaagtggccaaaaaacatgttgaaaaatgctcaacatcacaaagcatcagagaaatgcaaatcaaaaccacaaatagataccatctcataccagttagaatggctattattaaaattcaaaaaacaatagatgctggcaggctgcagagaaaagagaacacttatatactgttggtgggaatgtaaatttgttcagccactaaggaaaacagtttgatttctcaaagaacttaaaacataactaccatttgacccagcaatcccattactggtatatactcaaaaaaataataaattgttctatcaaaaagattcatgtactcttgttcatcacaccactattcacaacagcaaggacatggaatcaacctagtgcccatcaatggtggattggatcaagaaaatgtggtacatatacactatggaatactgtgcagtcatcaaagaatgaaatcatgtcctttgcagaaacatggatgcagctagtggccattttcctaagcaaattaccataggaacagaaaatcaaacaccacatgttctcacttataagtgggagctaaaaattgggtattcatggacatagagatggcaacaatagacactggagactactataaggcagaggaagggagtggggcaagggttgaaaaactagttattgggtactgtgctcactacctggctgatgggatcaatcataccccaaacctcagcatcatgcaatatacccaygtaacaaacccgcacatgtacctgctgaatcaaaagaaaataaaagttgatactgtttttaaaaagagttttatagttttacctcttaaacgtaggtctttgatcctgtttgagttaatttttgtacttgaaataaggtaggggtcaagattccttcttatatctttccttttggtttcaagaacttcttttagccattcttttaggatacttctgaaggcaacaaattatcttagtttttctgcatctgagaatgtattgacttacccagcattcctaaaggatatrttcacagaattctgggttgacagttctttacttttagcatttgaaaaatgttttgccactttctctggcctctgtggttctcagtaagaaattccctgtcatttgaattgtttttcctttataggcaaggtgtcattattttctcactgataccatgatttttaaaatttgtctttcatgttcaaaatcttgattatgatgttcttgatgtagctttctttgggcttatgctgtttgaggtttgctcagctttttttttttttttttttttttttgagacacaatcgcattctgtcccgcaggctcgagcacagtggcatgatcttggctcactgcaacctccacctcccacgttcaagtgattctcctacctcagtctctcaagtagctgggattacaggcacatgccaccacatccagctaatttttgtatttgtgtagagatggggttcaccatgttggccaggctggtcttgaactcctgacctcaaatgctcagcttcttgaatctgtagatttatatctttggctaaacttgggatatttctagccattatttcattgaaaactttctcagccccatgcttttcctcatcaccttctgcaactccagtgacacaaatgtttgctcttttgttatagttctgcaggtccctgaggcactgttctttttctttcttttataagcctgtttttagtctttattgttcaagttgggtaattgctattgatctatttgaaattcaatattttcccctcccctctccattgttccattgagcctatttggtgagatttctatttcagttataagttttcagttctaaaatttccattttatccttatttatatcttcagtttctttgctggaaatttctatttatttgctgagacttatttttacttgtgttctaagtatgttcataattgctaactgaagtatttttatgatggctcctctaaaattcctgtcagataattctaaaatgtgtgttgtatcagtatcagtatctgttacctttttttatttaagttaagattttactggttattggtttgataagttctaggctgcctccttcctggtccttaagctagagggagtgatatggtttggctgtgtctccacccaaatctcatcttgatttgtagttcccataatccccacatrttgggggagggacccggtgggagataattgaatcatgagcgtggtttcccccatgctattcgcaggatgatgagtaagttctcacgagatctgatggttttataaggggtctcccccttcgctcagctctcattcttctccttcctgccaccatgtgaagaaggacatgtttgctttcccttctgccatgattgcaagtttcctgaggcctccccagccctgcagaactgtaagtcaactaaacctctttcttttataaattactcagtctcgagtatgtcctcatagcagaatgagaatgaatacagggagtgagccgctcttggagcttcttttgtctgtattcactggtgtctccaggctgcaggcttctctagcatccactccaggtacataagacaaaacaaaacaaaacacacacacacacacacacacacacacacagggaattcacaatcctgtttctcctaaggtcctgagtccctccctggtctgccttcttcttaccaccttttaacatcttttaattttgtttcatatataatgcccatagtttttagctgtacttaccaggacaaacagggagaggtgtgtttattccatcttgtctggaaccatgactctccctttttacttaacattgttaagtattttaatgttcccaaggttgggacatatcttagagttgctgtgtacatataatgcrgagtctccttttatgagctctgtagcacaccttatcaccatgattgtttacaaagggacttcaccattaccttccatgttggttttctatggctgctataacasgttaccaaaagcttcgtggcttaaaacaacacaaacgtattatcctgcagttcttgaggctaggagtccgacatgggctaaaagtaagagggctctgttcctctcagtaggttcaaggggaaaacctgtcctttccctttccagcttctggaggttgcctgcatgctttgactcatgacctccttcatctgtcttcaaagccagcaagagcgggttgaggtctcatattgtatcactctgatctcctcttctgcctctctcttctactttaaggacccttgtaagtataatggccccagctggatgatacaagataatctcccctttgtaatgccagctgatgagtaacctcactttcacctgcaacaaatgtaatccctttgctatgtaacctaacatattcatattcataggttacgatgtggacgtctttgaggggtcattattctgccccccacattgcctgctttaatataagtaaacacacttggtggatgtcagctttgaygtcaatactactgctactaataagaataacaaggaattattatcataaaaactccaagaagcagttattatttccatcaccttcctttgcaaggaaaattgaggtcccagaagattgagtattttgtcccaagtcacaagactgttgctatgaggtgtcccagagcagggttggggcaacaggactagatgtctaaaacagtcatctttccagccagaggagctacckgtgtaaaggtagccccttctgtaccagaaaaggcccagtccttggagcaacaggcctggttcaaatcctcatctccctgctcactgcaccgtggtctgggcaaattatttgaacttgccttgctccagtttcctcctcctcctctgttcaggagaggacatgccagggcctaggaaactgtatgtggagaagacacaggcagggacatgtcccatgtctgcgccagtgtcctggctccttggctatcaggtccatacctgccttaccctgcccagccttgccctgccctgccctggagggagaatgtgccctaaactccaggaccctgtgtcagcagggctggtggactgggtagcccctgacccaaagcatctgtgaagtatgcagcagactccataaggtgagaagggccagcacagggctccctcaccatctgcaccagagtataacatccctcccttgggagtccaggcccccaaagtctcagccctagctccagctccaatagggaaaaatgggctgagaaatgcactgggagatccccagcctggctctcctggggaaaccaaaaaggctgcaagtcacagggtgcctctcagaagtccagtctgccgctgtggaggcacagggatctgcatgtgcttctgctgttgctaacgatccttacaataactcataaagaacctggggttctcccagcctccgtacatgagtctcccccgggcctccccagccctaatgcgggatggagatgacagattcgcagagggacttggccaaggtcacacagctcacatgtggaggcagagctagaatctgagcctcgggggttataaacattttgctaaaacttaggctttgggagaacggagtggggccctgcaaaactgtgcccacaggttgttatggctggtgggtgggccagcccttccctctgtggtaaacagggaaggcccatggggtggaggcgggggtgggggtgggggtgcagtgcttgggtaggtttgaggtggagaatgaagcaggaaataaatgaggggagggagcaggggacaggaaaaggatggaggacaaggtggggtgaccatccacggccccccagtccccaggcccagctcaagcctggggtaaagaatgagcctcggcctttggggggcctcacttgtatcagtagaggggatcagaggccccatctggccaggcactgcccacaacgtgctatgacaccttctgtcaatcacctgccgcccaggcttcagtctgctcctcagttaaataaaggatgtggccataaaagatctcgaaggcagtcccctgccctgacaggcagagggctctgggtggcctctgtcagatggcaggttggggacttcctcattcatttgttcagcaaatatttaccaagcacctactgtgtgccaggcagcagggtgcagctgggctttctatctctgcttataccgaggagactccaggtgcaggggtgtgtgcagcatgttaggctgtgacttcctcagagtctgacatgcacagaggtgaaacaagccagtgctcacaccgaccacacattttaaaagccagcccagcactgaggcttaccaccacccccagggggggaagkgccagcctaggcagggctcctgtggctgggggcagcctggctttgcccacccagccccagcagtcagcaggacatgggcagatccaggaagacctgcaggatgatggaatccacagattcagatggccaaaaccaagctgaccacagataacagaatggatgggccaggaagatgcatttgaccctgttggggctcagaaaacaataccctgaagcatggggctttggcatgctgagaactttgaaatgaaggaaactggaaggtcacagacgcaagttctttctgatcttctcctgccctcccatctccttttcctctttcttccctgaagcaagtcataggaaccataattcagcttccccaggatgcatcctagaaactacaatccctctcccccaaagcaagccataaaacctagaaaggtcattctctcccttctcctgtctccctcattccaaaatagtcctgccctatacctaggagccaaaatgagtgattgaagcataagtctcagatcactgaagtttatggagccagcttgggggatgcacctgggaaaaacacgagtcacagatgcatctgtggctctttcttccaaagacgttctcaggaggttttgtatttatacattttccttaaaaagtatggggcggatggcagtgagctgaatgattacatacttgtgtatgtgcccagtaaatctacattttatgtaagataaagtgaatattggaagaaaatgggaatagaggaagcatatgtctcagggaggggtgaagggatgatcaatctcattttatctttgttctgtacctgggaagataagcaagtaatcaacattatcaatgtggaggcttttgaaagggctggtttctgtttactccttagaaaagaaagcttaatgatagttagcaaggaaggggataaaaaattgaggcgagtctgacctcccatcccataataaggcatgtctgacttcccatcctgtcatcgtcatgaaatcagctttcaaggattctttcgagtcccgttggccaagagagggcccgttcagtcatttgggggcttagaattttatttttatttctcataaaaaggctgcacagagaggctaagaatctgaacacacaggcctacggggttccccattctgcctattattgttaccagaaaggggtcccaatccagaccccaaaagaaggtccttggatctcaggcaagaaagagtttggggcaaatccctaaagtgaaagcaagttttttagagaagtaaaaaagcaaaagaatggctactccataggcagagcagcggcacaggctgcttgactgaatatttttatatttatttcttgattatatgctaaacaaggggtgggttattctcatcctgtgattaagaatgcctgaccttctgggaatgcggcccagcaggtctcacccttattttacctggcccctattcaagatggagtcactctggttgcaacacctctgacattaccattagatcataccctttgtccaaccacatttcatacaattgtccattcttcctcaaatctaagcatacagacagacggtttgcactgggtgtttgcgtcttcatttccgaaagcttccatgtcacataagaatttgattacatagatttgttgtttttttcttgttaacctgtcttttgctataggagggttggcagtgacccgtattgttagtggtggaaggtatctgagttactggcagtgaatccacacacgtctgcagcaacttcaattcttgcctccgcagaagaaagaatttgactgacgggcataaggcagaaagacagaggcgagtttcagagcaggagtggaagtttattaaatagctttacagcagaaaagagggtatgcttgggagagtcccaagctggcgacttgaagaacaattgtggtgtttaaccttgctcctaggactttataggctggcccctttcccatgattcttcccttagggtgggttgcctgcatgtgcagtgtcccccttatgcttgggaggtgagcacgcacagtgtgtttgggaagttgtacacatgcctatctgaggctttcttcccttttctggtgaagtgcccctggaaggtcatactctgccattttgtctcttaatgcacatgcccaggaagttgcttctccccagcatctgcattcaatgaacatttgagtgcaacaggtgtggaccatcaggaaatggcccctccctggcaccagccgccaatttatcacttttagagaggcaatgtgataattgcttaattatcacctgacattcctagtgggtgggggaagagccctctcctgccccactcatgcctgtctacctactgtaacattatgatggggtcacataaggtttctgcccctacaatcccagcagaaataaagacaaaggggcagtgtgaagcagacacacagagtgaggttcggagtggaagtgtaacaggtgaaagaaagagaagagctctctctgctgcagagagaggggtcttggagaaatgagttgctggttccatgatgcaatgcagcaagttttatagatgagcttgaggaggtggtgtctgatttacataggkcatgaaagattggtcagaccaggtgttctatttgcatagcatgcaaaaatctggccacccccccgaatcttttgttatgcaggtgggttctctgcatctggtgccatgttgcctgcttccttactgtacacrtggtgacaaacaaaagggaaaatggygcctctatgttgaacatacctggcttccaggtagcccttttctattggcacaactgcagcattcactcctgcatggttatctatgtctgcagctcaatttttctggctgctttttgctagaaaagaaattattggccaggtgtggtggctcacgtctgtaatcccagcattttgggaagctgaggtgggtggatggcttgaggtcagcagttcgaaaccagactggccaacgtggcaaaaccccgtctctactaaaaatacaaaaatcagccgggcatggtggtgcacgcctgtaatcccagctactcgggaggctgaggcctgagaatcacttgaacctgggaggcagaggtggaggttgcagtgagccaaggttgtaccattgcactccagcctgggcaacagaataagactcgtctcaaaaaaagaaaaaagaaaataaattattttagggctgctttttgttaaaagggaaggcttgctgaggactctgttgcccttactatctgcctaaataatttctttctagctcctgtatcaaaatctcagttcatgggcctaggagtttccctcagagggggcccaagacaacaaacggtctggccatgaaaaatctaaaagaccccggccttctggcagcatgcgagggctggtttagccctacctaagacagggcattgctagggccaccctggcctctgggtccggagctgtggaaggagggtggtggtggtgaaggctgctggtggaattgtaaccatccaatgggttcttcctgcccactgcacagaaaaaacccattcactgagaccacagcattgcaataaagaaagagtttaatagacacgaggttgtccacaccacatgggacatagagttattaatcaaatagatctccttgaaaactccaaggctagggtttttaaaaaatagtttggtggcccaggaagaccatttctggatagggccacaggaccagcttggtgggagtcagtgggggtcagagatgcaaaaacctgaaaagacatatcaaaaagccaatcttacgttctacaatagtgatgttatctgcgggagtaattgtgggagttgcaaatcttgtgacctccggaataatggctgcaatggctaatgtctacaccttagaagaattcaggatcctcacatcctcctaatctggtggcctttcattagctttaggtttagttttggggaagggctattatcatttaaactataaatgtctcccaaagttagcttggcctatgcctagaaatgactcagggctctttgaaggttaaaggcaagatagaagttggttagatcacatctccttcactgtcatagttttctcactgttaaaatttttgcaaaggcaatttcaggattagagtcccccagcgacacctctctgtcacttgcagagggtcccaggtcctgcagagtcacgaaaaccagtctgtgacatgacatgtccctttgctcaagggagggctgcttggagctgcacacttgctragttaaagagcaagggtgtccagggaaagtgatgaggctgcagccccagctcacctacccttcctgggcttcatgtccacctcagaaaggcccagccttaagttcatcagcaayagttgcatggcttgaaagcacacagcctgggccaacttgcacactgggcattggggaagggacattggctctgtgatcccaattctcccatctccagcccctccattggctgcagaacagagtttctttcagcatctgggagacactctgtgggtcccgggggttagacaccccattaacccaggacaatgtcctgtcacagcagagcccttgccaccctcaagaacaccctcagatgacacagagtcctcaaagcctgagccatgggcttgttagacatcatgttcttgggctccaccccagactcaatgcatcagaaactctggggttrcttaagtttgtgttaaaggatacttttcaacaaaragtaaaattatgattctaaggcagttataaaatcaatattgttaaagactttattcaactcattattagtgaggaaagtgaggatagcaaagtcacctggtgtccatcaagcagaccatctggaggcaaaactctttatttaaggaactcagaagtaattagactttcctattttctaaagccataatctgacaccaggcttctttctaaaacatgtataagtaactaggatttctaatgcatctccggaatgcatgtatgttgaaactcattgtgcaacacttgccgacatcaaggcaccaaattacctacatggctaatatggtccaaattacccttaagctcccactttaaggtccataaatacccctaaggaaaatccaccttggcacgctcagtcttgtctagctgaagcgccctgctatactctgctgcagtgttctttctgtttaataaaactttcctcttcaaacctattctgctgtcggtacattcttttcccatatgtgagccaatcactctccactgccagggctctgacaacttgcctggcagaaacctataggatgtttcaacatgttcaagggagaatccaaagaatagacacatttatatatcaggaatattaaaatgaacttacaagtggatcccaaactggtttctccacattggcagggtcatcccttcaccagagagaatttatttgcatgtccataggcaagacttattttgtttgctgtcagtcatttacaacttatagatttgtaaaacagcacacagtgagatacccctacagggtgtgatctaaacaattcatagttttccattaaatcacacattttcccctcaagaatctccagctgaaatgatccaacaggatttggtcagtctgtggcctggccagctgggggccacaccctgacggaggcccatagctcctgatgagtgggagagkatgggggacgcttggaaagaacctagggttcccacagtgaggatcagcatggctttgtatagcccatctctgaatgcctcagaacccactaggaataagcaatttactgttattgaagtctgtgaaataattcattcctaaataaatttgctagggaattgtgggctgtaattactgacagacattgccagacattgaaggtctatcaggcaaaaaccaaacagaaccgactagacttgtaggcggatgcaagacaggtgaagaggcaggaggaggctgtgtgggacacagccgggtggtttgcacgctgtgtcctcatcctgcattatcttcttccaaggccctggcataaacgagctccaggtgtggaagacagaggatgatgaaggagctggctgaggtggcccctgaattcagatccccctccccaaggtggttcctgaggggcatggggcctgctggagttcagcggggcttcaaagcagacagacctggagtccctgtcctggccctgccatatccccaagtcagtgaccccagagtgagccttgcaccccctaggccctcatcacatgtgctaatagcgttggaaatagtaacttgaagccccagctctgtcctggctcaagaggcactcagttcccttcctcycaccagtgtgatggtacctctgagttgccagaggaagactgggcagcctggctcgctgcagcctgcaggaggtgggcaaatgtcagaaggtcctgttttggggctccccaatatccaggatctcaaaaaagtctgggtggtgtttgcttcactcttgagtgtagcctcacccctcaggccctggttacagcatggccggcaactcctttgcctactatagtggattctgacccagtctttctgccaccygccccttctccctccactccacacacaacccctgtcagctagaccaggaacactgggatgtagggtctgtgcaggcaacaagctaacaacatggggaaaggtcacatacttcgtccttgggaatgttggcacctaatgccctggtgggcagagagcacattcttcctgcaagtttgctgatcaaatgcccttagcaataaacaagaaatatgctcacaggctggcagggaaaatggatgtgaaacaaatcattgcaaatgactaagtaaacaattgacaacatgataaggaccacgaaggaaaaatctagtattctatgggagccacggtctgagctgagcaggtggtgagaggtcaggtaggcttccctgaggaaagagacttacactgaaacctgaaggatgagaaagagttggctgggggaagagcagaacaaagagttccaggtggagggacaacgtgtaggccccgtagtacagctctgccatagctacttctcagcttggatcctctccgtgactcccggggacgctgtccagcaaagcccactctcctttcctgaggccccatgctaaggccaagcccttctgtcagatttctcacctgctgctctccttgcgcactcaggacccagccagatgaactattcttgcccccagagcctgtcctatgttctcagctttgtgctttgcctagtgctgctgttctcctggaaatgcccttttgcctcctctccacctgctaaaatcctccccttggttccagttctggatgagatggaacaagcatatcctgacctgtctatcccaccgaaggcagctgtaaccctgggcggcacgcatggagcagccatctgaagactcggaaaagtaaatagcagcagatgcatttggaagaaaaccaaagcctgaagtatctcagcaccagcagtgagtttaccactcttgttcctctgagattcccctgcctgggctcaaggcaccccaaaacgtggatgtggattcgggtagggatctatcaagcagtttgattccagtcagtctcgtcagagaatccttaccaagggcatccacatctgtgacaccagctgcccatcagcggcctcgatttgtttccagtttgctgctccaaagagggatgtctgtaaccttccagtctagagtcttcccagcagcagagcagacggccaggccattggtgccaggtaagagttagttaacatgtagcaaatttctttgcgggaagcactggcgagggcattaggactgcagtgagttctgcccactgagcagagtgatcatgttcacttattgttttatggagatggtgctgaggctgaacacctacagcagctttgctttaggggacatggttggtgataatgtttccgctaaagggattgctgccaagatgctgctaaggagaggccaactggctcttgaatactccatttccttttaaacggagagatctcttaggctcttctcacttttttagtcattgagtgagttgatacaccccaaaatggggatggcaggccaaagagtcacaaagcatcctcgcgtcaggcattcagttccagcaagagcttggtcacagctgccttggaacaaaaaaaaagtttatttggcttctcttccagcaggtggcgctgttatactaggaactgcctctgagtagtcctgcagccattaaatctttaattaaattgatttctctttctcttgctgtgattctttgtctctgctgggccaccaggtattgtttaggtaggtaagaggggaagaaaaaatgataccagaaggaaatgtggaacattagaaatgaacaagaacagaaatggcaaatatctggataagtataataggttattcttctcttgttgagttctttaaaatatgtaagacaattaaaagcaaaaatttttaacaccattttaaaaagtttcaaagtatgtagctgtaatacatgagacaattacaacaaaaagaggaggaaggtaaggagatmcatatggtggtaagattctgatattccacttgaaatggtgaaatatcgattctaaatagactacaaaaagtcaaatatgtatattgtaatccttagaacactgaaaaattacaccaagagttaatgccaaaaacccactagaggccgggagtggtggctcacacctgtaatctcaacactttgggaggctgaggaaggtggatcacttgaggtcaagagtttgagaccaccctggccaacatggtgaaaccctgtttctactaaaaatacaaaaattagctgggcatggtggtgcatgcctgtagtcccagctacttgggaggctgaagtgggagaattgcttgaacctgggaggcaggggttgcagtgagcctagattgcaccactgcactccagcctgggtgacagagagagactccatctcaaaaaaagaagaagaaaaaaaaaacccaataacacacacactagataacttaaactagaatactaaaaaagaagtttaagtaaaccaaacaaaggaaaaaaaaaaaggtgaactaaaaatacagaaaaaagtagaaaataaataataattagaagacctgaatccaaacatatcaataattacattacatgtaaatgacataaacacaccaattaaaagatagagattgacagaatgaattttataaaaatgactcaagtacatgctctctataagaaactctcctcaaatattatagtataggtaggttwaaaagaaaaactatggaaaaaaaaaaaaaaactgcacattgaagaccccaactgaaacaaaactactatgttaatatcaaagtagacttcagaacaaagaaaactaccagggttaaaaagggatattacatattggtagaaaagttaattcactggtactggcataacaacagacacatagaacaatagaacataatagagaacccaaatataaatccacacatttataaccaactcatctttgacaaaagatcccagaatatgcaatagggaaaggacagtcttttcaataaatggtgctgagaaaactgaacaactaaatgcagaagaatgaaaccagatccctatctctcactatacacaaaaatcaaatcaaaaaggattaaagatttaaaaggactaaaacctgaaactatgaaactactagaagaaaacattgaggaaaagctccaggcaatcaaagcaaaaatagacaacggagattacatcaagttaaaaagcttctgcacagcaaatgaaacaaggtgaacaggcaacctacaaaatgggaaaaaaatatttgcaaactgtccctctgccaagagagtaataaccagaatatataaagagttcaaacaactcaatagcataaaacaaataatctgattttaaaatgggtgtctgggcactgtggcttacacctataatcctagcattttgggaggccaaggcgagaggatagcttgagcccaggagtttaagatcagcctaggcaacatagtaagaccctacctcttgaaaaaaaaaaaaaaaaaaagtagctgggtgcagtggcatcatgcacctgtattcccagctccttgggaagctgtagtggatcatttgagcccagaaggttgaggctgcagtgagtagtgatgatgccactgcactccagcctgggtgaaaaaagaacaagaccctgtgtcagttaaaaaaatattttaaaagagtaaaaagtattaaaaatttaaaaataaataaaaatcggcaaaagatctgaactgacatttctcaaaagaagatatacaaatggccaacaagtatatgaaaaaatgttcaacatcactaattatcaggaaagtgcaaatcaaaaccacaacgaggtattatctcaccttgtttaaaatagcttgtaccaaaaaggcaggcaataacagatgttgacaaggatgtggagaaaggggaacccttgtacactgttggtgggaatgtaaattagcacagccactatggagatcagtatagagtttcctcaaaaaaccaaaaatagaactatcacatgattcagcaattccactatagggtatatatccaaaagaaaggaggtcaatgtatcaaagagatgtctgccttctaatgtttattgcagcactatttacaaaatccagaatacagaatcaacctaagtgcccactaatggatgaatggataaagaatatgtacctatacacaatggaatattattcatccataaaaagagtgaaatcttgccatttgcaacaacatggatggaactggaggccattatgttaagtgaaataagcaaagcatagaaagacaaacactgcatgtcctcacttgtgggagccaaagaagagatctcatggagatgaagagtagataggtggttaccagaggctggggaggggggaggggggaggggagaggggaagggggaatgaaggggaaaaataatgtaaattatttatcaccacagaattttacacttaaaatggtaaagatggtgaattatacatgtatattttacctcaatacactttttttaaaaaaaaaagaaaaatcaattcatcaccaggaaagcacaacaactctaaatgtatgagcacttgagaatagagcttcaaaatgcagaaaacaaaaattgtcagaatataaaaggagtagacatgctgacaataatacttggagattgcaacactcctttctatgtaatatatagaaatagtggcaaggatagaatggaacactatcaactaacttgaattaagtcatatttacagaacactacacactacaacagcagactacacattcttttcaaatgcacatggaacatttacaaagataggccatattgtgaataacatatccaaccttaaatttaaaagcactgaaatcatacaaagtatgttttctgactataatggaattaaactagaaatcaataagagaaggataacaggaaaatttctaaacaataagaaagcaaaccacacacttaaaaaagggaaatcagaaaatatattgaaatgaaagaaaataactatgtaacatatcaaaacttgtgggatgtagctaaagtgggaagggaatttgctgcattaaatgattgtattacaaaacaagaaatgtatcaaaacaacaatttaagcttctgccataagagactagggaggaaaagagcaaaataaacccaaagtgaacaggaggaaggaaataataaacaacagtgtattaaggaaattgaagggggggaggagccaagatggccgaataggaacagctccggtctacagctcccagcgtgagcaacgcagaagatgggtgatttctgcatttccatctgaggtaccgggttcatctcactagggagtgccagacagtgggcacaggtcagtgggtgcagcgcaccgttgcacgagccaaagcagggcgaggcattgcctcactccggaagcgcaaggggtcagggagttccctttcctagtcaaagaaaggggtgacagacggcacctggaaaatcgggtcacttccacccaaatactgcgcttttccaacgggcttaaataacggtgcaccaggagattatatcccacacctggctcggagggacctacgcccacggagtctcgctgattgctagcatagcagtctgagatcaaactgcaaggcggccccgaggctaggggaggggcgcccaccattgcccaggcttgcttaggtaaacaaagcagtggggaagctcgaactgggtggagcccaccacagctcaaggaggcctgcctgcctctgtaggctccacctctgggggcagggcacagacaaacaaaaagacagcggtaacctctgcagacttaaatgtccctgtctgacagctttgaagagagcagtggttcttccagaatgcagctggagatctgagaacaggcagactgcctcctcaagtgggtccctgacccctgacccctgagcagcctaactgggaggcacccccagtagcggcagactgacacttcacacggccgggtactcctctgagacaaaatttccagaggaacaatcagacagcagcattcgtggttgcctgatacccaggcaaacagggtctggagtggacctctagcaaactccaacagacctgcagctgagggtcctgtctgttacaaggaaaactaacaaacagaaaggacatccacaccaaaaacccatctgtacatcaccatcatcaaagaccaaaagtagataaaaccacaaagatggggaaaaaatagagcagaaaaactggcaactctaaaaagcagagcacctctcctcctccaaaggaacgcagctcctcaccagcaatggaacaaagctggacaaagaatgactttgacgagttgagagaaggcttcagacaatcaaactacaagctacaggaggaagttcaaaccaaaggcaaagaagttaaaaactttgaaaaaaatttagacgaatgtataactagaataaccaatacagagaagtgcttaaaggagctgatggagctgaaagccaaggctcgagaactacgtgaagaatgcagaagcctcatgagctgatgcaatcaactggaagaaagggtatcagtgatggaagatcaaatgaatgaaatgaagcgagaagggaagtttagagaaaaaagaataaaaagaaatgaacaaagcctccaagaaatatgggactacgtaaaaagaccaaatctacgtctgattggtgtacctgaaagtgatggggagaatggaaccaagttggaaaacactctgcaggatattatccaggagaacttccccaatctagcaaggcaggccaacattcagattcaggatactccttgagaagaacaactccaagacacataattgtcagattcaccaaagttgaaatgaaggaaaaaattttaagggcagccagagagaaaggtcaggttacccacaaagggaagcccatcagactaacagcggatctctcagcagaaactctacaacccagaagagagtgggggccaatattcaacatgcttaaagaattttcaagccagaatttcatatccagccaaactaagcttcataagtgaaggagaaataaaatccttcacagacaagcaaatgctaagagattttgtcaccaccaggcctgccctaaaagagctcctgaaggaagcactaaacatggaaaggaacaacaagtaccggccgctgcaaaatcatgccaaaatgtaaagaccatcgagactaggaagaaactgcatcaactaatgagcaaaataaccagctaacatcataatgacaggatcaaattcacacataacaatattaaccttaaatgtaaatggactaaatgctccaattaaaagacacagactggcaaattggataaagagtcaagacccatcagtgtgctgtattcaggaaacccatctcacatgcagagacacacataggctcaaaataaaaggatggaggaagatctaccaagcaaatggaaaacaaaaaaaggcaggggttgcaatcctagtctctgataaaacagactttaaaccaacagagatcaaaagagacaaaggaggccattacataatggtaaagggatcaattcaaaaagaagagctaactatcctaaatatatatgcacccaatacaggagcacccagattcataaagcaagtcctgagtgacctacaaagagacttagactcccacacattaataatgggagactttaacaccccactgtcaacattagacagatcaacgagacagagacagaaagttaacaaggatacacaggaattgaactcagctctgcaccaagtggacctaatagacatctacagaactctccaccccataacaacagaatatacatttttttcagcaccacaccacacctattccaaaattgaccacatagttggaagtaaagctctcctcagcaaatgtaaaagaacagaaattataacaaactatctctcagaccacagtgcaataaaactagaactcaggattaagaaacttactcaaaactgctcaactacatggaaactgaacaacctgctcctgaatgactactgggtacataacaaaatgaaggcagaaataaagatgttctttgaaaccaatgagaacaaagacacaacataccagaatctctgggacacattcaaagcagtgtgtagagggaaatttatagcactaaatgcccacaagagaaagcgggaaagatccaaaattgacaccctaacatcacaattaaaagaactagaaaagcaagagcaaacacattcaaaagctagcagaaggcaagaaataactaaaatcagagcagaactgaaggaaatagagaccaaaaaaccccttcaaaaaattaatgaatccaggagctggttttttgaaaggatcaacaaaattgatagaccgctagcaagactaataaagaaaaaaagagagaagaatcaaatagacacaataaaaaatgataaaggggatatcaccaccgatcccacagaaatacaaactaccatcagagaatactacaaacacctctatgcaaataaactagaaaatctagaagaaatggataaattcctcaacacatacactctcccaagactaaaccaggaagaagttgaaatctctgaatagaccaataacaggctctgaaattgtggcaataatcaatagcttaccaaccaaaaagagtccaggaccagatggattcacagccgtattctaccagaggtacaaggagggactggtaccattccttctgaaactattccaatcaatagaaaaagagggaatcctccctaactcattttatgaggccagcatcatcctgacaccaaagcctggcagagacacaaccaaagaagagaattttagaccaataaccttgatgaacattgatgcaaaaatcctcaataaaatactggcaaaacgaatccagcagcacattaaaaagcttatccaccatgatcaagcgggcttcatccctgggatgcaaggctggttcaatatacacaaatcaataaatgtaatccagcatataaacagaaccaaagacaaaaaccacatgattatctcaatagatgcagaaaaggcctttgacaaaattcaacaaccttcatgctaaaaactctcaataaactaggtattgatgggatgtatctcaaaataataagagctatctatgacaaacccacagccaatatcatactgaatgggcaaaaactggaagcattccctctgaaaactggcacaagacagggatgccctctctcaccactcctattcaaaatagtgttggaagttctggccagggtaattaggcaggagaaggaaataaagggtattcaattaggaaaagaggaagtcaaattgtccctgtttgcagatgacatgattgtatatctagaaacccccatcatctcagcccaaaatctccttaagctgataagcatcttcagcaaagtctcaggatacaaaatcaatgtacaaaaatcacaagcattcttatacaccaataacagacaaacagagagccaaatcatgagtgaactcccattcacaattgcttcaaagagaataaaatacctaggaatccaccttacaagggacgtgaaggacctcttccaggagaactacaaaccactgctcaatgaaataaaagaggatacaaacaaatggaagaacattccatgctcatgggtaggaagaatcaatatcgtgaaaatggccatactgcccaaggtaatttatagattcaatgccatccccatcaagctaccaatgactttcttcacagaattggaaaaaactactttaaagttcatatggaaccaaaaaagagcctacattgccaagtcaatcctaagccaaaagaacaaagctggaggcatcacactacctgacttcaaactatactacaaggctacagtaaccaaaacagctggtactggtaccaaaacagagatacagatcaatggaacagaacagagccctcagaaataatgccgcatgtctacaactatctggtctttgacaaacctgagaaaaacaagcaatggggaaaggattccctatttaataaatggtgctgggaaaactggctagccacatgtagaaagctgaaactggatcccttccttacaccttatacaaaaatcaattcaagatggattaaagacttaaacgttagacctaaaaccataaaaaccctagaagaaaacctaggcattaccattcaggacataggcatgggcaaggacttcatgtctaaaccaccaaa

SEQ ID NO: 95223 - DNA, 64434 bp, Homo sapiens
  misc_feature (1)...(64434): n = A,T,C or G
atttgcaagtctaaacacttgaaaagtatggccaccttaattgttttgtgatttagctcctaatcctcctcaagcagtatttatgcaaaagcattgccagcagcagtcgggagttcttaattttcatcctgttttgctttatcctaaagtacgagtgaactcatgtaagaaagaggtttctcatccaggcgcggtggctcatgcctgtaatcccagcattttgggaggccgaggcaggcatatgacttgagcccaggagttcaagaccagtcgtgagcaacatggtgaaaccccgtctctacaaaaagtacaaaaatgagcctggtgtggtggcatgcacctgttttaccagctactcggtgtacggttagctgaaagacaggacgagagagacccaaggtcaggcgagtaattttattaacctgccaggctgctccatcacagtcagaggatgcagccctgagcttacaaaatgaggggtgtgtatgggggagacagaccctggggttgtttgttggttaactttaccaatatcatctcatgaatggcttacaatacattatcttgtgaaaataggaatttacaagagggtgtaatttaggtttatctatgtttcttgtgacctcccccatgctgcccacagggctgtaatagcaagtctggtgaccttgctgtggtgcctagataaggtttctggaatgcagctgcagagtattcagggtaagggccagctgcattgaggtggggggttcctggggcagcttgtccctaacactcagaaggctgaggtgggaggatcactttagcccgagaggtcgaggctgcagtgatcacgccactgcactccagcctgggtgaaagagcaagaccctatctcaaaaaaaaaaaaaaaaaaaaaaaaaaaggaagcagctcattatttattgaattggaacaattcctaagatatatatatgtgtgtgtgtttgtgtgtatggcagtaatatatatatatatatattttttttttgagacaaggtcttgctctgtctcccaggctggagttcaatagtgtgatcatggctcattgcagcctggacctccccggctcaagcgatcctcccacctcagcctcttgaatagctgagactacaggtgtgtgccaccacaccctgctaatttatttttattttctatagagatgaggtctccctatgttgcccaggctgatctcgaactcctggcctcaagtgatcctcccagctcagcctcccaaagtgttgggattatagatgtgacccgttgtacccagccatgctttgttctgttttacaactatatagtattccattgtataggacttttacgtaatcccctatttttggatatttaggtgctcacaatcttttcttttttttttttttttttttgagcggagtctagcactgtcgcccaggctggagtacagcagcacgatctcggctcactgcaagctccacctcccgggtttacgccattctcctgcctcagcttcctgagtagctgggactacaggcgccaaccaccacgcccggctaatttttttgtatttttttagtagagacgtggtttcaccatgttagccaagatggtctcaatctcctgacctcgtgatccgcccgcctcggcctcccaaagtgctgagattacaggcatgagccaccacgccgggcctcacaatcttttctttcaattatagacaacgctacaatgaatatgtacaaaattgtgtgtgaatgtgtacatgaaagtctgttctttgtatgaattcccaaaggtggaactgctgggtcaaacagaatgtattttattaattttgtaagatattcacagtctgccctctgtatagttcgtaccactttacatttttaccaacaatgtatgagagtacctattgcccatacctttaccaacacagcatgctatcaaacttttagaaacattttgaactctgccaatctacatcaagtattctcacctgaggtccacaggcctcaagaaggggtttctctccctgtagtaccaaagtccaccttccatacaaaatctcagtttcaagcatcccactatctgaccaccagttcactcattctagtgtctgcacttcaactctttgcctcttgttaccctcaatccactggtcctatcaatttttcagtgtcaacctcccttttgcttgtcccgttacccagcctagtttctatggctcaatgctgtgaacactcccttgcctaatgtcttcatcaaacctgctaagcaaaaccccatacttgggtaaattcatctccattctgccctgtacctgcaaagggagctgaatatatctggagaaaaactcgcaaccattctgactggtcttgaagcctcagtgggctgttggcaacccccaaatcatgactgttcccgataagtcctctttctcagcccattgtctcaaaattttttcttccctttcaaacctcctcccatatctcctcactccctctttcagctgctgatcttgctttttcaccaaaattagaagcagaaaagaattcccatatccttccatgatcaaatctatcaatgcacatgagtatgtatctgattctttgcttttccttcttttttttttgagatggagtttcattcttgttccccaggctagagtgcaatggcaggatctcggctcactgcaacctccacctcccgagttcaagcgattctcctgcctcaacctcccgagtagctgggattacaggcgcctgccataatgcctggctaacttttttgtatttttagtagaggtgggttttcaccatgttggccaggctggtctcgaactcctgacctcaggtgatccacctgcctcagcctcccaaagtgctgggattacaggcatgagccatcgcgcctggcctcctcttcttatataaaatgtccatgcccctgactaagattatcttttcgttcgtggatcaacttgagggacattgatcctgtaattaacccctcctttctactcaaagctctttagattatccagttatcccatatctattcttcactgccatctccttggtgtgctcttgtctttgtgcatttgcctaactcctcatgcctcaagattctgttctaatttcccttccacttgcaggttcccctaacacactcagatctcagaaattttcttttcccacagccccacccgtccaaagagctaggttcccacaggttcacaaccaaggaataaaaaagacaagtccggccaggcgcggtggctcacgcctgtaatcctagcactttggaagcctgaggcaggctgatcacttgaggtcagaagctcaagaccagcctggccaccatggtgaaaacccttatctactaaaaatacaaaaaaattagccagggctgggcacgatggctcacgcctgtaatcccagtactttgggaggccgaggtgggtggatcacccgaggtcaggagtttgagaccgtcctgaccaacatggagaaaccctgtctctactaaaaatacaaaaatttgctgggcatggatggccgggtgcagtggctcacgtctgtaatcccagcactttgggaggccgaggtgggcggatcacgaggtcaggagatcgagaccatcctggctaacatggtgaaacctcatctctactaaaaatacaaaaaattaactgggtgtggtggtgggcgcctgtagtcccagctactcgggaggctgaggcaggagaatggctggaacccggaaggcggagcttgcagtgagccgagatcgcgccattgcactccagcctgggcgatagagcgagactctgtctcaaaaggaaaaaaaaaaaaagattagctgggcgtggtggcgcatgcctgtaatcacagctacttgggaggctaaggcaggagaatcacttgaacctgggaggcggaggttgcagtgagtggagatctcgccattgctctccagcctgggcaacaagagagaaactctgtctcaaacaaacaaacaaacaaaaacaacagcaacaaaaattagctgggcgtggtggcaggcgcctgaaatcccagctactcgggaggctgaggcaggggaattgcttgaacccgggagatggaggttgcagtgagccgagattgccctactgcattccagcctgggcgacagagcgagactccgtctcaaaaaaaaaaaaaaaaaaaaaaagaaaaaaaagacaagcccttgcaaaaccaggtccaaactagcaagatggggaggccaccaaagtgtggacctaaggggtcccagctacagtagctgtgctggatgacgctcctgtgcttgcagggggcacttacatgtgcctacattatataatctatcatcctgtgtgctgagttctatctacagctagactgggaactaagggcagaaactgtgccttattaatctttgtaacccagcagagtgctttatgagtgtactggttgaatgagtaagaaggaggatgtcttgggcttgtatgtataatattcctaggagtttggggtatagctgcacagcttactggaacgaaggatgactaaccaggtaaggatgcagactctctctcctaccatactggcaaagttaaaagtaagccacagaaaaaaaatcatttgggaaactcactcagagacagaccaactaatcgttcatgtccagtttcttttgactcttatccctttcttccctgctccctttaccctatttccttctttctctcttaatgttttttgtttgtttgtgagacagagtctcgctctgtcgcccaggctggagtgcagtgggcacgatcttggctcactgcaacctctgcctccagggtttaagcgattcttctgcctcagcctcccgagtagctgggactacaggcacccgccaccacactcggctaatttttgtatttttagtagagacggggtttcaccatagtagccatgatggtctcgaactcctgacttcgtgatccgccctccttggcctcccagagggcctcccagagtgttgggattacaggcatgagccactgcagcctgttttgttttttttttttttgttcgtttgtttgtttgtttttgttctgttttttttgagacggagtttcgctcttgttgcccaggctggagtgcaatggcgccatctcaactcaccgcaacctccacctcccgggttccagcgattttcctgtctcagcctcccgagtagctgggaccacaggcacccaccactacgcccggctaattttgtatttttagtagagacgaggtttctccacgttggtaagactggtctcgaacccccgacctcaggtgatccgcccgcctcggcctcccaaagtgctgggattacaggcgtgagccaccgcgcccgacctaatttttgtatttttagtagagatgggttttcgccatgttggacaggttggtctcaaactcctgacctcagatgatcctcccgctgtggccccccaaagtgttaggattacaggcgtgagccaccgcgcccggcctctgttaatgtttcttaaggaaacaaaaaaattaggggtattgattttgtagctgcgctaagtaacctttgctttttgcgtcccttggtctcagtcctagccatttcctatccaccctgtggctaatttgtcctttctgtaacagacaccctagactgtgtctatgcggttgggcagaggcgtgatgggtaaacactcctggcgggagactacaggcgctgcagctacatcctgtttcgtactgggagcaggtgccgccccgcggaacacttacttgccccgccctgcggtggagcagggcggtctcagccgccggaaccgccctggaagcccgccccaatcctgggcgtcgcttcgctgtgagtgccgctgccacggattggcttccagggtccggcccgtcggccaatcaggcgcgggggcgttgtctgggggcggggctccggccgcctctgacgagtcccggatttaccagggccggtgggatcccctcgggctcccgccttagcatgctggccgggacatctggtgaacatggcctctgctactgcggcagcagcacgacggggcctcggccgggctctccctctcytctggcgtggctaccagaccgagcggggcgtttacggctaccggccgaggaagcccgagagccgcgagccccagggcgccctggagcgccccccaggtcggggatggggcccgggcggtgggagcgggggctgggacgcagaagcctcccctggccgatttgcggtggggtgtcggggtcggggaaccggctgccggcctgaacgcgcggccggtggggaggagggggaggtkaggggagcagagggtaggtgtgggtgctcagtgttggggtcatcccccgtccatcctctgtaactgaggatctttgaggtccacgcttgggtggtcttcccatcttgctggtccggacctggtttcggaagggcttttytttcctttgttggaaacgtgtgagaaactctttttttctttctctttttggttccctttttttttttttttttttttgagacggagtctcgctctgtggcccaggctggagtgcagtgctgcgaccacagctccctgcagcctcgaactcctgggctcaggctatccttccacctcagcgtcccgagtagctggggacacagagggatgaccacgcccagcttttttttttttttttttttttttttcatttttagtagagatggggtcccaccatgttgcccaggctggtcttgaactcttgagctcaagctgatcctgccgccttggcctcccaatgtgttgggattacaggctgagccactgcacccagcctagaaaaccagctctttaatgaggcggagctgtgggagaagtaaagttttaaggtctcccaaggatacatttccaggaccatctctgaggcttcttttatgtgagcaggtgggggggtccaagactgcattgcttgggagaagtgggcagttagttccagtcttggaagacagcatgatatttattatgtatttgtctccttgtagctagtctgttactttaatttcagagtttaactcttaactctgctgaatttggaactatgtgctggtggggtttctttcttttccttttagccactctattgacaccttgatatgtgctggtggttttaatgaattaacagtcatgaatatcagcttttggaacttctgttgcatgctcatttgcgagactaattttgagtatttggtttacgctccaaaattattgtatcattatttatcctcacggagtagaagataagtacagattgcttattagaggaaaatcatttggcatctttgatctgatcattagattaatgttgaagatccccttcggcatctgggcacctgaccttggaatgttccatcaatcacacactagaacttcaatattttgctcttcacttcggagggcatttaaaataaacctcatatctctgtctctctctctttttttaatcctaaaatggagtctggctttgtcgcccaggctggagtgcagtggcacgatcttggctcactgcaacctctgtcttctgggttcaagcgattgtcctgccccagtgttccgagtagctgggattacaggcacctgccaccatgcccagctaatttttgtatttttagtagagatggggtttcaccatgttggccaggctggtcttgaactcccgacctgaagtgatccactggccttggcctcctaaagtgctgggattacaggcatgagccaccgtgcctggccaagagggaacctcctttttgcagagccgaattccccttcctgtctacttgctcattagggagctccaacttgacctcatctttcttcttgggccttcctgaaagtgacaagatacaatgaacatacgctcctgagctacaggcttcaagggcatgtagtctgcctcagtcctgtcctacaggacaaaaaccaaatgttttgtcctgtagcataacactgcccatcagctttctaggtggaaatacctgtgtccttggtacccattgcctggctgctaatccaatgccatatatatttttaggctctgttagggcagcaacccacctctggtaccaaattctgtattagattggaagagttcaggtgctgtgatatacaaagagaagggatatcttctttccttccccttacggtcatgacccagaagttgcatacattgctgctacgttcccattgtccaaaacttagtcacatggccaccwggttatggggaaggctgggaggtggctctttgttctgggtggccatatactgggctctctattactatcaaagagagggttcagaatggaagttaggaatcgtagcagtctctgccacagaggtatagtaatctgagatgagcaatccacctttatctttttcacctcatawttcacatcaaatctttttagtttttattttttaaattttatttattaggccgggcgcggtggctcatgcctgtaatccctgcactttgggaggccgaggtgggcggatcaccaggtcaggagttcaaaactagcctggccaacatggtgaaacctcgtctctagcaaaaatacaaaaattagctgggtgtggtgcagacgtggggccaggcrcagtgactcacgcctgtaatccccgcactttgggaggccgagacagacagatcacttgagacagggtcttgccatgttgcccaggctggtctcgaactcctgtcctcaggtgaaatgcttgcctcggccccctaaagtgttgggattataggcgcgagccaccgtgtccagccccaaataatttatacttcctaaggaatgaaaagagggttctatatacgcaatttatttgtgacatatagtacatttgcattttgtatgtgcaaacgtaacattaattatcaagtatctttatatgttaggcaacatattaaactattaccgtgttttatttttattttttgagatgagatctttctatgtcacctagtctggagtgcagtggtgcagtcacagctcacttcagcgtgcgccgggttcactggccttctttcttcatatgtttatcttggctaaaataaatgtctacataggatgaccacatcattcactaagacttcccttgtattaaggctttaaagagatattgagcctgggtgtggtggctcatgcctgtaatcccagcactttgggaggccgagctgggaagatcacttgaggccagaagttccaggccagcctggctgacatggtgaaaccccatctctactaaaaatacaaaaattgacctggtggtgtgtgcctataataccggttactcgggaggctgagtcaggagaatcacttgaacctgggaggctgaggttgcaatgagctgagatcaagccactgcactccagcctgggtgatagagcaagactctgtctcaataaataaataaatacaaataaataattaaatagatattgaatttgcctctagtaaccttttggatggcagtggtttcactagttacaatttgacccatgatgagtgttctttgtaactaggtatttgtaacagcttgtactttcacctctgtaaaccttgatttccaaggaaacttgaatttatttatcaacaatgccaatttaaaatggaggtgggtttaggagtagtgattcatgggtgttcttccttttttttttttttgagatggagtttcgctcttgttgccgaggctggagtgcaatggcacgatctcagctcaccacaacctctgcctcctgggttcaagtgattctcctgcctcagcctcctgagtagctaggactacaggcatgtaccaccacacctggctaattttgtatttttagtagagacagggtttctctgtgttggtcaggctggtctcgaactcccgacctcaggtgatccacccacctcggcctcccaaagtgctgggattacaggcatgagccaccgtgcctgacctgtttatttgtttttttgagacacagtcactccgtggcccaggctggagtgcagtggggtgattttggctcactgcaacctattcctcctgggttcaagtgattctcctgcctcagtctcctgattagctgagattacaggcatatgccaccccgcccagctaatttttatatttttagtagagacgtggtttcaccatattggccagggtggtatcgaactcctgacctcaagtgacccaacaacctctgcctcccaaagttctgggattataggcatgagccactgcacccagtccatgaaaatattagctcttttacttttttttttggacagggtcttgctctgtcacccaggcaggagtgcagtggcatgatctcagctcactgcaacctctacctcccgggtttaagagattctcctgcctcagcctcttgagtagctgggactacaggtgctcaccaccatgcctggctaatttttgtatttttagtagaaacagggtttcacatgttggccaggctagtcttgaactccggagctcaagccatctgccctcaaccaggcttttctgaaggctgcagtctctggctagcttttttctcataagctatctctcaattccgagtttcaaaatctggaaaagctcagtctggcccagcttgactcagcctctccagcagcaaggcagactggagtaatgcgtgcatccccaccaggccccacagcttggcatgggagggtgcaaagtgagggagaagaagctgcttcagctcttgtactctaagtttgagggctctgaaaagcttttatcatgaagcatgactcttgatctcaggacttcattcaaataataacaaatatttcttgagcgtctaccatgtgttagtcttctgagmcagaagcatgcctctgatattctcctttatttttaagaggagtgcaggcgtgtatctgctgttgttttctctattctctctggcttcgttacggacttaaacatsaaatctaattcctgtgaccttttgcagatattatgaacagtaaactgtttgggcggtattacgcctaacgtaaaggtattcatttttctcttacagtaattctttcatttctgcagtaatagaaagttttgctttttgttttgttttgttttgttttgttttctttgagacactctgtgtcgcccagactgagtgcagtggcacaattacagcttaccatrgcctcaaactcctgggctcaagtgatcctgccacctcagtctcctcagtagctgagatcacaggcacgtgccaccacatccagctaatttttgtatttttttgttttgtttttgagacggagtcttgctctgtcgcccaggctggagtgcagtggcacgatctctgctcactgcaaactctgcctcctgggttcacgccattctcctgcttcagcctcccatgtagccaagactacaggtgcccgccaccatgcccggctaattttttgttttttttttagtagagatggggtttcaccgtgttagccaggatggttttgatctcttgacctcatgatccaccctcctcggcctcccaaagtgctgggattagaggcgtgagctaccgcgggtcttgctatgttgcccaggctggaatgcagtggccaaaatctccactgcactccagcctgggccacggagtgactatgtctcaaaaaaacaaataaacaggtcaggcctggtggctcatgcctgtcatcccagcactttgggaggcagaggtggtataagaacaatagcaaacatacagggcaatccccattcccattgcaaaccagcggccatattgaaaacgtccccttagaggccgaagccagtgggttacttgaggtgaggagttcaagaccagtctggccaacatggtgaaatcccatctctactaaaaatacaaaaattagccgggtgtggtcgcatgtgcctgtggaggctgaggcaggagaatcgctggaacctgggaagtagacattgcagtgagccgagatggtgccactgtactccggcctgtgtgacacagcaagactttgtctcaaaaaaagaaaaaagaaaacatccccttagagaagaacctatgtcaatgcatagagatcactgcttctgtttctttttcttttttttgagacggagtctcgctctgtcacccaggctggagtgcagtgacacaatctcagctcactgcagcctccgccttctgggtgcaagtgattatcctgcctcagcctccaagtagctggggttgcaggtgcttctcgccatgcccggctaatttctgtggggttttttttsgttttggttttgtttttctgagatggagtcttgcttatgattttttttgtatttttagtagagatggggtttcagcgtgttagccaggatggtctcgatctcctgaccttgtgatccgtccgcctcggtctaccaaagtgctgggattacaggcatgagccactgcgcccatccaatttttgtattttttgtagagacagggtctcactctgttgcccaggctggtctcaaacccttgacctcaagaggtcctcctgccccagcctcccaaagtgattacaggtgtgagccacaatggccatccagtaataggaagtattttatgaataattctattgctgtgctctcattcttttaaattttatttttatttatttttctatccttccasggaaaaagaattaaatcttttaatttcattctttattataaaggtaatacagttgaagtacgttttatctagagcatttgaaattggaacttgatcagttaattccatttatttttattttacttcttttttttacttcttttgttttttcttttaaaacaattttgacagagcgagactctgtctcaaaaaaaaaaaaggaaaaagaaaataaagcaatctgaatgcaaaatctctagatttttctgatttcttcccctaattttactttttcccacagcaacagtcttagggacaaatagaactgattcttataagcacaaagtcaactgatgagagcagtgctgcatatgctagagagaagccacaaaccaaagcttttagagtgagtgcatcaggcagcaagtccgctaaatggctgcattcgaaagagctttattgccgagtgcggtggctcacgcctgtaatcccagcactttgggaggccgcggtgggcggatcacgaggtcaggagatacagactatcctggctaacacggtgaaaccccgtctctactaaaatacaaaaaattagctggatgtggtggcacaggcctgtagtcccagctacttgggaggctgaggcaggagaatcgcttgaacccaggaggcagaggttgcagtgagccgagatggtgccactgcactccagccttggcaacagagcgagactctgtctcaaaaaaaaagagctttattgtacatgttcactgtggaaaactgtgagaatacagtaagcaaaaaatagcaaatctgcctgggtgtgatgacgtgcacctgtaatcccagctacttgggaggctgaggcaggaggatctctcgagcccaggagtatgagtccagcctgggtaatatagccagaccctgtttctttttttctcgggacggagttttgctgtgtcgcccaggctggagcgcggtgacgcgatctcagctcactgcaagctccgcctcccgggtttacgccattctcctacctcagcctcccgagtagctgggactacaggtgcccgccaccacgcccggctaattttttgtatttttagtagagacggtttcaccgtgttagccaagatagtctcgatctcctgaccttgtgatcctcctgcctccgcctcccaaagtgctaggattacagacgtgagccaccaagcccagccagccagaccctrtttctgataaaaaaaaaaaaaaaaaaaaaaaagggaagaaaaaagaacaagtcggcaatttctacataggattatcacttaaatttttgatcagtttcttttgtttatgaaaaatatatgtgtgcatatatataagtatatataattacatatactaatacatatactataagatgaaatatatattataaactactcatatgtacatacacagtgtaacaatgtaggtgcatgctttatatgttgtggtcattcattaagtgttttttgttttttttttttgagatggagtttcatgcttgtcacccaggctggagtgcaatggcacaacctcggatcactgcaacctctgcctcctgggttcaagcaattctcctacttcatcttcctgagtagctgggattacaggtgtctgccaccaggcctggctaatttcttgtttttagtagagacagggtttcaccatgtgggccaggctgatcacaaactcctgacctcaggtgatgaggtcaccttggcccgccttggcctcccaaagtgctgggattacaggcatgagccactgtgcccggccattcattaagtctggatgctttttcatcaatcattcttctacaatattattttttaatggctgtcggcaatttgagatgagttaatgccattgcttgttcctcagaggatgggtttataaagagagaactaatgatagggagatgtcaatgaagaatgaggagggcctacgtttgtcttcaagattggagggtgcgggtgagggccactgagtaccttcacgtcgtactcatgctctctagggacagccaagttctgattaaacccaggagtgtgaggaacgttcagagaggtttgtttttcatgaaacagagtgccagaggtctcggtggaaggaggtggagacagagagggaaggggttggagatagggttggtggaagaagaaacctgccygaagaaatggtagtctgagggagcatgtgttgccagggtgaatggaggacgtgcctgacatgagagaggacttcctctttctgctggtgccaaactgctacatgcctcatgttctttgtggcaaggagggttattttgtgccaacttctgtgtcagtattctagtgtatcattagcagcctggctagtgagtacttagaaatagaagcagtgggccagtcacagtggctcatgcctgtaatctcagcactttgggaggccgaggcgggtggatcacctgaggtcaggagttggagaccagcctggccaacatggtgaaacctcttctctactaaaaatacaaaaattagccaggtgtggtggcacgtgcctgtaatcccagctactccggagactgagatgggagaattgcctgaacctgggaaacagaggttgcaatgagccatgatcgtgccgctgcactccagcctgggcaacagagcaagactccacctcagaaaaaaaaaacaaaaccaacaaaaaccccacaaaaattagccgggcatggcggcacgcacctgcaaccccagctacttggagactgaggcaggacaatcgcttgcacccaaaaggcggaggctgcagtgagctgagattgtgtcactgcactccagcctgggtgacagagtgagactccgtctcaaaaaaaagaaaaagaaatagaagcagtgatctctaggcattgacatgggttcttctctaaggggatgttttcttttttctttttttgagacaaagtcttgctgtgtcacacaggccggagtgcagtggcaccatctcggctcactgcaatgtctacttcccaggttccagcgattctcctgcctcagcctccacaggcacgtgcgaccacacccgactaatttttgtatttttagtagagatgggatttcaccatgttggccagactggtcttgaactcctgacctcaagtgacccactggcctcggcctctaaggggacgttttcaatatggctgctggtttgcaatgggaatggagattgccctgtatgtttgctattgttcttataccactaatcatgagttggggggagatcgctcagagagaaagtagactgagaaggtggccttgggcagagctggggagtaccaatattttatgtattttattttttagatatgggatcttgctctctcacccaggctagagtgcagtggtgagatttccagctcactgcagcctcgaactcctgggttcaagctcctccctcagcctcttgggtagttgggattataggtgtgcaccaccatgcctggctaccaatatttagagttgggcaaagagaagtccctcaaaagtgactgaggttgagtagctctggagttagaaagaaaaccrggttcctgcaatgctgtagagcccagggaagaatatgttcttaaaaggagagagtaggagctgggtgcggtggctcatgcctgtaatcccagcactttgggaggccgaggcaggtggatcacaaggtcaggagatcgagaccatcctggccaacatagtgaaaccccatctctactaaaatacaaaaaataagctgggtrtggtggcatgcacctgtagtcccagctactcaggaggctgaggcaggggaatcacttgaacccgggaggcagagattgcagtgagccgagattgcaccactgcactccagcctggcgatagagtgagactccatctcaagaaaaaaaataaaaaaataaaaggtgagagtggcccacagggacatgctttagacatagtctgtctggattttagccacaaatataaaggtttcctacttcatatgacactgatggagaacttgaataaggttcaaaatagaacccttagcaatttataggactaacccccaggctgaaatcagttcgtttcctgggatggtttgattcatttatttgagctattatggatccacctaactggtgtatgagtgcaaacacatcctgtgtgtgttcaatacctctctgttctttcctcactaaacctgctacaagtaaagaggtgtgctttggctgggtgaggtggctcacgcctgtaatcccggcactttgggaggccgaggtgggtggatcatggcatcaggagatcgagascatcctggctaacatggtgaaaccctgtgtctactaaaaatagaaaaaattagctgggcgtggtggcgggtgcctgtgggcgcctgtaggcgcctgtagtcccagctactcaggaggctgaagaaggagaatggcatgaacccrggaggtggagcttgcagtgagccaggatcacgccactgcactccaggctgggcaacagagcaagactccgtctcaaaaaaaaaaaaaaaaaaagttgtgctttggcagtgcatagaatacaaacccaagcgcatgggtggctctgaaatcattccacagcaacacttgttcataaaatggaccttataagttttaaaatatgtgggccaggtacattggttcacgcctgtaatcccagcacttcaggaggcatggcaggcagatcacgaggtcaggagatcaagaccatcctggctaacacagtgaaaccccatctctgctaaaaatacaaaacattagccgggcgtggtggcgggaacctgtagtcccagttactcgggaggttgaggcaggagaatgacttgaacccgggaggcgcaggttgcagtgagccaagattgaaccactgcactccagcctgggtgacatagcaagacaatgtctgaaaaaaaaaaaaagaaaagaagaaaaagaagaagtttgaaaatatgctaacaattgtctctgggttctgaaaataaaaacacaaattgtaaaaatgtgtttcttggccttctttgagaggccaagatgagtgaatcgcttgagctcaggggttcaagaccaacctgggcaacatggttaaactccatctcaaccaaaaaaaaaaaaattagccagatgtggtggtgcacgcctgtagtctcagctactcgggagactgaggcaggaggatcacttgagcccaggttgcagtgagctgtgatggttcttggccgggtgcggtggctcacgcctgtaatcccagcactttgggaggccgaggcgggcagatcatgaggtcaggagattgaggccatcctgcctaacatggtgaaaccccgtctctactaaaaatacaaaaaaattagccaggctacttgggaggctgaggcaggagaatggcgtgaaccygggaggcrgagcttgcagtgagccgagattgtgccactgcactccagcctgggcgacagagcaagactccatctcaaaaaaaaaaaaaaaaaaaaagtgatggttctactgcactccagcctgggcaatagagcaagaccctgtctctaaaataaataaataaawaaaaagtaaggtgtctagggctgtaagagcttctttgaaaatctgatttttgtgatttgtagtcatctcctaaactgtttgcatttttaaattttcccctgatttagttgatcatggccttgccaggttggtgacagtatattgtgagcatggtcataaagstgccaaaatcaaccccctcttcaccggacaagccctgctggagaatgtgcctgaaatccaagccctggtgcagacactgcagggacccttccacacgkcaggtatggcttctgcacagcaggcgggagctcggagctgcaymccaggccaggctcctgcctctgttcttgaagaagcagcatccccactggagctgaggctcccgcaggtgtgaggagacccgaggggcatgttgaagtacggtcmgggaggagcattcttgggattctagaagttctgaggaggcctgttttctcaaggttcaaaaacatttaattggctgggcacaatggctgacacccataatcccagcactttgggagcccgaggtgggagagtcatttgagcccaggagtttgagaccaacctgggcaacatagtgagactgtctctacaaaaaaaaaaaaaawaaataactgggcatggtggtgcacgcctatagttccaggcactctggaggtagagatgggaggattgcttgaacctgggaggtcaaggctgcagtgagccttgatcgtgccactgcactccagcctgggcaacagagtgagaccctgtctgaaaaaacaaacaaacaaaaaaccttgaactctaaagtgccatatgcttagcatatgtcaatttattctcaaaatcactcccaaaagtagttattgtcctctttattttgtagatggagaaacaaagaggacttatatgactcatagctgctcagtggcagaggtggggtgaaatccagggctacttccattccaaagctgatacccscctcattctgttttctttcccagcctgggaacttagaaaaagttgggcctgcatcatcagtcatgatttcagggtcctacctcatgttactttttgaagttaatcttgcaaatatcaaattctgattgtgtgcatcagtgagtcatgtttcagtcatctaatgccgtgtaataaactaccccaagacgtaatggcatttaaaccctcaatgatcattttagtgtctcttagggttcggggggttacctgggctttgcaargtggtagttttctctcttttttctttttttttttttgagacgggcctccaaaggcccttttcttgagcctctgcagaaagatttgatttctcagcacctcataaaagcaaacacgttaatgtggaaaacattaagcgacatgattaatggctcagttggaatatagtggtgatgcatcttaacttcctcaaaagaccaatactttaaatctttttatacaaaaaagaaatacaatgaactttgttgtaagaaaccatgagttggccgggtgcggtggctcatgctggtaatcccagcattttgggaggccgaggcgggcagatcacgaggtcaggagattgagaccatcctggctaacacagtgaaaccccgtctctactaaaaaaaataacaaaaaaattagctgagtgtggtagcaggcacctgtagtcccagctactcgggaggctgaggcaaaaaaaargagcatctaatagcaaggcgtgaagccgggaagcggagcttgcagtgagccaagatcgtgccactgcactccagcctgggcgacagagcgagactccgtctcaaaaaaaaaaaaagaaaccataggccagaggtgtccaatcttttggcttccctgggccacattggaattagaattgtcttgggccatacataaaatacactaacactaatcatagctaatgagctgcaaaaaaaatcacaaagaaaatctcacaatgttttaagaaagtttattcatttgtgttgggccacattcaaagctgtcctgggccacattcaaagctgtcctgggccacatgcagcctgtgggctgtgggttggacaagcttgctaagcaatataaagtaaaggttggggccgggtgtggtggcttatgcctgtaatctcagcacttggagaggccgaggcaagaggatcacctgaggacaggagttcgagaccagcctggccaagatggtgaaaccccatctatactaaaaataaaaaattagccagacgtggtggtgtgcacgtgtagccccagctactcgggaggctgaggcaggagaatcacttgaatctgggaggcagaggttgcagtgagccaagatcgtgccactgcactccagcctgggcaacaagagcaaaaactccatcacacacacacatacaaaagaaattactgtagaaacaaaacttggcataaagcagcagtaggctctgtccttgtgaaggaagtgggggctttcccccttctagttttactacttcatgacctttgaccatatttttagttttttctttagaaaaaaattgagataagcattaataatgacccaagttatttatttatttatttattttgggacagagccttgctctgtcgcccaggctggagtgcagtggtgtgatctcggctcactgcaacctctgcctcccaggttcaagcaattgtcctgcctcagcctctcgagtagctgggactacaggcgcacgctaccatgcccggctaatttttgtaattttagtagagacggagttttaccatattggtcaggctgggctcgaactcctgacctcaggagatccacccgccttgcctcccaaagtgttgggattacaggcgtgagccacggcacccggccaataatgacccaagttattaagaacaaagcactctgcgttgaagtaattattttggtatgttccagaattaacttgccacatgatttttttttttttaaattttttttaaatatgaaaatttattttgcataggaaacaataatctctggtaaaaatcattactgcatataacaaaacaatgccttcaattaaagggggaaagtgagtttttaaacattggggttaatttagaagaaaatacagtatataataatctcaacatcatgttwaggaacatgattattttttaagatgacccctttgattgtatttcacaggattattgaacatggggaaggaagaggcctcacttgaggaagtgttagtctatctcaaycaaatctactgtgggcagatttctattgaaacctcccaacttcagagccaggatgagaaagactggtttgccaagcggtttgaggaactgcaaaaggagacgtttaccacagaagagcgaaaacatctgtcgaaactaatgctggaatctcaggtaaaaaggagcatctaggccgggcacggtggctcatgcctgtaatcccagcactttgggaggccgaggcgggcggatcacctgaggtcaggagttcaagaccagcctgaccaacatggagaaaccccatctctactaaaaatacgaaaattagccaggcatgctggtgcatgcctgtaatcctagctactcatgaggctgaggcagcagaattgcttgaacccaggaggcagaggttgcagtgagccgagattgcgccattgcactccaccctgggtaacaagagtgaaacaccttctcaaaaaaaaaggagcatttaatagcaagggcataggtcagcctcactgcctataaagatatatagcctggctgacatagagaaaccccrtctctactaaaaatacaaaaattagccaggggtgatggtgcacacctrtaatcccagctaatcaggaggctgaggcatgggaatccttggaacctgggaggtggaggctgcagtgagctgagatcgcgccacygcactccagcctgggtgacagagcgagactctgtctcaaaaaaaaaagatatataactactgaagagagggaattgagccattaactctgagcttaaatccctcattacttcaacacaacagatcatataacacacaccattttattattttatttttcctcagagatccttgttctgagcatatcactttattctaagtagcaaaatgttggttgccaaaatattgacctattggctctcctcagagtcaaaatacttctcgtgtatgtgtctamtcactctataaaagaccttacttaagacttacttaagaccttacttctgactgggcacagtggctcgcgcctgtcatcccagccctttgggaggcttaggtgggcgtattgcttgaggtcaggagtttgataccagccaggccaacatggtgaaaccccgtgtctactaaaaaaacaaaatacaaaaaattagcctgatgtggtggagcatacctgtggtcccaactacttgggaagctgaggcaggagaatctcttgaacccaggaggcggaggttgcagcgagccgagatcacaccactgcagtgagctaagattgcaccactgtactccagtctgggcaacagagcaaaactctgtccaaaaaaataaaaaaacatagttcttaaggttttatttatttattttatttttatttttttgagatggagtcttgccctgtcgcccaagtagctgggattacaggcacgtgccaccacacccagctaatttttgtatttttagtagagacggggtttcatcatgttggccaagatggtctcgatctcctgacttcatgatccacccgcctcggcctcccaaaatgctaggattacaggcgtgagccaccacacctggccttttaaacaaaattttttaaaaatttatttaaaatttatttttcttttgttttcttttttttttttttttttgagatggattctccctgtcgcccaggctggagtgcagtggtatgatctcagctcactgtaacctctgcctcccaggttcaagccattctcctgcctcagcctcccaagtagctgggactacaggtgcatgccatgatgcctggctaattttttgtatttttagtagaacggggtttcactgtgttagtcaggatggtctcgatctcctgacctcgtgattcactcccatcagccttccaaagtgctgggattacaggcatgagccaccgcgcccagcctaaaatgtgttagccaggatggtctcgatctcctgacctcatgatctgcccacctcggcctcccaaagtgctgggattaaggcatcagccaccgtgactggcctaaaatttcttttaatatgtgagaaaaaaaagtcttttggtaacaggacatactgtcaccattcagggctatgtacagttgcagttcttgagacagtcttgctctgtcacccaggttggagtgcagtggcacgatctcggctcactgcaacctccgcctcctggactcaagcaattctcctgcctcagcctcctgagtagctgggattacaggtgcacaccaccacacccggctaatttttagattttcagtagagacggggtttcaccatgttggccaagtctcaaactcctggcctcaagtgatccacctgccttggcctcccgaagtgctgggattacagacgtgaaccaccatgcctggcctggtcttacttcttaagaactaaagatacttaagttcagaacttaatctgagatgatcaaaagatgacatgtggaagacaggctcagtacaaatgaatggaactgaacctctgctggggctgtgaccaggactctggaatgtcaagatggcaagaagccccttcctaatagtttgggtagttggatagtttgcagccttgattcataccgtagagccccgtgtgaaaactggggtactgggaagaggcagcagaaatctaaggcctggattccagtccagaagaacacacattctaagggggtttccttggggtgagttattctgccgctcaggttattctcctcagcccctcctactgtccsggatcctaggaaaaccatcccgctgtgtccgtgttatgtctctctccgggatatgtagtaaagtggcattgctgtggccacttggggagtgtggggccatctcacaacacacacagacttatctgccttccactggagaagctggctgtctcctggcagctcacgtctgacatgatgttctgcaggagtttgaccactttctggccaccaagttctcgacagtgaagcgatatggaggcgaaggggctgaaagcatgatgggctttttccacgagctgctgaaaatgtcggcctacagcgggatcactgatgtcattattgggatgccccatagagggaggctgaatttattgacaggccttctgcagttccctccagaggtaaggttactcgctgtgtttctcagtagcactatatgattgattgtaacagaataaaactgctggtttcattctggtgataaatgatggtgatggtgatggccgggcactgtggctcacacctgcaatcccagcctgttgggaggatgaggcaggaggatggcttgaatctaggagtttgagaccaccctgtggaacaaagtgagactttgtctctaccaaaaataaaataagttagccaagcatggtggcacgcacccgtgttcccagctactcaggagactgaggccagaggatcacttgagcccaggagtttgaggctgcagtgagctatgatctcaccactgcactccaggctgggcaacaaagcaagatgctgcctgaatataaataaatttttaaaaagtaaaactcatggtgatcattcattttaggaagtcaactaaggctgggcaaggtggctcatacctgcaatcccagcactttgggaggctaaggcaagaggagtgcttgagcccaggagttcaagaccatgggtaacctcgcaaaactctgtccctacaaaaataaaaattaggtggcatggtctctacaaacatgaaaattaggtggtgcacctatggttccagctacttgggaggctgggatgggaggatctcttgagtccaggagatggaggctgcagtgagctgagactgtgccactgccctccagcctggaagacagagccagatcctgtcttaaaaaaaaaaaagaggaaaggcaactaagcatatgagcagttggtccaggaggtagcttagacagtttagttaattgacagagttggtatttggattggttttccatgtatacttacttatttatttattgagacctaatctcgctctgtcacccaggctggagtgcagtggcgtgatctcggctcactgcaacctccgcctcccaggttcaagtgattcttatgcctcagcctctctactagctgggattacaggtacctgccaccacacccaactaattttttgtatttttaatagagacggggtttcaccatgttggccaggctggtcccgaactcctgacctcaagtgatcttcccgtctcagcctcccaaagtgctggaattacaggcataagccaccactcctggctttaaattttcttttttgttgtatgatttcaactcagcacttcttccctagactccattgtgatgaatgccattttttwccttttgaatgtatccacaatagctgatgttccgtaaaatgcgaggcttaagtgaatttccagagaatttctcagccactggagacgtcctgtctcacctgacctcctctgtggacctgkactttggggcgcaccatcccctccatgtgacaatgttgcccaatccctcgcacctggaggccgtcaaccccgtggccgtgggcaaaactcgcggcaggcagcagtctcgccaagacggcgattactctccagacaaytcagcccagccgggggacagggtcatttgcttacaggtacttggascttctgaaattgaggccagaggtggggaaaactgggaagaatgtgtgggttgggagggctgaaagcacatggcagacattcatgatgaaactgagatgaccttttggaaaaagattctgggattgttttaaaaactaacaggagattcatgaggtttagtcttcaggcaactggctttagcctggggcttccacttctgttttccttgcatggcttatgaattaacttggggtttgggctggcaaacctgctccttcttagagcacagatgtcattatctctctggaagtatggccttcttggaaactttgtggttcccatacatataacaagacaagcgtgaaaaaaaaaaagactttaagtgtggttttacttcgtttcttgtttactttattatcttttcttttttatggctttttttttgagaccgagtctcgctctgtcactcaggctggagtgcagtggcgaaatctcagctcactgcaacctctgcctcctgggttcaagtgattctcctgcctcagcctcccgagtagctgggactacaggcacrtgccaccacgcccagctaatttttgtatttttagtagagacagggtttcaccatgttggccagcctggtctcaaactcctgacctcaagtgatcctcccacctcagcctcccaaagtgctgagattacaggcatgagccactatacctagcctatttttttttttgcttgtttatttgaaaatgaaagtctttggtattaaggcacataacacaaattatcagtgtggttcgttctttttctaccctgtctcccagtttttggtaacacaacaagtatcttttagaggtttgggctgtggtcatgtttcttctgtgagtattcatttaaatatgaacctttaactacaggagatcatgaaacctggatttcagaatcagtcttcaaattccacagaaatagataaatatataaggcaatcaaatattctatgtttgtaaatgccacgttatcctatgcattttaatttttcacaggccagaaacttgtagtgaataaattgggagtaggcagaattggatttcattatgatatggccggccctccctcccttccttccttccttccttttttccttccttccttccttttttccttccttccttcctttttccttccttccttycttccttccttccttccttccttccttccttccttcttctttctctctctttctttcaagatgggttctcaatcttttgtccaggcaggagtgcaatggtgcaatcatagctcactgtaggctcaaatgcctaggctcaagcaatcttcctgtctcagcctcccaagtagctgggcctacaggtgcatgccatcatacctggctgatttattttattttattttgtggagacatgatcttgctgggttggccaagctggtttcaaattcctagcttcaagcaaccctcctgccttggcctcccaaagtgtagatattacaggtgtgaaccactgcacctggcctgatagggtgtttctaaatagaaatcttgaaatcattagccagacattctgtttacctttcacataatttataatactctattttaatccttcatttttacccagtacattgagctgatcttaagattgtggtggcgggcccctgtagtcccagctactcgggaggctgaggcaggagaatggcgtgaaccccggaggcggagcttgcagtgagccgagattgcgccaccgcactcccgcctgggcaacagagcgagactccgtctcaaaaaaaaacaaaaaaagattgacttctgaaataaaaggtgaaaaggccattttctttaaaatgatgataaatgaggctggtcgctgtggctcatgcctgtaatcccagcactttgggaggccaaggagggtggatcacctgaggtcagaagtttgagaccagcctgaccaacatggtgaaaccccgcctctactaaaaatacaaaaaattagccgggtgtggtggtgcatgcctataatcccagctactagggaagctgaggcaggagaatcacttgaacccgggaggcagaggatgcagtgagctgagatcgtgccatttcactccagcctgggcgaaagagcaagactctgtctcaaaaaaaaaaaaaaaaaaaagttattccaacctgaaaacctagatttcttaatcccttatgtttcttttctccccacccgctccccttgcctcatgatttaggtccatggtgatgcttctttctgtggtcaagggattgttcctgaaacattcacgctgtccratctcccacatttcagaattggtgggagtgtgcatttgattgttaataaccagctgggttacaccactccagctgaaagaggaaggtcttctttatactgcagtgatattggtacgtaacacagggaggaactgatattgctgaagccgacatggaattcctagggaaacctctggtgcacacagaacaatgagcctcactggttatccctcctttcatttaattaattaattaattaattaattttttgagatggagtcttgctctgtcacccagcctgtagtgcagcagcacgatcttggctcactgcaacttctgcctcccgagttcaagtgattctcttgcctcagcctcctgattagctgggaccacatgcgtgcaccaccatgtctggctaattttttttttttttttttttagatggagtctcgctctgttgccctttccagcttgtactccatgctggagtacgtgatctcggcttactgcaacctccgcctttcgggttcaagtgattctcatgcctcagcctcccaagtagttgggactacaggtgtacaccaccacacctgtctaatttttgtatttttagtagagacggggtttcaccatgttggcaggctggtctygaactcctgacctctggtgatctgcctgcttaggcctcccaaagtgctgggattaaaggcgtgagccaccatgcccagcctatcagtgtgatttttaaatccaaagaaataagacaaggatggagccacagtgtgccatctcaaatttcttataactggatgggtgatctggtacaagtcagagatcaacacaatgagtacaacaccagagttgttatctctaggatattcaaacttggagtgcccaggggcttagtgataagggatgtgttcaaccactaaacttggtgaaatagtatagttagaaataagatgtgaaggctgggcacagtggctcacgtctgtaatcccagcactttgggaggctaaggcaggtggatcatctgagcttgggagttcgagaccagcctgaccaacatagagaaaccccgtctctaataaaaacacaaaattagctgggcatggtggtgcatgcctgtaatcccagctactcgggaggctgagacaggagaatcacttgaacctgggaggcggaggttgcagtgagccaagatcaggccattgcactacagcgtgggcaacaagagcgaaactccatctcaaagggcaaaaaaaagaaataagatgtgaagaatcaaagtcagcttcttttttatctgtggaaattggtaggtttttttgttgttgttgttgttttgagagtcttgctctgttactcagactggagtgcagtggtacaatcatggctcactgcagccttgacatccctggctcaagagatcctccctcctcagcctccttagtagctgcgatttacagacacatgccaccatgcacagctaatttttttttttttttgagatggagtttcgctcttgttgcccacgctgcagtgcaatggcgccatctcggttcaccacaacttgcacctcccgggttcaagcaattctcctgcctcagcctcccgagtagctgggactacaggtgtccaccaccacacccagctaaattttgtgtttttagtagagacggggtttcaccatgttggtcaggctggtctcaaactcctgacctcaggtaattcacctgcctcagcctcccagagtgctgggattataggcgtgagccactgcacctggccacagctaatttttaaaataatttttgtagagattgagtcactgtgttgcccaggctggtcttgaacctctggtcttgtgtgatccctcttcagccttccaaactgctgagattacaggcgtgaaccactgtgccaggctgaaattggtcatcttaagataaagacagtgctgttattacccattcccagtttcacagtttacaaggctgtttgatggtagcaactattctccttttatacaaacagcctggactggatgcctcttgggcttgtctatgtgaatcctttatgattagtctgatgaagattctttggagcaaatttatctttttctaaggtacatcctttaatgacccttttatctcagggagaaagagagtaatgataataacagtaacaaaataaatattaactactatgtaccaggcactgttaggcattacaattgtttgtgcattcactcatcgaacctttgcaacatcactaagaggtaggagccccattcccgatttatagataagtaggttgagatttgtagctttaccraggtcacacaataagtcccagagttggaacttgccagctggtctccaaagctggggttgttaaccaaaccaatatctacctgtgaggattgggctgtcttttgatgcaggaagtagggcttagagagggccagtgtcattctgggttaactgtcctgtttcggcttggtcttctgtccttcagggaagcttgtgggctgtgccatcatccatgtcaatggagacagcccagaggaagtggtccgtgccacacgactggcttttgaataccaacgccagttccgcarggatgtgattattgatctgttgtgctacaggcagtggggccacaatgagctggatgagccattctacaccaaccccatcatgtacaaaatcatcaggtacaattataaacccttgtgtgatatgccccctaaaaattaaaattactattattattcttttgagatggagtcttgctttgtcacccagtctggaatgcagtagcacgatcttggctcactgccatctccacctcccgggttcaaatgatcctcctgcctcaagtgatcctcttgcctcaacctcccgagtagctgggattacaggcgtgtgccaccgtgcctggctagttttcatactttttagtagagatggagttttgccatgttggccaggcygatgtcaaactcctgacctcaggtgatctgcctgcctcgccctcccaaagtgctgggattacaggcatgagccaccatgcccaggcaggacatgaaactttaagagctaaagctgacacagttctgggctggagtgcaggtggcacagtcttggctcactgcaacctctgcctcctgggttcaagcaattgcaattcttgtgcctcagcttcctgagtagctgggattacaggtatgcatcaccacgcctggctaatctttgtatttttagtacagacaggggtttcgccatgttggctaggctggtctcaaactcccggtctcaagtgatccacctgccttagcctcccaaagtgctaggattacaggcatgagccaccgtgcctggcctcccatactcttcacacttgacatggttcctcattgaatagaaaaagggcaatagaaaactcagcagatgggaagattgaagcagggggaattaagcaaacctcgcccaaatctatttactgcagtgtcggcaggaccagaaatagaacctcagtgattcatttctacaaaccatagctgcagacctgcctggcaccttggtgagaggtaactcagaagattctaatgaatgttcagaaccatgctgtccaagatggaagccactagccatcagtggctattgagtacttgaaaagtggccagtcctgattaatgtgctgtaaggataatacacacaccatatttcaaacacttagcatgtaaaatataaacccaaaataatatttttaaatttattagatatggaaatgacaatataatgagtatattgacttaaataaaatatgttattgaaatgccgggcatggtggcttatgcctgtaatcccagcactttgggaggccaaggtgggtggatcacttgaggtcaggagtttgagaccggcctggccaacatggtgaaaccccatctctactaaaaatagaaaaatttggccaggcgcggtggctcacgcctgtaatcccagcactttgggaggccgaggcgggcggatcacgaggtcaggagatcgagaccatcctgactaacacggtgaaaccgcgtctctactaaaaatacaaaaaattagccgggcgtggtggcgggcgcctgtagtcccagctactcgggaggctgaggcaggagaatggcgtgaacccgggaggcggagcttgcagtgagccgagatcgcaccactgcactccagcctgggtggcatagcgagactccgtctcaaaaaaaaaaaaaaaaaaaaaaaaaaaagaaaagaaaagaaaaagaaaaattagctggcgttgtggcgcgtgcctgtagtcccagctactcgggaggctgaggcaacagaatcgcttgaactggggaggcggaggttgcagtgagctgagattgtgccactgcattccagcctgggcgacagagcgagactcggtctcaaagaaaaaacaagaagaaaagaaattaatttcacctgtttctttttatcttttctaacgtgactgccagaaaattttaaattactcatggcttgcatttcatttctgtcccatggtgctgattcagatggttaatgtgacggagggggaatttgttactttggaacttccttttctagatactagaaaataaaatagattcccctcctccaagtttatttccttatagatataaattaaagcagaggaatacacgttttatgagcgtttctgatccttggtaccagaaagaggactgctctcagaagaactaattgtgttctgtttagctctgaatttagcagctgaatgactcagtgaacctcagggttctattttattttatttatttttttgagacacggtcttgctctgtcgcccaggctgtagtgcagtggtatgatcacggctcactgtagcctcgacttcctgggctcaagcgatcctcccgcctccacctcctgagaacctgggactacaggcgcttgccactatgcctgactagatggggtctcacagcgttacccaagctggtctcgccatctgcccgtctcggcctcccaaagttctgggattgcaggcatgagcctcctcacctggccccagggcgttagctttaaaatctatcctgctttcttctctcttttatcaggattaaatatgataatatatgtgaatagactttatagttgaaagtatgacatgaatgtagagtgacatttattgtaacacccaggtgttgatgattgtagttaaaggatgatagatgcaacctgaaagattgcaactttcagactggagcaactttgggttccatacctttttagataaaggggggtgctgattggatagacagtgtgggtcagtcttggaaataattgtcagaatttaccaaatcatagaaaaactctgttaattatttctatttggatgcagacaaaaacttataaatttgttttctctcasttgcctggaaaagaggttgttactatgagtgccttcatttattaaattaatttattatatttaacattgtttatttattttgtttctgttttataaacttattgagatgaacgtgacataatataaaattggctgtcttaatgcgaacaactcagtggcatttatttaccttcacaaagtggtgcaaccatcacttctgtcaagttccaaaacatttttcctgaatgcctttttattttatttttatttatttttaattttatttatttgktttttgagacggagtttcacttttgttgcctaggctggagtgcagtggtgccatctcggctcactgcaacctctaccacttaggttcaagcaattctcctgcctcagcctcctgagtagctgggattacaggcgcccgccaccatgccaagctaattttttgtatttttagtagagacagggtttcaccacgttggccaggctggtcccgaactcctgacctcaggtgatccacccactttggcctcccaaaatgctaagattgtaggtgtgagccactgcacctgtcgaatgcctttttagagtgctgacactccaccgcccttgacagtgactctccttgtctctattagattgttacaggtcagactgatttttgtttcttctctttcttgggcagagctcgaaagagcattccagacacatatgcagagcacctcattgctggcrgactcatgacgcaggaggaggtgtctgaaataaaatcctcctactatgccaagttgaatgatcacttaaataacatggcccactacaggccccctgccctgaacctgcaggcccactggcagggcctggctcagccagaagcgcaaatcacyacctggagtacaggtgtgcccctcgacctcctgcggtttgttggcatgaagtctgtagaggtgccaagagagctgcagatgcacagtcacctgctgaagacacatgttcaggtgggcagcctccaaatggctggttattgcttctscttcctgctcagcaaaggagctgacgttggtctggtgttttcagttgtctgattcatttgacaaatatttattgtgtgtcgttaggttctagaaactgatcctagtgttgttttggtactgatagtcagttacctcagattttctcttcttttctttttcctccatgtatttatttatttatgcatgttcatacattacatgtacctggaatacatgcacactataaraaatacagagatacaagaatgtctgtttttatttttccaaccagtgagtagaaaacactttgtttcaggtggcttaaataaaagaaacaaaagtcaacacacataccccaaggtagccccctaaacatgctcatgttttacrtattgtcttaggatcactataggatgacaaaccaccctggtggrcctgggacttaggggttttctggaatgtgggactttaagtgctaaaacaaggaragcaaagagttaaatgtctttttctttcttaagcttggatgaaggaactttgccctctaaattattttattttatgttatttttggatggaatctcactctgtcacccaggctggtgtgcartggcgtgatttcggctcactgcaacctccacctcccaggttcaaacgattctcctgcctcagcctcctgagtagctgggattacaggcatgtgccaccatgcccagctaatttttgtatttttagtagagatgggttttcaccatgttggccaggttggtcttgaactcctgacctcaattgatccatccactttggcctcccaaagtgctgggtttacaggtgtgagccaccatgcctaacatgaattattttcaaacactaacttggccaggcacggtggctcctatctgtaataccagtgctttggaaggccaaggtggaaggattgcttgagcctagaagttcaagaccagcctgggcaacatagtggaccttatcgctagtaaagattaaaaaatttgcctggcatggtggcgcatgcctgtagtctcagctcctcaggaggctgaggtgggaggattgcttgagcccagaaggtcgagcctgcagtgagctgagattgcaccactgtactccagcctgggtgacagaataagatcctgtttctccaaaaaaaggaaattaaaaaaaaaaaaccaacccactaactttaagtttttattataggtacagagactattacaacaaactattaatatgtactcatcactcagcttaggaaataggatgttataaatacagttccccacatacccctccttgatccatctcctcccacctccgcagaggtaaccactaacctaagcacgtgtttgttttgcctgttttaaaattgtatataggccgggtgtggtggctcactcctgtaatctgagaactttgggaggccaagccgggcagattatttgagttcaggggttcaagaccagtctgaccaacatggcgaaaccccttctccactaaaaagtacaaaaattagctgggcgtggtggtgtgcacccatagtcccagctacttaggaggctgaggcaggagaatcacttgaaccagggaggctgaggttgcaatcagccaagatcacgccactgcactctagcctgcgtgacagagtgagactgcctcagaaaaaaataaataaataaaaactgtatataattgctctccttctctaatgtatccttttgtactctgtttttattcagcattgtttttgatgcttaatttcgttgctttttttttttttttttttttgagatcaagtcttgctctgtcgcccaggctgtagtgtagtggagccatctcagctcactgcaacctccgcctctcaggttccagtgactccctgcctcagcttcctgagtagctggtatcatagagacacgccaccaggcctagctaatttttgtatttttagtagagatggagtttcaccatgttgtccaggctggtcttgaactccttacctcaagtgatccacccgcctgggcctcccaaagtgctgggattacaggcatgagccaccatgcctggcctgcattaaattttttgtactcattgtgaaaaaggaaatggactcttagacgttccttttttttcttcctctgaattttacagtccagaatggagaagatgatggacggaatcaagctagactgggccaccgcggaagctcttgccttgggttctttacttgctcaaggtaagaattttcttttttttttctgttttttttttgttttttttttttttgagtctcaccctgtcgcccaggctggaatgcagtggtgcgatctcagctcactgcaacctccgcctcccaggttcaagcgattctcctgccccagcctcccaagtagggcgcaccaccatgcccagctaatttttgtatttttagtagagacggggtttcactatgttggtcaggctggtctcgaactcttgacctcgtgttccacccgcctcggcctcccaaagtgctaggattatgggcgtgagccaccgtgcccagccaaggtaagaattttctgtctagctagtagagagtacttttaatcacgtttgctacctgttacctttgcagtttatttgagttataactacctcccattgtgttcattgaccagagaggttctaaagcatgttaatttttctttcctgacaatattacttatttgtagtataagtcatgctgacaaccttcatcagagtatagacataggacagttatgcctgggaaacaaagggctagtgctggatgtactggaaagatagttttctctaaaaattgcagggcacatgatacctctccaytcttatgcaatctcatcttaactatagacttttgaatattggacagcatatattaataactatctgttatyctaaggaaaattctcaggattaagccagtatataagaatttacagtcaccacaccttattattaggttatttatgggaatctgactttttttttcttgcttgcttaaggttttaatgttcgtctaagtggccaagatgttggtcgtggaactttcagtcagaggcatgcaatsgtggtttgccaggagacggatgacacctacatccccctgaaccatatggacccaaatcagaaggggtttctagaggtgagatgtttctatagctgttgtaaaatccaggtgccaacgattacacttccaggattcttagaacaagtaggaaggagtgctggcaactttgggttcagtacttttggaagtaaaggagtgctaaatgggtggatgaggtgggtctgtcaatttggaatgcaagtaacccctagagagtaggctggagctttcttcttctggtgacatatctgtaatcatgtaaatgtcaaatcaatgtgtgttttgtcaactcaaagttgacattatcatctgcatattgctgtaattcattaaagttagtcaaagatatggataagtcagtattccttgcctacttaaggatagcaaaatcgcacatcctcaaggttacctgttccctaaggtatgattggcttgacgaatgtacacataaccgtgtatttctttcttttttttcggagacttaatcttgctctgttgcccaggctggagtgcagtggtgccatcttggctcactgcaacctccacctcccaggctcaggggatcctcatgtttcagcctcccgagtagctgggaccacgggaatgaggtgccattcctggctaatttttttatttttagtagatggaatttcaccatgttgcccaggctggtcttgaactcctggcctcaagcagtccacctgccttggcctcccaaagcactggaagtataggtgtgagccactgcacccagccagatataaccatgtatttctgtgtggcagcctctgtgccctctgtagtgccttaaggatagtagtggagtcttttcatttatttatctcaaacaattattcaagtgtctagcacatgatgtttatgaaaataacttattccttaaggtaagttgagtggcatgtcatcttctttcctactctagccattagtttgagaacatcatcttgagttactgacaccttataaaaaattcacttggtggccgggtgtggtggttcacgcctgtaatcccagcacttcgggaggctgaggtgggcagatcacacggtcaagagatcaagaccatcctggccaaaatggtgaaaccccatctctactaaaaatagaaaaattagctgggtgtggtggcaygcatctgtagtcccagctactcaggaggttgaggcagaagaatcgcttgaacccaggaggcggaggttgcagtgagccgagaacacaccactgcactccagcctggtgacagagcgagactctgtctcaaaaaaaaaaaaaaaaaaagaaaattcacttggcaaaagccacattttaggaagataactgaagggatatggagctcatcttttctttaagttagtccaaaatctacccttggatcaagtcagattgccaaactagatactgaaatgtttagcattcccctacctcagatgaggctttcattgaattgtgctttgatatttattatcagttttgaattttgctattgaaaaagtcccaattaaatgccttgtgtctgttttgtggatactgttgaagatttaatttagtttcattcattcattcattcgttcatttatttatttgagacggagcctcactctgtcacccaggctggagtgcagtggcgtgatctaggctcactgcaacctctgcctcctgggttggagcagttctcctgcttcagcctcccaagtagctgggattatttggcctcccagagtgctgggattacaggcgtgaaccaccacgcctggccgaagatttaatttattatttagacctggcacggtggctcacacctgtaatcccagcactttgggaggccaaggcaggcagatcacttgaggccaggagttcaacactggcctggccaacatggcgaaaccctgtctctactaaaaatacaaaaattagtcgggcatggtggcacacgcctgtaatcccagctactcaggaggttgaggcaggagaattgcttgaacccaggaggcagaggtagtgagcggagatcataccactgccctccagtttgggcaacagagcaagactctgtctcaaataataataagagtaatttattatttaataccatgtcctctatgtgaagaccctgggagaaactcctgcttgatcttggtagtgagagtagctatattttcctgagtagtgatctgccttcattgtctaatagtattgaattttgtaactgaccagcattcccttatcaataatggcttctaggaagggacagaggtcaggcagccttcatgataagtgaataggtccttggggtgtgtttttcccccaacttcgttgtacatctcaatctgtgtgtgtgtgtgtgtgtgtgtgtgtgtgtgtgtgtatgtatgtgacaggtcctcctctgttgcctaggctggagtcccacagtgcaattatagctcactgtagcctccagctcttaggcacaagcaatcgtcccgcctcagcctctcaagtagctgggactacaggcaagcaccaccacgcctggctacttttaaatattttgtagagataggagtctcactgtgatggccagtgtcatcttgaattcctggcctcaagcaatcctcctgccttggcctcccaaagtgctgggattatagatgtgagctgccgtgcccagcctagagggtttttatttttttaagtaaaagctttattgagctataactcatacaattcaacctctcagtgtgtacacttgagcagtttgtagtctattcacagagttgtgtaatcatcaccactatctaattttagaacattttcattaccctagaaagcaagcccatgcccgttagcagtcactgcccaytccttcctccctccagcccctggacaccactcatcgactgtttgtttctattgatctgcctattttggatgtttcatgtgactagaacggtataacatgtggccttttgggactggcttctttgacttggcatcatgctttcaaggtccatccatgcatgcagcatgtatcagtacatccttcttttttttgagaccaagtcttgctctgttgcccaggctggagtgcagtggcgcaacctcggctcactgcaacctcagattcctaggttaaagtggttctcccacctcagcctcccaagtagctgggactgcaggtgtgcgccaccaggccctgctaatttttgaatttgtagcagagacagggtctcgccacattggccaggctgatctcaaacttttgacctcaagtgatcatctcagcctcccaaagtgctgagattacaggtgtgagccaccacactctgcccgtccttcctttttattccaaaataatattctataaagatgtarcttaaacatatatttttttaaaatttgaaagaaacaaaattaccaaaatgttgtgtacagtaaggaactttttctcatctttattttttcttttgagacagggtctcactctgtcacgcaggctggagtgtagtgatgcaatcactgctcactgcagcctcgacctcctgtgtccaagtgatcctcctagctccctttttccatcttgaaccatctgagagctagttgccatcctggtgccccctactgtgtatttccacaaatggggggacatccttctccatcataacacaccaaaatcaggaaatgaacacagacatgactaccatgtatttctcaaaacaagatcaacaatttttttttcttttttttttttaggcagagtctcactctgttgcccaggctggagtgcagtggcacaatctcggctcaatgcaacctccacctcccaggttcaagcaatcctcccacctcagcctcttgaggcctgcatcaccatgctcagctaatttttgtattttttgtagagactgggtttcaccatgttggccaggctggtctcgaactcctgacctcaggtgatcctcctgccttggcctcccaaagtgctgggattatgttttgcatttaattgtaatgtctttttaaccttctcagagataaaatttgtattctgctttttttaatgttaacatatcatgatggttcttttgatttaccatgcaaatacratgttagaataatgattttaaccaaaggtaggactttattttttaactttcctcactttgtttcatgataatttttttcttttttgagacaggatctcactgtgtcacgcaggctggagtgcagtggtgygattatagctcactgtagtttcaacctcctgggctcaagtgatcctcccacctcagcctcccaagtagttgggactacaggcatgtgccaccatgcccagctaatttttgtctgctttttttagagatggggttttgccatgttgcccatgttgatctcaaactcctgtgctcaagcgatcctcccatctcggcctcccaaattgttgggaggccaccacgcccggccacaggtttttgaaaagcttataagacgcagttgtatacctagctccagaagagggtcatctgagaagtatatgtgcttatccttgaagaaactctgtaatacccatattccagcctcttttatcttttcctctctttgtcccaacttttctcatctgcatcactgacaccaagcagcaaatctcttctcaaaagaatgtggtgatgaggccgggcgtggtggctcatgctgtaaccccagcactttggggggccaaggtgggtggatcacctgagctcaggagtttgagaccagcttggccaacatgctgaaaccctgtttctactaaaagtacaaaaattagctgggcatggtggcgggtgcctgtaatcccagctactcaggaggctgaggcaagagaatcacttgaacctgggaggcggaggttgcagtgagccgagatggagccattgcgctccagcctgggcaacaaaagtgaaactccgtctcaaaaagcagaaacaaacaaacaaaaagaatgtggtgatgaacgagagcaaggctccctctccgcaccacctcccttcgataagttcgcaggagcccagtgctctgccgtggccctcacatgcagcgtttccttctcttctctgggattaggtcagcaacagcccmctgtcagaagaggccgtcctgggattygaatatgggatgagcattgagagcccaaagttactgcccctgtgggaggcacagtttggcgatttcttcaatggtgcccagatcatctttgacacattcatctctggaggttggtgtcagcgtatagggtgggtacaggtgggggtccctgcgtggccccagcctcgtggggacaaatgaatgaaaagkggccactgctgccttgagactcccgtgtgcggcggcgcctccagggagttggggtcaccctgttatgacgggagtgtggccactgtcaggttaatgtgttactgggacaaaaacccaagctctctctcagcaggagcactggtgccacccagcacctgtgcycaggggtcagtagggccatgaaaacccgctccagtgtctgaaagcttccgaarcagtacctgctcaccgtaaaaattagaagtaattgaagtaaacgtctaagtcttctccccagaccctgaatcccattttccagggatgcccactcttgggttttgaatacctgccttaaatctttcctatagttatgcttctctgtaacattttcactgggaggaagaaaagtgcctgagggcctggacttctgacttgtccagagactgttctgtcgtgcccaccaccccctgtttcaagacagtggcctgtgttgtcagctgggctgtgagagctgcccattctttttcttttctttttttttttttttgagacggagtctcgctctgtcacccaggctggagtgcagtggtgcgatctcggctcactgcaagctccgcctactgggtttgcacgattctcctgcctcagcctcccgagtagctgggactacataggcgctggtcaccacgcccggctaattttttgtatttttagtagagatggggtttcaccgtgtcagccgggatggtctcgttctcctgacctcatgatccacccacctcagcctcccaaagtggtgggattacgggtgtgagccactgtgcccggccgggagctgcccattcttgtaagagtggtgcctgcggtggtattggagcggcatgtgctgtccaggaagctgggaacgttcccctttgagtttgtcttccactcgtaaaagcccagggcctgtgccgtgataggttatggctttcttttttgagacggtgtctcactctgtccctcaggctggtgtgcagtggcatgatctcaggacactgcaacctctatctcccggggtcaagtgattctcccacctcagcctcccgagtagctgsgactacagacatgtgccactacagctggctaatttttgtatttttagtagagacggggtttcaccatgttggccaggctggtctcgaacacctgacctcaagtgatctatccgcctcagcctcccaaagtgctgggattacaggtgtgagccaccgtgcctagcccatgataggttttcattcaatgaaatggacatttccctaagtatagcataacagttctagaaggtgcatgtaatgaaagcagttttggggggccaggcagaaaactaacattgatttccccagctgagtcgtgtcaggccactttgtccccgcttcgtagagctcttactccccacgtggtacttttccaggagaggccaagtggctcctacaaagcggcatygtcatcctccttccacatggctacgatggggctgggccagamcactcatcctgtcgaatagagcgtttcctgcaggtaagggtaacgtcttccggagtcaatgaatcattttcctgcttcctagagcttttctacctcctgcggatagcttaacgcccacctaactgtaacacagcttagtatttgagtgaaacagatttgatgcaatgtcaattttctttggaaacgtaatgcctcaggtataattgtatcacggttttatggcaattaaagttctcttgtgccaggatcagcagttcttataccaggctgatcatcagaatcccccagagagcttttttatttttatttttttttgagatggggtctcgctctgttgcccaggctggagtgcagtggtgcgatcttggctcactgcaacctctgcctcttgggttcaagcgattctcctggctcaccctccaagtagctgggaccacaggcgtatgccaccatgcctggctaatttttgtgtttttagtagagattggtgttcttccatgttggccaggctagtctgaaactcctggcctcaagtgatctacccgcctcagcttcccaaagtgctgggattacaggtgtgagccaccaaccctggctggttattaaaacatttgaaatatcctgccagaaatagccattgtcctcatttggtgtgaatcattacaaatgtctccttttgcatgttatttccttatagtttattatgaagactttcagatatacagaaaagttggaaagaatttactgtgaatactcatatgcccactccctagaattcaccattattttttattatacttgttttttcacatatctattcatctgtcattctggtatccttcaatgcatcttatgttttgattcatttcaaaataaatggagacattagctgggtgcagtggctcacacctgtaatcctggcactttgggagaccaaggcaggtggatcacttgagatcaggagtttgagaccagcctggctaacacagagaaaccccatctttactaaaaatacaaaaattagccatgtgtagtggctcatccctgtaatccaagctactcgggagcctgaggcaggagaatcgcttgaacccaggaggcagaggttgcagtgagatcacgccactgcactccagcctggacaacaaagactctgtctcaaaaaattaaataaataaataaataattaataaatagagatatcaatacatgtcaccccaagtacttcagcatgcatatcgttaatgattttggcatgyrtgcagctaaaatgtataaacagatgatagcttaatagataggtagacagaacaacagatagatggatagttacattaatgatgacatcgagaattttatttaaaaagagattagagtaatggtagataaactaaagcatgacatgtgaaatgcaaaactactagttgttgaagaaacagaggaaatgagtaggtgggggatacagtttcggagtcatcggccactagatgacattgacagtcatgagtctggaagaagtcatcgaagcagcgagcacagtggaggagagaaggtgcctgagctctgggccctgggatagtccaacctcagaggatgcagagaagaagaagaagtgagatgaagaaggagcaaccagtgaggtgggaggaagatcttagaaagcaagcgaaggaaacatatcagggaagagggagtgtcagtgtcaattaagatgaggagtgaagtaatcccagcactttgagaggccgaggtgggaggatcacttgagcccaggagtttgagaccagcttgggcaacatagtgagaccctgtctctactaaaaataaataaataaataaatagatgaggcataagaatgaaccactgaatttagaaatcaagagtccatttgttggttgatgactgcggttttgatggagtggtagggacaaaagtctgtctgggacatattaaggactatctagagcaacttgtccaacctgtgtccatggaccacatgcggctcagaacagctttgaatgtagcccaatacaggctgggcgtggtggctcactcctgtaatcccagcactttgggaggccgaggcgggcggatcatgaggtcaggagatgaagaccatcctggctaacacggtgaaacyctgtgtctactaaaaatacaaaaaattagccgggcacggtggcaggcacctgtagtcccagctacttgggaggctgaggcaggggaatggtgtgaacctgggaggcggagcttgcagtgagctgagattgcgccatgcactccagcctgggtgacagagygagactctgtctccagaaaaaagaatgtggtccaatacaaattcataaactttcttaaaacattayttgtgattttttttttttaccttattagccattgttagtgttagtgtattttatgtgtggcacaagacaattcttcttcttccggtgtggctcaggtaagccaaaagatcggacacccctgattcctgattctagagaaaggaaagtgtatttatttaaacatttttaattgacaaatgtacaattgtatatatgaatagtataaaatgtgatgttttgatacagctatacattgtgaactgattgaatcaagctaattaccagacccgtcacctcacatactcaccatttttggggaagagaacatttaaaatctatcctcttagtaattttcaggtatataatacgttaactacagttaccatcctgtacagtagatctccagaactyattcaagggaggaaagttggcctagcatggtggctcacacctgtaatcccagcactttkggaggccaaggtgggtggatatcttgctcaggagtttgagaccagcctgggyaacatggtgagaccccatttctgctaaaaataaaactaaaaaaattagctgggtgggtggtggtgcgtgcccataatcctcactacttgggaggctgaggtgggaggatcacttgagcctgggaggcggaggttgtagtgagctgaggttgcaccactgcattccagcctgggcaagagagccagaccctgtctcaaaaaaaaaaaaaaaaaaaagggaggaacatcaacttaactcttttgaggagtattgctgtaaatagaacaagaaaatgagacagtagctggtgggaaaatttgtgtcaagagttccttttgtgttttcttttatttttgtgatggcatcttgctctgtcacccaggctgtagtgcaatgctgcagtcttggctctctgcaacctctgcctcccaggttcaagcaattctcctgcctcagcctcccgagtagctgggattataggcttgtgccacgatgcccggctaatttttgtatttttagtagagatggggtttcaccatgttgaccaggctgctcttgaacccctgacctcatgtgatcctcccaccttggcctcccaaagtgctaggatttcaggcatgggccaccgcgccaggcctttgttttgtgttaaaggtaggaaataaggcctgtttggtgataggcatgatccagtagacaagaagagaatggtgatgtaggggtgctgatagaataactgagtgatttccttgcattggtaaaatggggtgggctctagtacatgatggattaaattagctttagacagcagcatggttggtggcaataaatggaaggcagagaagatgagtgcaagtgagaatgtgtgtgtagatggtctgaggacatgctgttaggtcattagctgagagtggtgatgcaggaggaggtcctgagtttaaaggtgtgaattagtcacctgggaaagaaggagaatgagtgagttagggaaatagagtttaagagtctaaggtcactaagggcccatctcagactgttggtcaggattctaaagtaagaccattggtgtgattttgtgttgtctccagctactttctctgcagacatggaacaggcagaaagtggggattaactaggtwtatgggttggagtgaagggtcatgggaatcaagggtgtatgcaaaaagaagatgatcatgattgaggccaggcatggtggctcatgcctgtaatcccagcactttgggtggctgaggcgggaggatcgcttgaacccaggagtttgagaccagcctgggcatcataacaagaccccatctctacaaaaatattaaaattagtcaggtgtggtagcaggcacctgtagtcccagctacttgggaggctctggtgggaggattgcttttgagtccagagtttggggttacagtgtgctatgatcatgccactgaactccagcctgggtgagagaacgagactctgtaacaacaacaaaaataattgtccagattttgtcaactctctttctttcctttcactgcctttggggaagggttaggagttatgcctcagctttctgtcccaccaggatcttctgagatttaacttccttgccctcaatttttcaacctttctattagctgcttttgatttttgtcttaaagcacgcgtgcacacacacacacacacaatcgttttattacattaggaaagtgagattctgatagtgcttccttcccctatcttaaccctgtagtaatcagaatatgtattttttttaaaaaagtcctttccagattatctttgctatcagccgtgtttgggaacaattgtgttagatgacacagaattgggccagtggagaaagccatcagagctctcctttggttaataccgcaccgttcataaattcacctgctgatatttttctgtaatgttgggcaatagcttttctgctataatcaagaacacctgtgtttccctttggccagccyattgtcactacgactgaaatagatgatctgaacattcttctcctttcttgccacttctctcccagatgtgtgacagtgcggaagagggggtggacggagacactgtgaacatgtttgtggttcacccaacaactcctgcacagtatttccacttgcttaggagacagatggtccggaacttcagaaaaccactcattgttgcttcccctaagatgttactcaggctcccggtaagcagaaggtggtgaataagccttcctccttttgtcattttttgcactccatttttccctattttccatatctaattatatttaaattacagaaacacctttttagtttcaactgactttgctactttcattttttttgttgttttttgagacgcagtcttgctctgtcgcccaggctggagtgcaatggtgcaatctcggcccgttgcaacctctgactcctgggtttaagcgattctcccgcctcagcctcccaagtagctgagattacaggcatgtgccaccacacccagctaatttttgtatttttagtagagatggggtttcgccatcttggccagactagtctctaactcttgacctcaggtgattcgcccgcctcggcctcccaaagtgctgggattgcaggcgtgagtcaccacacccagcctgctttcattttttaaacagccttttaagactacctggaaagataggtggttttctgtcaattgtaatgaaggacagggatagcagatgttatactagtgccctcctgagcagaaatactatttagaaaagcttttaggctattaggctgggcatggtggctcatgcctataattccaggactttgggaggcctaggcaagaggattgcttgagcccaggagtttgagagcaacctgggcaacattgcaagaccccatctctgaaaaaaaaaattggccggtgtggtggctcacacctgtgctgtcagctgctcaggaggctgagatgggagcatcttttgagccctggagttcaaggctgcagtgacgtatgaccatgccactacactccagcctgggcaacacagcaagacactgtctgaaaaagaaaagaaaaagttttaaagcccatatggtctaagcactattttttttgatagcagcaatttgggaattcaaagtattttgttgaaaatgagtggcattatttgtcattctttttttttttttctttttgagatggagtcttgtgctgttgcccaggctagagtgcagtggcgtgaaatttatcattttatcatttaacacatacgtaggtttacctatttatctgttaagtgtacattgtttttcaaatcacaaaaatatgctagtttycaaatagaaatgttcaaaataataaatactactaagcatatatttatcccatctgctatacttttttcaggttcatatgagttttaattagaattagtattaaatttttttttttttttgagacggagtctcactctatcacccaggctggattgcagtggtgctgtctcagctcactgcaacctccaactcccgggttcaagcgattctcctgcctcagcctcctgagtagctgggattataggcactcgccaccatgcctggctaatttttgtatttttagtagagatggggttttactgtgttggacaggtggtctggaactcctggcctcatgtgatccacctgccttggcctccygaagtgctgggattacaggcatgagccaccgtgcccggccgggagtattacagtttttacatttatttggatatgactgctgaggtgaaataagacgtttagaatttggccattcaagaatatcttgtgctgctcacaaaggttcgagagtgtatatttggaattgaggggtactgaagaaaagctgcgagtgatttgcttccaccccttggttggttggttggttggttggttggttggttggttttttgagacggagtctcgctctgtcgcccaggctggagtgcagtgctgcgatctcggctcactgcaagctccgcctcccgggttcaggccattctcctgcctcagcctcctgagtagttgggacyacaggcgcctgccaccacgacctgctaattttttgtatttttagtggagacagggtttcactgtgttagccaggatggtctcgatctcctgacctcgtgatccgcccgcctcggcctcccaaagtgctgggattacaggcatgagccaccgctcccggcctgtttgtttgtttcttgagatggagtgtcgctctgttgcccaggctggagtggagagcgcgatcttggctcgctcactgcaaactccgcctcccaggctcaagcaattctccagcctcagcctccccagtagctgggattacaggcttgtaccaccatgctcagctaatttttgtatttttagtagagacagagtttcatcatgttggccaggctggtctcgaactcctggcctcaagtgattgggctgactcggcctcccaaaatgctgggattataggtgtgagccactatgcctggcctcgttgttttaagcagtttttagcattcagaggggagtagggaggtactcattctcaggggcgatattttcatggccctaaaatcagtgcctccttaaactttttgcactaggtaccttacttgactcaccctagcctggccctgggagtcagtatctagtcaatagccaggaaatggatttcagtagtcttaccaatagcagccattcatttttagttcacttatagtggtctaccggttctttctcacccagtgtttcgcaaacaaccttatatatttckaggtgacctcataagcctggaagcatcaccaaacatttaggaagagttaatgcaatgcctttagcaccatttttctgatggggctcttttttttcttttttttgttattttgagagtctcgctttgttgcctaggctggcatgcagcggcataatcttagctcactgcaacctttgcctactgagttcaagcaaggcctcagcctccgacgtagctgggactattaggtgtgtgccaccacacccagcaattttttttttttttttttttgagacagagttttgctctgtcacccaggctggagtgcaatggcacaatatcagctcactgcaacctccatttcctgggttcaagcaattctcctgcctcagcctcccaagtagctgggattacaggcatgcaccaccatgcctggctcatttttgtatttttaatagagacgaggtttcgccatgtgggccaggctggtctcaaactcctggcctcaagcaatatgcctgcctcggcctcccaaagtgctgggattacaggcatgagccaccacgtctggcctgattcttaaaattatgtcgtggcaccaggcaaaaggtaatcttttcttaaattcattttttaatttttattgtcatccttgtgcaggggccatgctaatcttctctgcagtgttctaattttagtatatgtgctgccaaaatgagcacagaaggcaatctttttactttttttttttcttgagatggagtttcctgttacccaggctatagtgcaatggtgtgatctcagcccactgcaacctcyggctcccaggttcaagcaattcttgtgtctcactctccccagtagctgggattacaggcatgcaccaccacgcccagctaacttttataattttagtagagacggggtttcaccatgttggccaggctggtcttgaactcctgatatcaggcaatctgtccacctctgcctcccaaagtgctgggattataggcatgagccaccgcgcccagtctttttcttttctttttttttttttgagacaaggtctggctctgtcacccaggctggagtgcagtggcatgatcatggctcattgcaacttcygcctcccaagctcaaacttctagcctcccacctcatcctcctgagtagctgggactacaggcatgcgctaccacacctggccaatttttgtatttttttgtagagatggggtttcaccatcttgcctaggctggtctcaaacttgtgagttcaagcaatccacctgcctcagcctcccaaagttctaggatcacaggctggagccactgcaactggccagttttggtttgttttgtttcggatgaggtcttgctctgttgcccaggctggagtgcaatggtgcgatttcagctcactgcaccctctgccttctgggttcaagcaattctcccgcctcagcctcctgagtagctgggattacagacacccgccatcatgcccagctaatttttgtatttttatatttttgtagagatgggatttcaccatgttggccaggctggtctcaaactcctgacctcaggtgatccgcccaccttggcctcccaaagtgctrggattacaggcatgagccacggcaccttttttttttttttttttttttttaatagaggcarggcaccagtggggatggtggagtagggggtgcaaagggagtctcgctatgttgcccaggcgggtcttgaactggcctccagcgatcctcctgccttggcctcccaaagtgttaagattccaaaaggctatcttmtgtaacctcagaaacatagttttaccctgaagtatacagaactgatattttttggcaaggcattgcgtctattaggacatgggtctccttgcartgctaggctagaactttggtactcgtgtttgatagcggcccttgtaagtgacagcatcacctctttctgttgcttgctggrtgtgtggcctcttctccctcrtaggcagccgtgtcaactcttcaagaaatggcaccaggaacaacatttaacccggtcattggtgattcatctgtggatccaaaaaagtaagatatstatctctgttttcatattctgtggcagaattttaattaatgggaaaagtagttcacattaagagatcacaggtgatgcagawatttatttatttatttatttatttatttatttatttatttatttttgagactgagtctggctctattgcccaggctggagggcagtggtgcaatctcagctctatgcaacstccgcctcccggattcaagtgattcttgtgcttcagcctcccaagtagctgggattacaggtgcccgccaccacaccctgctaatttttttatttttagtagagatggggtttcaccatgttggccaggctggtctygaactcctgacctcaggttatccacccacctcagcctctgaaagtgctgggattgcaggcgtgagccaccatgcctggcctcctctatcctaagtcctttaagtcagtggagtatgagttaagtgtgggtgggaaagtggacyttgtaggygcatgttgctgaagaagggtccccaggaatagcctgtgactgaactcggctgcagagacccccaccaccttgttcatgaggactttaaatctgcactgtctcccgtttcttctgacataattctcttttttttttttttttgaggttgagtcttgctctgtcgccyaggctrgagtgcagtggcacgatcttggctcactgcaagctccgcctcccgggttcacgccattctcctgcctyagcctcccgagtagctgggactacaggygcccrccagtacrcccggctaattttttgtatttttagtagagacrgggtttcaccgtgttagccrggayggtctygatttcctgacctcgtgatcygcccgcctyggcctcccaaagtgctgrgattacaggcgtgagcyactgcacctggcctcttctgacgtaattcttactttaaaaaatttctcccccaccctattgttccttttctgtccaacagggttaagaccctcgtgttctgctccggcaaacatttctactccctggtgaaacaaagagaatctctgggggccaagaagcatgactttgccatcatccgagtagaggaactctgccccttcccgttggattctttacagcaagagatgagcaaatacaaacatgttaaaggtaagaggttgttctcatttgggttttgatgttcagatacccaaaacccatttcagctcttttaaatgaaaagatgtggtgggggttattagaaaattgaatcttgggccgggcgcggtggctcacacctgtaatcctggcactttgggaagctggggtgggtggatcacaaggtcaggagattgagaccatcctggctaacacggtgaacccccgtctctactaaaagtacaaaaaattagccgggcgtggtggcgggcgcctgtagtcccagctccttgggagcctgaggcagaagaattgcttgaacctgggagacggaggttgcagtgagccgagattgtgccactgcactccagcctgggcacaagactctgtgtcaaaaaaagacacaaaaacatgaaaatttggtacaggcggggcgcggtggctcacgcctgtagtcccagcactttgggaggccgaggtgggcggatcacgaggtcaggagatcaagaccatcctggctaacacagtgaaaccccgtctctactgaaaatacaaaaaaattagccgggcgtggtrgcgggcgcctgtagtcccagctacttgggaggctgaggcaggagaatggcgtgaacccgggaggcggagcttgcagtgagccgagattgcgctactgcactccagcctgggcgacagagcgagactccgtctcaaaaaaaaaaaaaaaaaagaaagaaaatttggtacatatatggggcctgtccgagggtcacgggggaggagggagagcatcaggcagaacagctaatggatgctgggttaatacctaggtgatggatgatctgaggagcaaacctccgtggcacacatttacctgcataacaaacctgcacatcctgcatgtgtaccccagaacttaaaaaagaaaaaagaaaatgcattgaatacacctaaactacaaaacacagcttagcctagcctgccttaaacatgctcagaacactcacattagcttatcgttgggcacaatcatttaacacaaaatctattacatttcataatgaagtgttgaatatctcagataatttatcgaatactgtaccaacagtgaaaaacagaactgttgtatgggtacttgaagtacagtttctagtgaatgtgaatccctttcacaccatcgtaaagttgaaaactccatcgtaggtgggatcatagtaaattggggaccgtctgcatgtgtctacttgaggtgctgaaagaatttcttctctcatagatcatatttggagtcaggaggaacctcagaacatgggtccgtggtcgtttgtttctccaaggtttgaaaagcagctggcctgcaaggtaatcacacgttttctctggtagtgttttgtgttttgtgtgcatgttgtttttcttttctttctttctttcttttttttttttgagacagagtctcactctgttgcccaggctggagtrcagtggygcaatctcagctcactgcaagctccgccccccgggttcacgccattctcctgcctcagcctcccaagtagctgggactacaggcgcccgccaccacacccagctaaattttttttgtatttttagtagagacggggtttcaccatgttagccaggatrgtctcaatctcctgacctcgtgatccgcccacctcggcctcccaaagcgctgggattacaggcattgaggcacggagccctgtccctctaatctcttctgcgtaactcattatttgaaagaggtgatttatggttaaacaagctaagagaaatacatgcactgtcttgttggaactaagcagagctctgatctagtcaaaatgtcattttatttcttctctgctgcacttatagctccgtctggtgggccggccccctttgccagtacccgctgtaggaattggcacagttcacttgcaccagcatgaagatatcctcgccaagaccttcgcttgatgatgacttttgaagaaacactatttctctttaagaaaatggccattaaggccgggtggggtggcacatgcctgtaatcccagcactttgggaggccaaggctggtggatcacctgaggtcaggagttcgagaccagcctggccaacacggtgaaaccccgcctctactaaaaatacaaaaaatagccgggtgtggtggtgggcacctgtgatcccagcttcctgggaggctgaggcaagagaatcgcttgaatctgggaggcggaggttgcagtgagccaggatcacaccattgctgtccagcctgggtgacagagcaagactgcgtttcaaaaaaaaaaaaaaaaaaaacccattaaaagaggcctccttcctccactctctcaacccctctgttgggtaacatgaaaagactgtattcctctaagatgttgggattgatatacgtgatttaatctgcaataggtggaataaccaggggaactggttatgaatatgtgaatgcaaccagcaaatttatccttgaaggtgtgatggtagaaataggaaaacaacaaaagaaaaacaataacaaaaaaagaaagtgtgatggctgggtgcagtggctcacgcctgtaatcccagcactttgggaggcttaggcggctggatcacctgaggtcaggagttcaagaccagcctggtcaacgtggtgaaacgccgtttctactaaaaatatgaaaattagttgggtgtggtggcatgcgcttgtagtctcagctactccggaggctgaggcaggagaattgcttgaacctggaaggcagaggttgcagtgagccgaaatggcgccactgtactccaacctgggcgacagagcaagactccatctcataaattaaaaggaaagtatgatagtgttatggattttagctctgagtgagctggaaaactaggtcattatctagatgatttcagacttgaccctaattgaccatatatgaccaggaaacacttctgagtttacagctccgtggagatgacctcaacactgcctcttgatttgtttgatgcatgtcactttcattaattttccccctcctttttgaaagtcctgtggcagtactaatattttcattttatgtaatctctggtgctgctttccagtcactgtatgaagtgtctccccaacactagcaaatctaggtcctactaaatacaaatctctgggtggatgatcttctagtactgtatttttaaattaaggagttttagttataatgaaattgatttgtagtctgttttgccgtaaacttgtttttctttaaattgttcttacagtgatatcttactatttttaactgtctggggtttctgatatggggatttcagcccctggttaatcagtcttgtccctacaagtccctgatgcagtatgtttatttgtgatgtttaaagaacatttcttggctgggcgctgcggcttgcgcctgtaatctcagcactttgggaggctgaggtgggtggatcacctgaggttgggagttcgagaccagcctgacaaaacatagtgaaaccccgtctctactaaaaatacaaaaattagctgggcgtggtggtgggtgtctgtaatcccagctattcgggaggctgaggcaggagaatcgcttgaacccgggaggtggaggttgcagtgagctgagatcctgccactgcactccagtctgggtgacagagcaagactccatctcaaaaaataaataaatagaaagagagagagaggaaaaaaaaagaaaagaacacttctttatttgagggactttcccaacaccaggtgcttggggatttcttagagatcaccaaccgactccctcactgtgaaattaaaccaagtactggaaacgtaactaaacagcgaaccatgtagcttcacctgactcagtgctgggggcctctaccatctactgtgcttgtgtcatgatgctttttctctgaagtggtgtgggaagtaccaggggactggcagaagcccaggccctctctacttttaccagcaactgatcatgtctttcagaatccatgtacatataggctgttctagccacagtggtagatttatgattcacatccgaaagtgtgccttagttatcaatttaacatttctctagtattcatatcccttttcttaccatatacctcagtgtatccttcctgtgtcaagccttataaatcatgtaatttagtgccactcatgtaaatcagtaaaatcacaaaggtctatttaatgaaaacgatttaccaatgttgtttttttttaacaagaaaaaaaataaaagcacattgtcattttttttcctcaggactcctggacttcttgaattaaaagatttcaaaagtctaagcacaaaaatgagatggaagattagatctttgtaaaaggttagtttaggctgggcgtggtagctcacgcctgtaatcacagcactgtgggaggtcaagatgggtgcatcacctgaggtcaggcattcgagactagcctggccaacatggctaaaccccgtctcttactaaaaatataaaaattagcagggcatggtggtgcatgcctgtaatcccagctacttgggaggctgaggcaggagaatcacttgatctcggggggcggaggttgcagtgagccgagattgcaccactgcactccagcctggaccacagagggagaatccgtctcaaaaaacaaaaacaaaccagttaactataggggccaggtgccatggttcatgcctgtaatcccagcactttggaaggctgagatgggaggatcgcttgacgttaggagtttgagacaagcttggccaccatggtgaaatcccatctctagtaaaaataaaaaaattagctgggcttggtggcactcgcctgtaatcctagctactcgggaggctgaggcaggagaatcacttgaacctgggaggtggaggttgcactgagccgagatcgtgccgctgaactgcagcctgggcaacacagcgagactctgtctcaaaaaaaaaaaaaaagttaactataggaggtgattccatgatttttttgtcacctatgcatttcggcatctttcagttgtttaaggcagttctctacagaagagcccatttgccgttgtgcttcctgagtgcagaaggcaccctcctgtcttcctcctctgatacnnnnnnnnnnnnnnnnnnnntagctgggactacaggtacgtgccacagccagttttttgtatttttagcagagatggcgtttcaccatgttagctaggatggccttgatctcctgacctcatgatccgcccaccttggcctcccaaagtgctgggtttacaggcgtgagccactgtgactggtggatctctccaaatttctaattttacacctcacagtctgttcatggtttctttttatgtcttctctaactcgagtcatgaaatgtgtcttctgttggcttaacctttctactctcaatcactactgcaacatggatcagcattttacattcccttgcagggagggaccatttgaggaattccaaatcaaatactcattactttttttcccttaaaaatttagtaggccaggcgtggtggctcatgcttgtaatcccggcactttgggaggctaaggtgggcagatcacctgaggtcaggagtttgagaccagtgtggccaacctggtgaaagcctgtttctactaaaaaatacaaagatcagccaggcgttgttgcgcatgcttgtagtcccagctacttgagaggctgaggcaggaaaatcacttgaactactccagcatgggcaacagagcaagactccatctcaaaaaaaaaaaaaaaaagtgtaaaagggatagtatttttattgtcaaccaaggaattattaaaaaataataaaatttcaaaggtaatatagtcagtctaaagatgtctaagcttcatagtatttttcccaaatagcatgtgtatgcaagacacagaaaagctaagcaaaatagttattattctcactaaaaaattttttattttactaagaataatttgtcatttcagacaaaactaacatttttccatggttgctactatttctacttcttgaatacccaatttaaggtttagtcctcattgaacattaaaatggcatagatagatataaataatagatataaataagatacaagtataaagttactaaggttttctttttttcttttgagaccaaatctcgctctgtggcccaggctggagggcagtggtgcgatcctggctcactgcaacctccgcctttctagttcaagtgattctgtgtcagcgttaggccgctttggcctcttaaagtgctgagattacaggcgtgagccaccacacctggcccttttacaaaattgaagaaatgaaagggttaccccgcccaaaaaaaaaaaaaaaaagattacactggaaggaagtcacagattaaggatcaagactgttgagtctttaggttccaaaagcttcacctacatttttcttatatgtatttggatattaaagaaaataagttacatatacaccatggaatattattcagccatttaaaaaaaataaaatcttgtcatttgtagcaacatggatggaactggaagtcatcatgttacgtgaagtaagtcaagcacagaaagacaaaacttggatattctcactcacatgggagcttaaaaagtggattttggccaggcgcggtagctcatgcctgtaatcccagccccttgggaggccaaggcgggtggatcacctgagctcaggagtttgagaccagcctggccaagagggtgaaaccctgtctctactaaaaatacaaaaaattagccgggcgtggtagcggatgcctgtaaatcccagctactggggaggctgaggcaggagaattgcttgaacccaggaggcagaggttgcagtgagctgagatcatgccatttcactccagccaaggtgacaagagcaagactccgtctcaaaaaaaaaaaaaaaaaagtggatctcatgaagatagagagtagatcggtggtatcagaggtcgggaggggaaggggtggggtgatgaaaagaagtagattaatgggtacaaatatatggttggatagaagaaataagacctactgttagatggatcggtaggtgaccatagtttaatcagtaggtgaccatagtttacaatatctactatacattgtgaaatagctagaggagaattcaaatggttctatcataaagaaaagacaaatatttaaggtgatggatatcccaaatacaccaatttgatatttacaaattatatgaatgtattaaattatcacatgcaccttgaaagtatgtacatctagcattcatcaattaaaaaaccccaaaagctcttactctatagaaatagtaattcattgtcattttatttaaatctgataaagcacaatctaaagcagactcctttcctcactgctaattgcaattttatttatttatttatttatttagagacggagtctcactctgtcccccaggctggagtgcactggcacgattacggctcactgcagccgcgaattcctgggctcaagtgatcgtcccatctcagcctcccaagtagctagaagtaacgtgcctgccactatgccctgctaattaaacaaattttttttcttgtagagacgacgtcttgctatattgcccaggctggtcacaaactcctggccttaaatgattttcccgccttgtcctcccaaagtgctgggattacaggcatgagccaccacacccagtctaatttttaaaaattatttaagtcagaccagtggcgtgtacctgtagtcccagcaactccagaggcttaggtgagaagatcctttgcgccaaggactttgaggctgcagtgagctatgatctcaccactgcactccagcttgggtgacagagtgagatccatactgtgaaaaataataatacataaaaaattaaacagggcgcacagtggcccatgcctgtaatcccagctctttgggaggataaggaaggcagagtgcttgaactggggaggcataggttgcaatgagccgatacagtgccacttcacttcagcctgggtgacagagtgagaccctgtctcaagaaaaaaaaaaagtatttatattactttagtgtcgtgtccctgttttctttgactcatatggggatccagctaaaattgaactgaacaccagaaatgaccttttaagagtaaaatggtatttcatcaataaatactttattggacatatagtccctatattacatttttatggaccttagaaatacacagaagtaaaagataaaatgggttgcccactgtcctcaatgggctaacaatctatttgagaagacaaagcatttaatacatagagacattttcttgttggatgtgctaaaacaatgaaagatcaaggaggtagacttgagagtctggatggatgtagattaggtggcacattgcagttaaacaaggaaaagccctaggtggcatggcatgtagt

SEQ ID NO: 95224 - DNA, 51982 bp, Homo sapiens
  misc_feature (1)...(51982): n = A,T,C or G
aaggcagttctctacagaagagcccatttgccgttgtgcttcctgagtgcagaaggcaccctcctgtcttcctcctctgatacnnnnnnnnnnnnnnnnnnnntagctgggactacaggtacgtgccacagccagttttttgtatttttagcagagatggcgtttcaccatgttagctaggatggccttgatctcctgacctcatgatccgcccaccttggcctcccaaagtgctgggtttacaggcgtgagccactgtgactggtggatctctccaaatttctaattttacacctcacagtctgttcatggtttctttttatgtcttctctaactcgagtcatgaaatgtgtcttctgttggcttaacctttctactctcaatcactactgcaacatggatcagcattttacattcccttgcagggagggaccatttgaggaattccaaatcaaatactcattactttttttcccttaaaaatttagtaggccaggcgtggtggctcatgcttgtaatcccggcactttgggaggctaaggtgggcagatcacctgaggtcaggagtttgagaccagtgtggccaacctggtgaaagcctgtttctactaaaaaatacaaagatcagccaggcgttgttgcgcatgcttgtagtcccagctacttgagaggctgaggcaggaaaatcacttgaactactccagcatgggcaacagagcaagactccatctcaaaaaaaaaaaaaaaaagtgtaaaagggatagtatttttattgtcaaccaaggaattattaaaaaataataaaatttcaaaggtaatatagtcagtctaaagatgtctaagcttcatagtatttttcccaaatagcatgtgtatgcaagacacagaaaagctaagcaaaatagttattattctcactaaaaaattttttattttactaagaataatttgtcatttcagacaaaactaacatttttccatggttgctactatttctacttcttgaatacccaatttaaggtttagtcctcattgaacattaaaatggcatagatagatataaataatagatataaataagatacaagtataaagttactaaggttttctttttttcttttgagaccaaatctcgctctgtggcccaggctggagggcagtggtgcgatcctggctcactgcaacctccgcctttctagttcaagtgattctgtgtcagcgttaggccgctttggcctcttaaagtgctgagattacaggcgtgagccaccacacctggcccttttacaaaattgaagaaatgaaagggttaccccgcccaaaaaaaaaaaaaaaaagattacactggaaggaagtcacagattaaggatcaagactgttgagtctttaggttccaaaagcttcacctacatttttcttatatgtatttggatattaaagaaaataagttacatatacaccatggaatattattcagccatttaaaaaaaataaaatcttgtcatttgtagcaacatggatggaactggaagtcatcatgttacgtgaagtaagtcaagcacagaaagacaaaacttggatattctcactcacatgggagcttaaaaagtggattttggccaggcgcggtagctcatgcctgtaatcccagccccttgggaggccaaggcgggtggatcacctgagctcaggagtttgagaccagcctggccaagagggtgaaaccctgtctctactaaaaatacaaaaaattagccgggcgtggtagcggatgcctgtaaatcccagctactggggaggctgaggcaggagaattgcttgaacccaggaggcagaggttgcagtgagctgagatcatgccatttcactccagccaaggtgacaagagcaagactccgtctcaaaaaaaaaaaaaaaaaagtggatctcatgaagatagagagtagatcggtggtatcagaggtcgggaggggaaggggtggggtgatgaaaagaagtagattaatgggtacaaatatatggttggatagaagaaataagacctactgttagatggatcggtaggtgaccatagtttaatcagtaggtgaccatagtttacaatatctactatacattgtgaaatagctagaggagaattcaaatggttctatcataaagaaaagacaaatatttaaggtgatggatatcccaaatacaccaatttgatatttacaaattatatgaatgtattaaattatcacatgcaccttgaaagtatgtacatctagcattcatcaattaaaaaaccccaaaagctcttactctatagaaatagtaattcattgtcattttatttaaatctgataaagcacaatctaaagcagactcctttcctcactgctaattgcaattttatttatttatttatttatttagagacggagtctcactctgtcccccaggctggagtgcactggcacgattacggctcactgcagccgcgaattcctgggctcaagtgatcgtcccatctcagcctcccaagtagctagaagtaacgtgcctgccactatgccctgctaattaaacaaattttttttcttgtagagacgacgtcttgctatattgcccaggctggtcacaaactcctggccttaaatgattttcccgccttgtcctcccaaagtgctgggattacaggcatgagccaccacacccagtctaatttttaaaaattatttaagtcagaccagtggcgtgtacctgtagtcccagcaactccagaggcttaggtgagaagatcctttgcgccaaggactttgaggctgcagtgagctatgatctcaccactgcactccagcttgggtgacagagtgagatccatactgtgaaaaataataatacataaaaaattaaacagggcgcacagtggcccatgcctgtaatcccagctctttgggaggataaggaaggcagagtgcttgaactggggaggcataggttgcaatgagccgatacagtgccacttcacttcagcctgggtgacagagtgagaccctgtctcaagaaaaaaaaaaagtatttatattactttagtgtcgtgtccctgttttctttgactcatatggggatccagctaaaattgaactgaacaccagaaatgaccttttaagagtaaaatggtatttcatcaataaatactttattggacatatagtccctatattacatttttatggaccttagaaatacacagaagtaaaagataaaatgggttgcccactgtcctcaatgggctaacaatctatttgagaagacaaagcatttaatacatagagacattttcttgttggatgtgctaaaacaatgaaagatcaaggaggtagacttgagagtctggatggatgtagattaggtggcacattgcagttaaacaaggaaaagccctaggtggcatggcatgtagtggtagaaagaatggtggaaggggccaggagcagtggctcatgtgtaatcccagcactttgggaggctaaggcaggcagatcacttgaggtcagcagttcaagaccagcctggccaacatggtgaaaccccgtctctactaaaaatacaaacttagccaggcagggtggcatgtgcctgtaatctgagctgctcaggaggctgaggcatgagaatcactggaacctgggaggtggaggttgcagtgagttgagattggccactgcactccagcccagtgacagagcgagactctgtctcaaagagaaaaaaaagaatggtggaagggtaattcacaaagtttatccagagtgtcaaagctcattcccaggctcttgaaccatggaactatcccagaaataggcagtaaaaagaggcacaggatactcttcaccttctgtgatattttcaatttagtgcatcttccccctgcccccccccaccccccgccgcttgctggagtacagtggtgcgatctgagctcactgcaacgtctacctccagggctcaagccagcctcctgaggcctcctgaaaagctgggaaaacaggcgcaaaccaccatgcccggctgatttttgttttttttacctttcatagagacgtggtctcactgtgttgcccaggctggaatttagtgcatctttattgaaaggatattgcattcatgaaattagctcataattgagtgtcaaaactgcacttaagtcaatcattttgtaggctattgtacatagtagaaaaagtaagaacgaccactctatctagaagtttactgcatatcaggggagattaggcaagtataaaaatgactaatacaaagtagagtgaggtaaggatgaattaacaggatgggagattattactgtggcagattggattttccaaaaattcccacagcggtattttgaatcccacatgttcttccagaatcttgccacaatctcccctagaggtggtgtccctaggacttgtggctgcccctacagacacaatgcagtaaaagatgctggttcagttctgaggacatcccttggaccccagctgccacgctgtgaggaagcccaggccgcttggagaagccatctggaggtgctggagctgacaccagcacccaatgccagactggggaatgagggagccacctgatcattccagtccccagccctggggctgtcccagctgacctcaagtacagcagagactcatgcaagctggacctaaattgcacgcccccctgaaatatataatttatttcatgaacatagatctgaacattagaacagattattgaggccggttttggtggcccatgcctgtaatcccagcacttggggaggctgagacagctggattgcttgagctcaggagttcgagaccagcctgggcaacatagcaagactctatctctacaaaaaatacaaaaattgggtgagtttggtggcggaaacctgctagtcccagctactcgggaggctgaggtgggcaggtcgcttgagactgggagttcgaggcagcagtgagctatgattgtgtcaccgcactccattccagcctgagccacagagcaagaccggctcttaaaaaaaagaaagaaagaaagaaaaaagataacagtggcttcaggaaaactgttccacggtaggaggcatacgatcctgatctctgtattttggagaagacggaggggactagcttacgtcgagacagaggagttcataactattaactatacacaacgacgtgtcacaaatgtttacaaacttccaagagataacgataagaagcggccgggcgcggtggctcacgcctgtaatcccagcactttgggaggccgaggcgggcggatcacgaggtcaggagatcgagaccatcctggctaacacggtgaaaccccgtctctactaaaaatacaaaaaattagccgggcgtggtggcgggcgcctgtagccccagctactcgggaggctgaggcaggagaatggcgtgaacctacctgggaggcggagtttgcaatgagccgagatagcgccactgcactccagcctgggcgacagagcgagactctgtttcaaaaaaaaaaaaagaaggaagcaaaatacgattggttcggtcccgtccgctctcagcggctcagtcccaggcctcggggccagaaccgtgttccccgcgctacttgggcggcgccgagatcgcggcctccccgaagggtgcccaggaggcctgggtcggacgtggggcgcgaggaaacggcgggttttccacactgagccgcgaaagcctgtagacgacgaagaaccccgcagccttggcctctgcgcggcttccacgccccacggctgcccgcccgagccctgcccccaggcgcgccagccccgcctcccgggtcccgggtcctgggaccgggcccgccctgccccggcgcccgtggtcaccatggcaacgcagcggacgtcggccaacggcccgccctgggggcggggctgggccggtcgggcgcgcgggtcaggtggcgaagggcggagtctgcgcggggttgggcggagcctgcgcggggccggtaggatcgcgtcgggagccggtaccgaggcccgagccgcgggagtcgagcgaagrcagcgccgaggccgcggtttccccctgggcctccccagcagcagccatgggcagtgagtagcggcggctggagcggggactctggctgggaacgcaggccccgcctgggctgcgggcggtggggctggcgctcgctcggagtcgtgggggccagggatgcgcgggccgctccgggcctcagcggagggcacgggccgggggcctccgccgaggctcccctagccgtgcgaggccttgcccggcgggtaccgggacccggaggcccggggtttgcgtttgatagagggcgaggatggcgctgggaggccattggttttgggggcggggagttagggcaccgggtgaacctggaccactttttaatttttcaggagttaaagaaatcccgtgtttttattccctcgtcatctttccttggcatgttgcattgaagaaagctcccctaactcgtttaattttaaaaaaagtgatgcatggcgtgtgttttagggaggaaaggagtgtgcattggtaacagcgttttccttaaactgttcattctgtagcgtttactgaaaactgtaaggttttataagccttagggacaaggccttatgttataggaatgtttttcagggccctccccgtaacactcaaccccacatatgtgcacgtagctacttgcatagctgtgaagatgttcgttggatgatgggtcgtgcatacccaagcagggcacccattggccaactagtggacatttgggggaaattagaaaggagtaggagagacccgtggtaaaattttgcatcacaaggatagacagggggcagccaaaagctttgcttgaacatgaataccccttacagatgatcataaagtgtcaagaaatctgagagtggcttggattgaggtggagaggaaaagggatggagaggttctaggaagcctcctgatgtgattgatacttgtttcgcgttagcaatgaatgctttcataattcagatttactttccagaaaatccaaaatattaggttgctgcaaaagtaattgcrgttttcaattacttctcaaaaaccgcagttacttttgcaccaacctaatagtacttgggtaacaaacatctgcccatgacaattagttaatccttctgtcaaacatcagtgactggtggggcgcagaggctcacgcctgtaatcccagcactttgggaggccgaggagggcggatcacccgaggtcaggtgttcgagaccagcctggccaacatgatgaaaccccatctctactaaaaatataaaaatcagcctggtgtggtggtgggcgccagtcatcccagctccccaggaggctgaggcaggagaatcccttgaacccgggaggtggaggttgcagtgaatggagatcatgccactgcacttcagcctgggcgatagagcgaaactccgtctcraaataaacaaacatatatcggtgactgcccatcatttgtagaggcttttttaaaaaagataatatagtcaactttaggcaactacagaaacgtaatcactcacgtcagctttaagacaattttgggatgttggtatatagaatccagtgtctgtaggggaagaaaagccgcagagcctaactaatacctagctgcggcttgtctttctccacattgcagaccctttggcaaaggacagaagcttgagagattgtcattttcaccctccagttctctggcaggacttgacttaagccgtgccagaagacagtgtctatccttaaagaaccttgatttatcttacctttatatgttataagagtagtctgggaaaacaatactttctgatgaaatgtaattgttaattctctgggttgattattttacacaagcaagtacttttctattacctgggagagtaactaggcaatgaaatgtggtctgatgaaatcaaacagagattacatacctttttttttttttttttttttttttttgagacggtctctctctgctgcnnnnnnnnnnnnnnnnnnnnnnnnnnnnnnnnnnnnnnnnnnnnnnnnnnnnnnnnnnnnnnnnnnnnnnnnnnnnnnnnnnnnnnnnnnnnnnnnnnnnnnnnnnnnnnnnnnnnnnnnnnnnnnnnnnnnnnnnnnnnnnnnnnnnnnnnnnnnnnnnnnnnnnnnnnnnnnnnnnnnnnnnnnnnnnnnnnnnnnnnnnnnnnnnnnnnnnnnnnnnnnnnnnnnnnnnnnnnnnnnnnnnnnnnnnnnnnnnnnnnnnnnnnnnnnnnnnnnnnnnnnnnnnnnnnnnnnnnnnnntgcctgtaatcccagcactttggaaggctgagatgggaggatcgcttgacgttaggagtttgagacaagcttggccaccatggtgaaatcccatctctagtaaaaataaaaaaattagctgggcttggtggcactcgcctgtaatcctagctactcgggaggctgaggcaggagaatcacttgaacctgggaggtggaggttgcactgagccgagattgtgccgctgaactgcagcctgggcaacacagcgagactctgtctcaaaaaaaaaaaaaaaagttaactataggaggtgattccatgatttttttgtcacctatgcatttcggcatctttcagttgtttaaggcagttctctacagaagagcccatttgccgttgtgcttcctgagtgcagaaggcaccctcctgtcttcctcctctgatacctgctttcttctgtcatgcattgtctcacgggtaccacggtagagtacatttgctcccttttgacgtcgtgatgccctttgaacagccccctttttgtatatgtaaaatgattggatacaagtgtgaggaagaaagtatgatgccctttgaacagccccctttttgtatatgtaaaatgattggatacaagtgtgaggaagaaagttctggaaaaaggttgcttggattgcttcacttctactgaccagccatcaaaccatttggacttctttgtccctggaatgatatctcttcctttacatatcatttgaaatggagaacagtatgatgatttaatttggggcttaagggtggggtgaattgctggtgaaagagaatctttgtatttgattttctagaaagacagatctttttttaacttcataataataggaacatttattatttttctttttacagtcaaatttttagaagttatcaaaccattctgtgcagttctaccagaaattcagaaaccggaaaggaaagtaagtataatattttagtaatatagagggtagctcaagggcttgttctatgaaaccagcaaaattcatttccttacctcagtccttctctgtgggtaattggaaaactattggtgttcatcctccttgcaagaggcacaaagtgaataaaaataatataaatctgtttaaatctagataggttaactcatgctttcaaaaatgactgttctttaagttgtgacatttccaaattaagtgtttcttcggcctatgtgttagttaagacaggttattctcctgtctgtagtgatcctttataaatcctgtagtattgggtgtgtattgtgtttgctaatgatgtcacctactggactagaaataacccagtctgctcgataggttttgatgagtacagctgttttatgtaaatgaattgcatttgcacaaatatatacctcccatttcttgattcattcgttggaaagaaaaatgacaggaatgcattcagaagatattgtgactgggtcaaatcgttcttccatcattgcaaactttcagagttcaggtatttaaattctggaaatattgttaatcctagattggccaatttctagaaattcttcatcaaactacaaatttctcatcaaactaacaggaatagggacatagagataggtaaaagaattttaaacttactatttgatttagaagtatttatttatttatttatttttgagacggagtctcgctctgtcccccaggctggagtgcagtggcgccatcaaggctcactgcaagctccgcctcccgggttcacgccattctcctgcctcagcctcccgagtagctgggactacaggcgcccaccaccatgcccggctaatttttttgtatttttagtagagacggggtttcaccgtgttagccaggatggtctcgatctcctgaccttgtgatctgcccgcctcagcctcccaaagtgctgggattacaggcgtgagccaccgcgcccggctagaagtattttattgctttgagattgtaaaaatagttgttccattaacatttaaggcatcctgagaaaccctggctttgcagtctataaaatattcatatggcactgtcaccagcaggcccaccttcgcacagtgcagtgttcaccgaatcgcgtgcacattggatccctgttttgctttggctccttttcagtttcatttaacaccgtacaatgcagatgagaactgcctgtatttaagttaccttttttatgaaaagtaaagaaacttatatttaggaagttcagctgtttgttgtagctgctactgaggtgaaagggacattagaaaacaatctaggcccggcacagtgactcacacctgtaatcccagcactttgggaggctgaggcaggtgctcaagagatggggaccatccttgccaacatggtgaagccccgactctactaaaaatacaaaaaaattagctgggcgtggtggcgtgcgcctgtagtcccagcttctcgggaggctgaggcaggagaatcgcttgaacctggggtggtagaggttgcagtgagccgagactgcgccactgcgctgcagcctgggcaacagggtgagactctgtctcaaaaaaaaaaaaaagaaaaaaagtctacctaggatagtacttcaaaaaggggcatttaagagtgaataataggatgtcacgatggggaactttacttacgtttttgtgtggatttgtgctttaaatttgctgtttcgaaaaccaaacaccacatgttctcactcgtaaatgggagctgaatagtgagaacacgtggatacagggagggggaacatcacacaggggcctgtgggggtagggggaaaggggagggagagcattaggacaaatactaatgcatgcggggcttaaaacctagacgacaagttgataggtgcagcaaaccaccatggcatatgtctgcctatgtaacaaaccggcacgttcagcacatgtatcctagaacttaaagtaaaatttaaaacaataataataaaataaaaatatttaaggtaaaaattttgaagtaaaagagaaactgaaaaatctagatttgaaaattctttcctcagtaaaagtagmtttaaaaaaatataagcttaattttttagaacatatttctctttttaaatttgtataaatataagtagcacaaatgcagttttgttacatgaatgtattatgtagtggtgaagtctgggctttgagtgtatccatcacccagataacgttcattgtacccattaagtaatttctcatcatccatcttttcctgccacccctgtacccttcggagactccacttctgtcattccatattctatgtccatgtgtacacattgtttagctcctacttttaagtgagagcccacagtgtttgactttccacttctgagttgtttcacttaagataacctcctccagttcgttccatccaggttgctgcaagggacatggtttcattcttttcatggctcrgaagtatttcattatttatatacagcatatcttctttatccagtcatcaagaagcatctgtgcatgtgtgtctgtatatatgtgtgcgtgtgtgtatatgtatgagagagaaaaaaatgtttgtaaaactttgtacctaataaacaaaaatgcttcctttataacacataacggacattcccaatttctgtgaattaggccccaaagaataacctcaaaactctgctgccccccaaaaatttgctgtttcttggttttgattgatgattctttacattttgttgtacagatccagtttagagagaaggttctgtggactgctataacgctcttcattttcttagtgtgttgtcaggtatgtaactatactattaaataaatgtctgcaccattgttctaaggttttgattggttagaatttgagaattttttttgttaaaataaagaatacattgagctcaatatattgagcattattatcctttttattttttattattaatttttttttgagatggagtctcrctctgttgcccaagctggatgcaggggcatgatctcggctcaccgcaacctctgcctcctgggttcaagtgattcttcttccttggcctcccaagtagctgggactacaggttcctactaccatgcccagctaaagtctcgctctgttgcccaagctggatgcaggggcatgatctcagctcactgcaacctctgcctcctgggttcaagtgactcttcttccttgggctcccaagtagctgtgggactacgggtgcctaccaccatgcccagctaatttttgtatttttgttttattttattttttgagatggagtttcacattgttgcccaggctggagtgcagtggtatgatctcgactcactgcaacctctgcctccccagttcaagtgattctcctgcctcagcctcccgagtagctgggattacaggtgcatgccaccaagctcagctaatttttgtatttttagtagagatggggtttcactatattgaccaggctagtctcgaactcctgacctcaagctatccaccttcttcagcctcccaaagtgttggtattataggcgtgagccaccacgcccagctgaatttttgtatttttagtagagatggggttttgctgtgttgttcaggcttatctcgaactcctgacctcaggtgatctacctgcctcagcctcccaaattgctgggattacaggcgtgagccaccacacccttttttatctggcaattttttgtttttaaatagagacggggtctatgttgcccaggctggtctccagctcctaggctcaggtgatgctcctgcctcagcctccctagtaggtaggactgcaggtgtrccccaccatgtctggctaatttttcaattcttttgcagggaaagggtcaagctaaaaccaaatttttgcaatcttgggttgtrctgtgtttaaaaattactaaaatttgatgatagtgtttttttggtttttgttttttggtttttttttgagacagggtctcactctgtcacccaggctgcagtgatcacttcagccttgacttccccaagcccgggtgatcttcccacctcagccttctgactagctgggactacaggcacgagccactacacccagttaatttcttttggtattgtagagatgaggttttgccatgttgcccaggctggtctcgaattcctgggctcaagccatccatctacctgtatctcccacagggctgggattacatgcctgagccaccacacccagcccaatgatactttcaaataaaatgttgcagacatattaagttcacagtgtgagtataaaatgtggcctgcctatgttttagggttattgtaaagattaaataagataatttaggtcaaggtggctgggcatggtggctcatgcctgtaatcccagcactttggcaggccaaagtgggaggattacttgacgtcaggagttgagaccagtctggtcaacatggtgaaactccgtctctactaaaaatacaaaaattagccaggcatggtggcgtgcacatgtaatcccagctactcgggaggctgaggcaggagaaccacttgaacccaggtggtggaggttgcagtgagctgagatcacgccattgcactcaaacctgggcaacagagcgagatgctgtctcaaaataaataaatacatagatacatacatacatacataccagataatttaggtcaaggttttttggggagttcgaaaatctattgaaatacttgtaagaacttttaaaaaattatattaggaagcagtagaacagattaggtacataatctggagaaaacctaactatattttctttctgaaggatgaaatgatctgataattaaagtacttttactactgtacttgttttaaatttgttttaaatggtcagggagagaagtttaaagaaacaaagaaaaatacaaagaaaaaaaagaatagtcatccatatttctaccattgactttcagcatcttagaaactcctctccccaccattaaaaaaaaagtcaaccttgtggaggtataatatatatacagtaaagtacacctgtttttaggcatacattttgaagagttttgacaaatttgtacacccacrtgactacaacctctgtggatatagaacacttctgtcatccccgaagttcactgtaacctttctcagtgaatctccacaggcccaggctaccactcatctgcatmctgtgactgtactttgatttgttttttctagagcttcatgtaaatggaatcatacagtagtatattctttagtgtctaacttcataatctttttgagattaattcatatggtcgttacgtcagtaactcattcctttttatttctgaatactgttctgatgttgaagttatcacagtttattcattcattcgcttgttagacatttgggttgtatccagattttggctacaacacatcaatttgctatgaacaytcatgtataagtctttctgtggatatttttcatgggtgagtccttagaagtacagctgttgggttttatagtaaatgtatgctcaacttataagaaattgtcagctcttttccaagtggttgccccattttktttgtttgtttgtttgtttgtttgagacgtagtctcgctctgttgcccaggctggagtgcagtggcacgatttcggctcaccgcaagctccgcctcccgggttcaagcgattctcctatctcagcctcctgagtagctgggatttcaggcacgtgctaccatgcccagccaatttttgtatttttcgtagagctggggttttaccatgttggacaggctgttcttgaactcctgacctcaggtgatctgcctgcctcagcctcccaaagnnnnnnnnnnnnnnnnnnnngtaccgacgcgtcttccgccccgtggtgaagacagccgtgttctggagttccagttgatctgcatcctggtctacttttagtatttttgattattttaatagtagtcatcttgccaggcgcagtggctcacgcctgtaatcccagcactttgggaggctgaggcgggtgaatcacctgaggttgggagtttgagaccagcctgaccaacatggagaaaccccgtctctactaaaagtacaaaattgagctgggcgcggtagctcacacctataatcccagcactttgggaggccaacgcaggcggatcacgaggtcaggagatcgagaccatcctggctaacacagtgaaaccccatctctactaaaaatagaaaaaattaggcgggcgtggtggcgggcgcctgtagtcccagctgctcgggaggctgaggcaggagaatggcatgaacccaggatgcagagcttgcagtgagctgagatcgagccactgcactccagtctgggcgacagagcgagactccgtctcaaaaaataataaataaaaataaataaaaatacaaaattggctgggcgtggtggcaaatacctgtagtcccagctacttgggaggctgaggcaggagaatggcgtgaacccgggaggcggagcttgcagtgagccgagatcccgccactgcactccagcctgggcgacagagcgagactccatctcaaaaaaaaaaaaaaaaaagaattcatgaacctgacagcactcaacatgggtagaggggccgagagctgctccaggggtgtgggcagtgagcttttgtagcagaagtaaagaattgcagaagtaaagaaattacttgattggctacagctaggcgtttgcctcatttgattatgttccagtgagaggtttctgtgtagccaataggctggttgactgtctgtaattggctgaaactcattcagaattaaatatcctctaaggtcattttcagttttcttttgtgagacttcagggtacagaaacaaccacaggctaatggccacctgcttagagtgccttaacaagttgaaactgattattatattaaatatagtgcaaagtttggaactctgcaactgtgacagattcatagaaaataagctcctattgttgcccacctgttgttgtacatgatcctctagctatggaatttactaagygaaataaaattagaaaccaattttaataatcctactggttgcaggaaaggagggtataccattaattatgggaggttggcttgctgtttcccacagagcgcctaaccatggcggattaaggaaggtcgttgggcggagtggccgctctccacttgtggaatattttgagatggagtctcactctgtcacccaggctggagtgcagtggcatgatctcagctcactgcaacctccgcctcccggattcaagcgattctcctccctcagcccccggagtagctgggactacaggcacgtgccaccacgcccagctaatttttttgtgtgtatttttagtagagatggggtttcactgtgttaatcaggatgatctcgatttcctgacctcatgatccacccatctcgacctcccaaagtgctgggattacaggtgtgagccaccactcccagctgtttttgttttgttttttgagatggagtcttgttttgtcgcccaggctggagttcagtggcacgatgtctgctcactgcaacctctgcctcccaggttcaagcgattctcctacctccgcctcctgagtagctgggattacaggcacgagccgccactccctgctaatttttgtatttttagtagagatggggtttcaccatgtcggccaggctggtcttgaactcctagcctcaagtgatrtgcccacgttggactcccaagatactggtgttacaggcctgagccatcgtgcctggccctcacctctcactttaaatgaagagtgtctacagctgccaggtgcacataaaatatccatgtttcatgctttaccagttttattacccagctgataaattcagactttcagggaggtttaggttgaccaggtgagttgtttaaaattgctgccagcatcttttgtaactttcttaaaaatcagtttcatatagagaaggtttttgaaatgtctttgtctaatccccacatggttaaggaggggttaaggccaagtgctgtatcctaaatatgggttatataataggaagcaatctgaacttaagttgttttttgttgttgttttaatgaaaagttaatgtcctcattatggaaaatttgatacatatgaaaagaatacagaagaaaaagtcaaccataatcccaccatctacagataattgctgtttaggatttaaaaagatatctcctcctagtttgattttctgtgcatctatttacagtgtcatagtttatatatacactttcgtacttcgtttttatactagggcttcttaacagtcgcactcctgaatttgaggtaggatgattccttgccccaggggtctgtcctgtgtatttcaggatgttcagcagcactctggcctctactagccatcaccccctgttctgtgaaagggcyrtatatgcaaaatgacccgcaaacactgaaggagctgcgaaaccaatgaatgagggagacaaatccagtttgtcagtagagggtgattttacagacagaagcatagtttggggcagcagtaagacagggaaaggcctgcattcttactcccagacccagggctaatctatcatagggaaggggtgtatgtgctttgtgcaggacagttgaaggcagctttccagaacatgcaagaatgctgtgtgtcacagcctgttatttgtgtaatagcatcaacgttgcttggatctcagggcaggatttatggcgagtacatgttcttacactaaggactgtaaataaagcaggaatcaggaggtatccctgagaccagggttgagcagaagtcaacatggtagattagcatccaagatggagtcactttggtctccaccttggcccctagttgtggcaaccaaaaatgtctctagatattgccaaatgtcttgggtgggggctaaaatcacccctagtttagaactgctattttatatttagttttatgacataagtacttcttccatgttattacagattgagtaagcataatttttagtggccatgtaatattccattgtggatatcatcttcagtcttacattgagaagagtgaccttggctgtctttagtatatagagctttgcaaaatcattctacgaccaggcaggtataatattccataatctactggtgggagtgttttttaaattgtggtaaaagtatagaaaatatgccatcttcatcatttttagatgtgcagtttagtaacattaggaatgttcacattgttgtaccaccacactccataagcgatgtatttactagtgaatgcaccaagtgatgatttgttgtttttatttttattttcactttctggttcttttaattattttttttattaamccttatctatgtgatggaatgtttttctttttattttctttttaataaacagctttaccttgaagatatgcttgtttttgttgaagaacataagaatagtttttaaaaaagtattgcaagcagtaagtgaataccttgtaaattaagtgcacactttatactttttttttttgagacagagtctcctgtcacccaggctggagtgcagtggcgtgatctcagctcactgcagcctttgcctcctgggttcaagcgattcttatgcctcagccttatataatacagtttcataaactattttgtgtactattttagatcccactgtttggaatcatgtcatcagattctgcagatcctttctactggatgagagttattctggcttccaatagaggtatgcgtgtcttttctgtctccacactcctactcacagcaaacagatggaaacatgtggattagcaatgagttttcaatgtctacagggagggggaggatatcattgcctagaaaagcctagtatgtagataatgacaacaccgtgtgattaatgtaatcatagagaaatctgttcttgggttttcatggactggaaaaccctgatcttcagtgtcaaagaaggtgatgtccagataacattggaattggagtccaggtggggcgccgtggctcacccctgtaatcccagcactttgggaggccaaggtgggcagatcacctgaggtcaggagtttgagaccagcctggccaacatggtgaaaccccgtctctactaaaaatagaaaaattagccaggtgtgggtatgcacctgtaatcccagctactcaggaggctgaggtaagagaatcgcttgaacctgggagatggaggttgcagtgaactaagatcgcaccactgcaatccagcctgggtaacagagtaagactctgcctccaaaaaaaaagggagtccagtgtgtgagccaatcggggagctcagctggagctgagcctgaagcctcaagcagcattgttcatctgggaaattgtggctgaggatgctggacagtgagagtagcaaggggtacaaccagtcgtgaggtttcttacatttaggaacagtggttgcctcttttttggaaacacttttttcaggcgatcctcccacttcagcctcctgagtagctgggactactggtgcgtgccacaatgcctggctaatttttgtagttttgtagaggtgaggttttgccatgttgcctaggctggtcttgaactcctgggttcatgccatcctccctcaaagtgctgggattacaggtgtgagccactgcacccagcctggacatactttaaatcgatggcagatttttttttgatgtttttaggttataaaggtaatattgatttattattttaaaaatgcactagcaatttatatacagatttatatgaagctgaaaagaaaagtgtcacttctgaggggagctctggaggatttggtagattggtgactatcaattgaggccttttctttgcacatacattcacttacatatatctatatacttcttataactgaaaagtaagatgtcctgtatatactattctgctactttgtttacttaatatcttacatgagctattaatggccatgttattattccattatraggatacgctgtgatttatttgatcattcattcaacaaatacttactgagttcatattgtgtgtcagcctttgtgcaaggtgccgagattagagcagtgaacaagacaatgtcccagttgtcatggagttgatatttgctgtttggggaggtacctggggtggggaaggtgctctaggaaggtgatctttgaagacagctgcaggaagtgagagaggaggccacatgaagacctgagggaggcatattctagggaagagccagtgcaaaggccctgaggtgagcctgtgcttggtgtgttcaaagatcattgaggaggggccaggcgcaggggctcatgcctgtgatcccaacactttgggaggctgaagcgggaagatcacttgaggtcaggagtccagaccagcctaggcaacaaagtgagaccccatctctactaaaatcacaaaaattagccaggtgtggtcgtgtgtactgtggtcccagctacttgggaggctgaggtgggaggatggcttgagcctgggaggaagagattgcagtgagccgagatcacgccactgcactctagccggggcgacacaaccagaccctgtctcaaaaaaaaaaggaacattgaggaggtgagtgtggggtggaagaaatgaaagaagagggaggagtgatgggaccygatgttgcagatgtatctaagtcagatcatgaagggcttggagaccgttggatggagcacattttaaggaagatgggaaacttctgcaggccactaggttcctttcttgtcatatattacgtttttttccccccrattttatatcattataaagaatgctacaatgaaggctatcacaccgttctgtaactttttgatagaatgaatttctagaagttcaactgttgggtcacaagataggcatactgaaatttttgatagagaaagctaaattatcttccaaaacagttgtttgattttacactctcagcgacagtatatgagaatgaccatttctctttcaacagtggatattattagtattttagtctttgttagtcagagaggtaaaagctggcatcagttatttaattttgatttctttatagattggtgagtttgaacattgttttctgtttttatggaacatttgtatttcttctataagtggagttttattagtgtgttagattccttttgttgtaagtaataggaaactagatgctttcgtagtccgtagatgtgatgattggatcttcacgctcgtgtgtgagatgtgcctctctccagccttgttaggatgttggaacattacccatctgacatgaaaagaaaaaagaaaaaacattgttttaaataaaggagaaaaattaaggaataggaaatcactgactagcttaaacagaaacatgatacttgctggaaggatactggttattttttggaatctacagtggagatgaacagctaagccccaggaagaaggggagcaaggccagcccttaggcctcagcagcagggattggtgaacattttccattctctgtgcgattcagctccacactcccagatttattttattttrttttatttttttaaaccaaatttcgctcttgttgcccaggctggagtgcaatggtgcgatcttggctcactgcaacctccacttctcaggttcaagcgattttcctgcctcagcctcctgaatagctgggattacaggcacaagccaccatgcrccactaatttttttatttttagtagagatggggtttcaccatattggccaggctggtgaattcctgacctcaggtgatccacccaccttggcctcccaaagtgctgggattacaggtttgagtcactgtgcctggccccagattatttgtttaaaattccagatgcccagggttctcaccaggcaggatcagcttcagttagagttccagggttgcacagtacaggtttggatgctgggggcctactcctgtgctgcattttcctgagaaagcttcagcaggagcagacayatcatgtatctgctgtttcctttttaaattgtttttttccttttttttttgttttattttttttgagacggagtctcgctctgtcacccaggctggagtgcagtggcgcgatgtcagctcactgcaagctccgcctcccgggttcacaccattctcctgcctcagcctcctgagtagctgggactacaggtgcccgccaccacgccctgctaattttttgtattttttagtacaggtggggtttcaccatgttagccaggatggtcttgatctcctgaccttgtgatccgcccgcctcagcctcccaaagtgctgggattacaggtgtgagccacygcgcccagccagtttgttcactttttaattgatttgtaagagctctttgcacatgagagataagaactttttgtcatttgtgtttaatttttttttattcttttgggacaggctcttgctctgttgcccaggctggagtgcagtggtgcaaacagctcactgcagccttgacctcttgggccaagtgatactcctgccttagcctcccatgtagctgggaccacaaccgggcaccaccatgtctgactagtattttaattttttgtagagacagcatctcactttgttgcctaggctgctctcaaactcctggcctcaagtgatctgcctgcctcagcttcctaaagtgttgggatgacaggcgtgagccaccatgtctgccttaatagttttattttaaccattatgctgccttttgccacgtggaagttttgtagttgtatctaatcatatcttccatcttttcctttgtggcttctagattttttgccatgcttagaaagactttcttscccaagatgataagctactcacccatatttccttctagtatttttgtcatttatcctttatgtttaaattttctatacatggaggctgggcacagtggctcatgcctgtaatccctgcactttgggaggccgaggagggcagattacttgaggtcaggaatttgagacctgactggccaatgtagtgaaaccccatctctaccaaaaatacagaaattagctgggcatggtggctcacgccagtaatctcaggtactcgggaggctgaggcaggagaatcgcttgaatccaggaggtggaggttgcagtgagccaagatcgtgccattgtactccagcctgggtgacagtgagactctgtctaaaaaaaaaaaaaaaaaaatttctatacatgtagcatttgttttgatgtgaggcatgaggcatgaggtaaggaatctaggtttaatttcctaaaaatggccaatttttttgccaaggtccatttttttctctactgatttgaaatgccatatttcttatatcaaatattcattaaagcttgattaagtctatttctggactagagctatttgcaataataaattttggtgatctaacttaagaaatctatctaatatctttttttttttttttgagacagagtctcgctctgtcacccaggctgaagtaagtgcagtggcacgatctcggctcactgcaacctctgcctcccaggttcaagtgagtcttctgcctcagcttcccgagtagctgggactacaggcgcccaccaccatgcccagctaatttttgtatttttagtagagacggggtttcaccatattggccaggctggtctcaaactcctgacctcatgatcctcccacctcgtcctcccaaagtgctgggattacaggcgtgagccaccatgcccggccattttttttttttttttttttttaagacagaatttcgctcttgttgcccaggctggagtgcaatggcgggatcttggctcaccgcaacctccacctcccgggttcaagcaattcacctgcctcagcctcccaagtagctgggattacaggcatgcaccatcatgcccggatacttttgtatttttattagaaatggggtttttccatgttggtcaggctggtctcgaactcctgaccttaggtgatctgcccgccttggcctcccaaagtgctgggattacaggtatgagccaccacacccggctttttttttttctttgagatggagtctcactctttcgccaggttggaatgcagtggtgcgatcttggttcactgcaacctccaactcctcggttcaagggattctcctgcctcagcctcccgagtagctgggactacaggcgcacgccaccacacctggccaatttttgtattttcagtagagacggccaggatggtctcaatctcctgacctcaggtgatctgttggctttggcctcccaaagtgctgggattacaggcgtgagccaccacgcctggccaataaatctatctaatgtcttaaacactaaaacatgtttttattttttactattgaggaagtatctgagacsamatcaaaaatcccccktaaggtggactattttctcatatgaaggccaccttttcagcatttatgaaaacaggattgaagggagtgatgtgacagagtggcccaggaagtcttggcactgtagaattacttgattccataccttccttatacagttggcatatttgattttcttatttctccctataaattctttttttttggtttgtttttgagatggagtctcactctgttgcccgggctggagtgcagtggcgcaatctcggcttactgcaacctctgccttccaggttcaagcgattctcctgcctcagactcctgagtagctgggattacaggtgccygccaccacacctggctaatttttgcatttttagtagagacggggtttctccatgttgtcccgttggtctygaacttctgacctcaggtgatccacacacctcggcctcccaaagtgtggggactgcaggcgtgagccactgtgccaagcctatagtactttttattcagggcattgctgcaggattgtgttaataaatgagaacttttcttagcaagtagtgtttaagaaatgaaaatttgcttgttaaaattttcacgtgtgtttcagttgaggtaattagggagtgcgacacctctaaatcagtttgtatcgtgtacagcaaacattgcacacttctctccccttcctttccaggaactttaatggaattgggtatctccccaattgtaacatctggtttgattatgcagttgttagctggagccaaaatcattgaagttggagatacaccgaaagatagagctttattcaatggagcccagaaacgtgagcattaatgcarttaaagagcattctccaaatttgagagtgctcgtggtaaagatgttttctctagtcttttcttgtctttggtggtaagcgtgctctcctttccccccaactttcatcagtgtttggtatgatcattaccattgggcaagccattgtgtatgtcatgacggggatgtatggggaccctgcagaaatgggtgcyggaatctgtctcctgatcatcattcaggtaagaaatcctatattttcctatgcagataacaaaacagtttgattcctttttccttttctaacagttctttaggtgattggcttattcattttcttacttttgaattatttaattctagtattttgatcactgaagtgatacgtgtaaaatttttttaaaaccttctgtcaccgtgacgtgttcaagttgtgttgacgtgaaaaattcaaatttattctaatagcttcataactgcacaatacaaagaattatggatcaattgtattttattgattcttaagatacacatttgtcacattttgatgtctctagaatcaggatgtttttgtacagtaaacagtgccttccacttgyggtctgccaggaggcagtcatggtggtgtcactgcctgtgcgtgtgtcagcctgttcaggtcatgctgaccttagttggctgagtgtgatcttcacagaatgggtgtttgagttcaatcgctgtctaaaggtgttcagaaaatctgttgtgatttgttattgaaatgaaagtttatgtatagaagggcaagctagatgataaatatctaccactaggtctaaaatacgtttttgtaagtagaaaattaaaattctttgcaataaggtattgtgccataagttaattggcagtattcttttcttagtagtacacaaaataatgatgttttacatggtaatgtcttagagtcagtgaaacactgtttatacacacataaatatattccatgggttttttaaatggatgcttaggaatggaatttttaaaggtcaacataattattagtgtcctaagtatcttttttttttttttttgagacggagtctcactctgttgcccgggctggagtgcagtggcacgatctcagctcactgcagcctctgtctcccgtgttcaagcaattctcctgcctcagcctcctgagtagctgggcttacaggtgcctgccaccacgcccagctaattttttgtatttttaatagagacgggggtttcaccatgttggccaggctggtgttgaactcctgacctcgtgattcgcccgcctcggcctcccaaagtgctgggattacaggcgtgagccactgcgcccggccctaagtatcttaaaatatgttaagtttggaagctatttctctattgtacaatccttaaaaaccatttagataaattacccaagaacagatcatacttaagttatctttcttgtgttttgaaaagaagtttgctgaagttaataaacaatgggtatctggagtcctgattttcttggaaatgcctcttcttcttcactttatgaaattgggattagtttaggaaattttttctttttcttttcttttttttttttttgagacacagtcttgctgtgtcgccaggctgaagtgcagtggcacgatctcggctcactgcaacctccccttcctggtttcaagcgattttcctgcctcagcttcctgagtagctgggactacaggcgcgcgccaccatgcctacctaatttttgtatttttagtagagacagggtttcaccatgttggccaggacggtcttgatctcttgacctcgtgatccgcctgcctcggcctcccaaagtgctgggattacaggcgtgagccactgtgcccggccaggtatttttttctgtctgttcaaaagatcaagatsaagctgagaaaaatattttttaataatctcaaataccagtttattaatatatacatagaaggaaatctgactgtctcagactggcatggttgagcattctggtttttttgtttttgttttttatttttgagacggagtttcactcttgttgcccaggctagagtacaatggtgcaatctcagctcggcacaatcttggctcaacacaacctctgcctcctgggttcaagcgattctcctgcctcagcctcccaaagtgctgggattacagagcattctgttttttaaattagaaatgttatgtaggaagcaaaacatgattatttaatgagtgtgacttatatccaggaaagttatgctgttcaagtatttatttagcattgttaacaataaacatgacttttctaatgagatggaactgttttgtcatttgaccagggcaggaattttttttttcgagacggagtcctgctctgtctcccagactaaagtgcagtggtgcaatcttggctcactgcaacctccgcctcccaggttcaagcaattctgcctcagcctccccggtagctggaattacagggtcctgccaccacgtccagctagttgtgtatttttagtagagatgggattttgccgtgttggccaggctggtcttgaacttctgaccttaggtgatccacccgcctcggccttccaaaatgctgggattacaggcgtgagccaccacgccccgcccagggcaggaatttttaatgaaaatcaggttatttggaagctttctgatccccagtgtgttcgcatttggtagaagatacgtttccttaaagaataactgtcagatgtggtggctcacacctgtaattccagcactttgagaggccgagatgggcagttcacttgaggtcaggagtttgagaccagtctgggcaacatggtgaaaccctgtctctactaaaaacacaaaaattggccgggtgcagtggctcacacctgtaatcccagcactttgggaggctgaggcgggcggatcacgaggtcaggagatcgagaccatcctggccaacatggtgaaacgctgtctctaccaaaaatacaaaaattagcagggcgtggtggcaggagcctgtagtcccagctatttgggaggctgaggccgaacccaggaggcggaggttgcagtgagctgagattgcaccactgcactccagcctggcgacagagcgggactccgtctcaaaaactaaaacaaaataaaacgacaaaaattagccaggcgtggcggtgtgtgcctgtaatcccagctactaaggaggctgaggcaggagaatcgcttgaactctggagtcggagtttgcagtgagccgaggtcacaccactgcactccagcctgggcgacagagtgagactctgtctcaaaaaaaaaaaaaaagattaactttgtctttgtctttatttgtccatttacaaatcacttgattggcaaatttacagcccttgggaattagggaaagaggcgcattggatggggagagatgatattctggagtctgattttagtatctttcagggcttagggtttctcttcgtatgctttaggcattgttgaggttatggacaggccaattgttgccttcagttttgtttctttacagcattttctttctgcaatccagagtttagaataatcttgatttttagaagacacttagaactggcatgtagctcgtagaacattatacatcaagaaaagctctctagtatcttacttaaggatctattcagattcctaaggaatctccactgagcgattctcagccagctagctacaggattgacttcttacagagtcagttatggattgaaattgatataaaatagagttaagctattttgctgttcattttcagtattcagaaatcagaaatacttacagtccaagaatgaaacaagtgaagtggatgtacactgattcatttacatgaattctgatacacaaatatgcgtgttatggctaattcttctaatgttaatatataaagaggggtgtcatgtttgattgtaggtgggcagtgacccattggtgtcttttcaaggcgttactaacattgaaaatatgtggatacactgaagagctatgattggatcagtgtgtttcacccagaaacataggttttgaaaactgtttgcatgccgttgtggaaggtatttctcaccttatytgtttatgtttcattcacrtggttagtgtttttcagctagtgagtttagaaatctacatagcaggtcttgactaaaaattttaaaaaactattagagaatatcagtgtgcatggcacataataaaggtaagtatgttttgacatactgaacaaaagatagtttgacaaaactaagttgtgtgtaggtgtcgtgcagggttaaaatgttaagtgccatgtttataccggctcatcatacatgtcgtccattccccgtgaacatgtagcagttagggttctggtcccatcactgtagacgctgctgtcacttcctgggttctcatcccttttcacaggcatgcatgatatttactggcttttattcccttaattatagaaaccgtttctcatttctgtataatttcttcctccctttggaaaaacccaagtttaattttcacaggacatatgtgamccactctgtagtccgatggtcactgttctgaacagggggtgtggagaattagagttgtttcagagctgctgtgggactctggagaggtcatttctcaaggcccatcacgatgctttctgtggctgatgttcatggacggctgttgcctcctgcataggatgggtttctctatgatggggagtctctgttcactaattacatgattgtggttaaatagaatcggtagtaagtcctaacctctacattattttgtcaaaatgtcgaacttggttttcaagcagtaaaggattagcatgatctctcttagaagtttggagaatcgtaccctttctcctgcccattgaaactcagactaaaagcctgtaaatagacargttaggctctgtccaactactgaaatggcagttaaggagaaaaacaacactgtgtaaggtaagcatgcctaaaatggtctcatgtggttactttggtcgctcttccagcaggtgatattggataaagtgagtacaaaatgagggtgggcrgcttgagagctgggaggaatggaagtgacttcctcacttctgccggagggtgtctttaaagtggggacatgtgtgaggttgggggcatgraagcatattttcttcctgtcttgattaggttatttgagtgcagggaaggggtcatatgactgaggaggtcacttgaagggctagggactgtttttaattaatgcatacttttacaggaatgtcttctccaagaagcaagttcagaattttcaatatcccataaattaaagtcagtatgctttcatttttaaaaacaatatgagcttaaccttaaccgtcttcaaatttacattcaatctttgtcactatgtgtatagaatgcatttttacattgctgctcgagtacgtatttgagtacatatttgtgttctagttttttattctgtacrcattttatagagtatacatatatataatatatataatgcttttttcaaaggatcaacacagcccttaracttatcctttgatggcagtgtacatttccatcttgctattataccagaattcatctgactttttacttccttggaggtatttgggatgttttcagtttcttgctgtcataaattctagaatactgtgatcattttttgtttcagtgtgcttttcaaacaggctttatttaaacattgcaaaagaaactattcagataagtgtaaatagactttaaaagttgaaatgtctgctttataatacaacagtatttccagtcctcttactgttctagattggcctgagtaaatgaaagcaggccaaaagatgcagttggtcatcacagtgagattgcaacgatcaggccttaatattcaaaacgcccctagcttggaaatagccaatggtgttcctctccccctttcttgagtttgttcttgcttccgcttacttgcatttctttccccacagttgtttgttgctggtttgattgtgctgctgttagatgagctgctacagaagggttacggcttggggtctgggatttccctctttattgccaccaacatctgtgagaccattgtctggaaggcctttagtcccactaccattaacactggcagaggtacatcgcacagcgactgcaactgcacgcgttttgctggatgtgtgctgggaacaaacccatcgtgtcgcagtacatgcctagagccrttctggtttgctctcctaggggataaggaatgcgaattcttcaaaacttaatgagcagagatttgtggagtaagcaatactacctcagagagaatagtatcaaaattttagcctctgcttatttaaaatttcagtggttgcaaacagattttcaaaatttcttttgttaaccttgcttaaggcattgctgcagaagtcayttatttgactgatttcagcatccgtagggggataaaaaggtagtggattttagatttttcaaatgaaaagactgttgttcattgaatccacctggagcactcctactctgctgctcttctaattggctttgtaatagcaccaaagttttgaaatatttcattctctctttccccttcctcatctccacttctaacagatactgtcctaagtggttaatacctaaactctgatcccagccttaagaaaactgtaatgatgattaatgttcttggtgcggtaaacttcraggcaggctcgatagagtgacatctgtctcttattctgacatctctgctctgcttcgctgctgtttatttttcctaaaaacactctctcccttccctgaagtagaggagaggcaaatctctatgaatgaaattttgctttggtaaattttacgttgtatgttttcttcaagaatagtctcttgagaaaacttcggatttatgctataaaaacatagatttgcctcaatgatctaaatatttgtagaacctgctcacatggctatatcataaagcaaacattggcgaattcttttgacccatattttctgctgtatactggactttcacggttagttgtttgagctttgggacagctttggacratgagtccacaggtygtgtctgtcttgattttacaggtactgagtttgagggtgcagtcatagctctgttccatttgttggccaccaggacggacaaagtccgagctttacgggaggctttttatcggcagaacttacccaatctcatgaacctcattgctacagtttttgtgtttgctgttgttatatatttccaagtaagtataaccttttcaccaaagtaagtgggatgtagatttttattttgctcttaaagagaatgccatctgacatgctgttgtttaacaagtcagggtttaagatcaagggaaataaaattttgcaattagagtctccagactctgattttaaggtgtgaaatattggagtctctgtactttttttgttttttgttttgacccatcagcaggaagcagactctcgacagtttaaaaggcagaacgtctttgttagcattgtcttttcttttctttttttttcctgagacggagttttgctcttgttgcccaggctggagtgcagtggcgcgatcttagctcactctaacctcctcttcccgagttcaagtgattctcctgcctcagcttcctgagtagctgagatkacaggcacgtgccaccacgcccggctaatttttttttttttttttttgagatggagtcttgctctgtcgccaggctggagtgcaatggcgcaatcccggctaactgcaacctccgcctcctgggttcaagcgattctcctgcctcagcctcctgagtagctgggactacaggtgcatatcaccacacccagctaattttttgtattttagtagagatgagatttcaccacgttggccaggatggtctcgatctcctgacctcgtgatcygcccgcctcggcctcccaaagtgttgggattacaggcctgagcccctgtgcccggccggcattgtcttttcatcccccgcactgttctttgttttccctctctggtctctgttcttttcttaatgtgtctggctcccccacttactctccrtttccttttttagggatttcgcgttgatctgcccattaagtcggcccgttaccgaggacagtacagcagctaccccatcaaactcttctacacctccaacatccccatcatcctccagtcggccctggtgtccaacctgtatgttatttcccagatgctgtctgttcgatttagtggcaactttttagtaaatttactrggacagtgggccgtgagtattatgtttatttayattatttatagtttattataatttgcatttcatggttgtatttttaatggaatgaggtcgacattggagcatttgctgtattttcagattcacttacctatatagcagagtttagtacttatctggaagaactggtaagtgttgcagaagtaagattgcccaagcgctttttattattttgctctctaggaagcactttcacatctcatttgaatgaccttttaagctaaaattgtggttgatttcataaaagtaatttcctattttgtcatcttattccrgtattgtctacaataatgctttctaaaagatgctatttgctggctgggtgcggtggctcactcctgtaatcccaggactttgggaggctgaggtgggtggatcacctgaggtcaggagttcgagaccagcctggccacatggtgaaaccccgtctccactaaaaatacaaaaattagccaggtgtggtggcaggtgcttgtagtcccaaccattcaggaggtcaagtcaggagaattgctggaacccaggagatggaggttgctgtgagctgagatcacgccactgcactccagcctgggcgacagaacgagactccgtctccaaaaaataaaaacaaaaaatgctatttgctgctgctaacatgtgagatactggactcatcctaacctttcctatctcccaccctgcctccaggcctcctccatttttcatggtctgaatggcaataagccagcttgtgatgagctgggctagagataggcatgctattaactagacggtagagacagcggtgctgctagtaatataatcctatacattctcatatacatcccccatcataatttttttttcttttttttttttttgagacggagtctcgctgtgtcgcccaggctggagtgcagtggtacgatctcggctcactgcaagctccgcctcccgggttcatgccattctcctgcctcagcctcccaagtagctgggactacaggcgcccgccaccacgcccagctaattttttgtatttttagtagagacggggtttaactgtgttagccaggatggtctcgatctcctgaccttgtgatctgcccgactcagcctcccaaattgctgggattacaggcgtgagccaccacactcggcccataattttttctaaagccatctagccacgctgttattgaagcgtgagttactgtgggactgaattttcattggtttaaattctgtcacctaacaaaggggtattttccctcttaaaattatagattttagccaggcgtgttggctctcatctgtaatcccagcactttgggagaacaaggagagaggatagcttgaaggccaggagttggagacctgtctgggcaacatagcgagaccccatctctacaaaaaaacttaaaaactagccgggcacagtgttacgtgcctgtagtcctagctacttgggaggctgagtkgggaggattgcttgagcccaggagtttgaaggtacagygagctgtgatcataccactgcatgccagcctggttgacagagtgagaccgtgtctcaaaaataatagaattttaaaagactaatgtcctttattctttgccacagtaggtaattctagaatttgcaccccaccaaagaatagtatttttctgtacagttattcttgaaatatggtgtttattctgtgcatttgtcttaatatgcttttttttttgcattataagttacaaagactcatacctttctgcttttactgaatgtcatttaaaaaaaaggtttttttaagataataagacagtaactcatatattagttgaagggaataggattccctttattcataatacttctttcccattcatttaagagaaatgtgatgatctctgttgtattctggctaatattatatcgaggacaggaaagtcaagagacaggaataagaagaatgctgtttctgccctccttagaatagtccagcagcagctattactctgatcagaatgtcatagtgatagtgctttgagtagttggtcctgtacaatttgtgttatgattttgagtaagattcttctgaatgagagaatgattgggagatagtgcttttgatctgggattaatgattctaggggcacagtaaagaaatcattgggcagtcataaattcaagaaccagatactgtaatcatcgcaactaaaaattggtttctcaccccctatctgtataccccaaaactttatttaatatgagcaaataatgctgttcctatttctgtaagayttaagtatatagataaaaatccaattattatatttattaaaagattgctccttataacatagaaaccacataaagtctaggcagcaasttaaagtcttatgtcagtattttagttgattgcattaatattttcatatggaaggatcattcatagggatcttaatgtactgactggatactctcatagctcagaaaatttcagattttaagtataatcagaggttgattgtaaatgtaatcatattcctattttcagtaatggaagattttgtaatatattacaatttttaaaaatgactcaatattttcacagtgtcttgcatgtaataggtgttcatcgtataactttgaaggagtgaaggtagtagacacaaaagtacattctgaaactacatagaatgactagctgtagatgccttgaacttaaaacactgtcatttctgagaagtttgaagtgwcatgcaaatgtattcctgactaattaggttgaccacttgttctttgtactcctgttctgtaggatgtcagtgggggaggacccgcacgttcttacccagttggaggcctttgttactatctttctcctcctgagtccatgggcgccatctttgaggatcctgtccatgtcgttgtttatatcatcttcatgttggggtcatgtgcattcttctctaagacatggattgaagtgtctggttcctcagccaaagatgtaagtgtttggtttattttaaaataaaactcttggcaatgcatggtggcgcacatctgtaatcgtagcactttggsaggctgaggccgctggatcgcttcacctcaggagttttgagaccagcctgggcaacatagcgagaccccgtcatgactaaaaaaatacaaataaaaatcggccgggcacggtggtgcaagcccrtggtcccagctacttgggaagttgagacggagcaktaacgcttgagtccgggaggtggaggttgcagtgagccaagattgcaccactgcactccagcctgggtgacagascgagatcctgtctcaaaaaaataaaaaaggccaggcgcagtggttcacgcctgtaatcccagcacttcgggaggccgaggtgggcagatcccatgggtaggagatcgagaccatcctggtcagcatggtaaaaccctttctctactaaaaatacaaaaattagctgggcgtggcagcgcatgcctgtaatcccagccactcaggaggctgaggcaggagaatcgcttgaacctgggagtcggaggttgcagtgagctgagatcgtgccactgaactccagcctggcgacagagctagactccgtctccaaaataaataaataaatagataaataaaaaatttttaaaaaagtaaaataaaactttgtttttggaaaattcatatttaattgtcaaaacagtagtggatacactcctttataacttaagctttaatttatacatttttaatgagtcagtgtcaccccaacaggctaaaaattggttcccaaaaggtaaaaaattcttagatattacagtggtttgcaaccctcctgcaaaacaaaatcttgtttggtaattgaagaagggttgagaagcaccggtttcatatgggtaacatggagcggaggagcactgaagctttggtttcctcaggcttaatgcgaatgatatgacaatgcaactttcaggttattgtatgttacgtgttagtgtgtggcgagcacttcgcatagaacgtggtagatgtaagcagtgaaatgttccagttggattttgaaagtcgtttttctctcggcaggtagctaaacagctgaaagaacagcagatggtaatgaggggccaccgagatacctctatggttcatgagcttaataggtaaggctgctagactgacacctttataggcctgtgtttgtgtttcagtctttcagtgttggctaaatgtttttctttgttcaagttcatatttaaaacccttctattcacacagatgaatcaaaatttcacacaaaacttgttttccatgtcaaaaccaacacctgaatttttcattgaaattgtgagcactgctctgctcatcccagtgataaaatcttgcagatcagtgctgttctcagcattggctggctgcacatacaatcaccagagagcttttaaaaaggatttcccaggaactgtggcttatttggtctggggtgagttccaggcatcagggttttattttttggtaacagctttattgagataaaattcagataccatgtaattcactcacttgaagtatattgttcagtgttttttagtatattcagacttgtacagtcataagtttaaacacattttcaccacccagaaagaaaccctgtacctactagcccaccttcccaaccaccagccccagacagccacttttaactttgtctctacagatttgcctattctgtacatttcatataaatggaatcatataatgtatgttattttgtaagtggcttctttcacttggcatcatgttttcacagttcatatccttaattcttttcatgaataatattcaattgtagggctttaccacactttatcagttgatagaaatctgggttgtttccactttttatgaataatgctgttgtgaacatatttgtacaaattttgtgctgctcagctgtcttccaggttggctgctgtagtccacattcccaccagcagtgtatgaggttccactgctgcctgtcctcgccagcactagctctggctttttaatttcagccatcctgatggatgcgaagtggggcacaatcacagctcaccgcagcctcttgggctcaagcgatcctccccgcctcaacctccagagtagcttgggaccacaggtgtrtgccaccacggccagctagctttttttttttttttttttttttttatctgagatggggcctcactttgtcacccaggctggagtgcagtggcaccgtcttggctcactgcaacctcgacctcctgggatcaagcgattctcctgtctcagcctccctagtagcagggattacaggcacgcaccaccatgcccggctaatttttgtatttttagtagagatgggtttccccatgttggccaggctcgtcttgaacttctgatctaatcatccacccgccttggcctcccaaagtgttgggattacaggcatgagccaccatgcctggtgggatccagattccttyttttgcttgggggcatcctgttgtcccagcatcatttgttgaaaaggcactagtatttttccttaaactttttatttatttagaacacagactgcagagtagtatgatggatctccagctccagttgtcaccatcttgctgttcttgtttcacctatcactgcctctaatcttttttgagtattttaaatcccatttttcagttttccaggtgattctaatgtgcagccaaaggttgaattactgaaatggatcctcaaaatcttatgacataaatttgttcatacctactcttcattccacaagagggaacgaaaggttactcattwaaaaatcttaaacattttaatatttaaatctgtccaggaatctcatgtcctgtaagattacatattgtctttcttggctgttgactggttcctggaaattagggtcagagtctttgcctggatcagagctcctgttcccatgccgtgccctgcacacccctccacactgcagcctgttccctctggagttcagggaggctttagacccagctatggctgctgcgcctckacctgtcttcgtctctagctgccgtgctgttcctggtctctgctgccgcctaactwggggttctgtctcctaggtacatccccaccgcagctgcgtttggcggtttgtgcattggcgccctgtcagtgctggctgacttcctgggggccattggatctggcactggaattctgctagcagtcactattatttaccagtatttygaaatatttgttaaagaacaggccgaagttggtgggatgggtgctttgtttttctaaatgttcaaatatttcattttgtgcgtgtgaaagggaaaacactttgacggatcgtttttgtcagatgacactggtggctccccttttctcccctcacagtttcttgtttcgagtgctgactgacccgtttctgaaatgggcaccgagctaagtctgtgtgcagcattagtacccgctgccttaaaactcaagtttacattattcattaaaaaaagtacatctagtgttgcctgtaatgctggaaaccagtgtatctaccttgctgtgttaaatcatgacagtgagacggtgagatggattcgttttgcacacaacattcaaaacacttcatattgcccccacttgttgaaaaataaatgtagttcaaattgccactttccagtatttttgagcttatttaatgagttctggaacatttatatctaatctatattttagataattactttttatacttttttaactcatggtatccccactccccacccccacctcatttttatttgtcccttctcaaagcagccacttagcccacatgggcgaaatcaagtctccagttatttctgccacaactgcttctaaggcckcctccttctcctcctcctcttcctcttcctccttttccttctcctcctcctctcttcccagtgacagcatcatcgtgctgtttgcctgtattggctatgccttctaactccaaccagtcacttgagaatattctttcaagattctgggccccgattcttttctgtttaaatccctaaagcaaagatctaattctcaagcaatgtctgtagttcagtgggggtgaacaatgaatatattcatgctaggaatttgtgtctgttgttgtactcacagcagcaacatgagtgtaaacagtagacaataaacttttatttaagaaaactgattcagttgtgttggaaaaaataaagaaatctgatattaaacgttttctaagatcatttgtataggttcagtgtattcataagaagtccaccctgagatgcctgtaaaagtcaaatgtaattacacttcaaactttaatcctraattattgacagatagatagatagtgaccaacttaagggtaatcatatatgtgactaacatttgggaggaaacaggaaaacagtggtctcaaaacaacaatatcccagtctccatttgaaagagcatagatcttggtaaatcattttgaaaactatgtgctttatttcccaaaagatcaaacttaatttttaaaagacacccttttcagaagtatgggttttcattgctgtttagtttcttaggtgtggtatgtcttacgtagcttatgcttacaaagccaaataatcgcagggcaaggcagataaaggcaggcaggatagtgacagtggctcrgtgagcatccgccaagggcctcagaccactgttaccataaaaacwtccacccagtgttatgacgtccgatttttttttcccttaagaaggtggaaatatggcttttaatacataggaaaccttcagtttttaaatgcagggcaaataaacatttttaaacagtgccagccagactgccagttctcaaacagactgaatttccaaagcacaaccttttcatgtttataaaaaatagaaatggcatttagggatacattctaggatttggctctgacttctaagttgcactcttaggaagaaggagaggataagcttaggtcagctgcagaggtcattcccatggggagtggctggggaggaactgggctatgtggaaagactgggctgcgcccgtctacggatgccttctctcttgatttcaatgattgatagcatgtggctttcagacctaaggaagagttagarctttggagaatcacaatgcctgtgattgaaatcaggatttaaaaaagggttagaggcataggggaaggctaccattacaggaagtagttggatcttaattttcacatgtatagggctagacagcttcatctgtaaagttctgtatttccataattgttttatctttaggaagtccagtgtaaagatcttacagtttcactcataaaaatatcctgggctcagacagtgagcctgtggacaaacggaggctactgcagcattctggcattagcactctgattttatctggagagccctttcatatggttctcagggcctggcttacccgctggagccaggctagaaacatgacttagggctggatgagaatcatcctgagaattccgtgggggccagactggaaagtcctggaaaatcatggagctgctggaggccctaaaagtcaacacaaaaagagctaaactcactcaagaagctaagaaaatggcccaggaacactggtagaactgctagatgacagggtttcaggcatgggaaccagatcaatctgtacttcttgctgtgaactactctgtattgggtttcaggtactggctgatcttgctggttctgttcatggtttaacatcaagatattactgccccaaacatgtcagtcttacagatttgttttcagaaacttcaagtactctttgaggtaagaataggaaaagagatcctcaagcacgtgcagatgcttgcgggatggacctgaattttcattagtctcctagccttggtgtagtgaatggagtcaaccgttttccttacttaaaagctggttcagcctcagtaaatagatgaactgaaaactagtagaggattctatcgaaccctaccctagttggattcaactaccctagataaattttgcatagtaaaaattcaattagaagaggccaaaaagccttttttttctttttaacgctgttttaaacactaacggagtacatggttatttgcatacccagcttagaattttatattgggggttgagagtggaaatgacctaattgagaactcaggtctatttctctatacaaatacccctgtstaccagactggactagaaaagtaactgagctgtagttaactgctgttgagctttaaaaaaattggagtaaacatacttgcatttatattctttgttaattttagctggagttataacaaatttaaaggaaggtcacaacctacctgtaattacaattccataccaccaccacatctgttctgtgcttttattttacgaaaaagctaatggcaaatctacattaaactaagttgaatacaaagtcttagtgaagaaggcctggtggtctcgtttacaaaaatggccagtgtcatatttgggcttaaaatttcaagaagggcacttcaaatggctttgcatttgcatgtttcagygctagagcgtaggaatagaccctggcgtccactgtgagatgttcttcagctaccagagctgtggaaagcaaagaaaacaacttagatcatgccgttaaggaaggacaaaacatcttattcaatcagtgtttgcgcagcaggtactactatatgtcacttcctatgctagatgctggtgataacgttttttttggtctataaggatcttaaagaataaagactataaaggcaagattacattcctagcatgagacaagaacatcagggataatgattttttttttttttggtgagacagtctcgctctgttgcccaagctagagggcaatggcgtgatctcggctcactgcaacctctgcctcctgggtttaagcgattctcctgcctcagcctccccagtagctgggactataggcgcacgcyaccacgcccagctaatttttgtatttttagtagagacggggtttttgccatgttggccaggatggtttcgatctcctgacctcgtgatccacccgcctcagcctcccaaagtgctgggattacaggcgtgagctaccgcacccagccagggatgattttatgtgtkaaaacagcaaagttggaagtgtatagagccaatcgctatacctcatttatagctggggtaggrctttgcttttctgaaaccagatggtgatgattatgtaggatcttagggattccatcttttctgctgctaggggatacatatgttcccccggcaagttaaactgtgtgcatgttaggactggagatctactaccaagaatgcggtctcaggaccttattaccacaggctttcattaaaatttgtttcactcagatggaggttgccagatgtaaaatcagcctcttgttttcctagccgcttgtttgggaacaarcctggggacatttgcaggcaggaagcatgtcctactcacctgggcacagcaggtgcttggtaactggcagatgctactctttgtagcaaactgatctttttttaattttttttttatgtttttgagatggagtctcactttgtcgccaggctgcagtgcagtgccacgatcttggctcactgcaacctgcgcctcccgggttcaagcgattctcctgccccagcctcctgagtagctgggactaccggcatgtaccaccatgcctggctaatktttgtatttttagtagagatggggttttactatgttggccaggctggtctggagctcctgacctcaagtgatcagcctacctcggcctcccaaagtgctgggattacaggcgtgagccaccgcacccggccagcaaactgatcttaaaatgtaatactttccttccgacttctcaaatgttgctggttgaataaacggtttgattactgtattttgattctgctaaagctaggcaacttggttcttttacccctcctcctttatagccatagtagccctctctccacctcccctcacttattctatttttttctcccttttctaagaccaaaagtgaagttaagaaggtggaagggagaaggaagacattttacaaaaaggatactcttctactaaaagataaccccgcacggcatttcacacttgcctacgtcaccctgctttccacgcacctcctcagagggaggggctgttattgttcctgttttatgaaaaaagccgagagaggctacagaacctgtttgatgtgatagctaattatggtccgcggagcctcaaaccgagtcgggcctgtgactccgagctgcgctgcctcgtattgattgtcatgcctttctccaaatacgcaccagataaactattgtatctattcagtatgaytgttctaactctggctttgagctgtcgaggtggcttctaccttaggtctagtttttggaaaggtgaagcaggagtggaagctctctaagggatacgaaatctgattttatccaaagaaatcacagcagcctttgaaagacacattcagattttcaaacaaacaacagacawttcaaaaccaggcgctctgcttattcactgaaaccgtaagctgctgaaactcagggaaaagcttaagaaactggtcttaaagcttcaggccaaacaatgcttcaaatcacatttgaagtaatcacttaaaaacagtagaaaaatcagttatcaattacctaaaacacttatacccaataaaatattcccatgatgacaagtgtctgcttctttctagatgagtgaaagggatttgccagcccatacagaggtgctccttgaagggcccatggtatgtctccatacagtatctcctcgtctccacacagtatctcctcatgtctccatacagtatctcctctcgtggttttatcaaaggacttttctccccataagcttactgtttacaaagtctctaaaagatgggtggccaagaattatacaatgcatctacatgaccagtgatttctaagggccacacagctggtttggtttattatgtgaaaagcatatcacacggagtatacaggaaatacctcaagtatttgttgaaggagcatcatcaatttctccttgaacatacagcctccacaaaggaccatccctcatactagcatacttgaggaaaagctaacagcttatctacccacacctttgcattgctatggactgaaggtttaaagtgtagaatcgttttggctactcagcaggaatgtcatctgggccattctgtaggagaaaaagcctctaccaaaagtttgcacttgacccagaatgctttgctcttattttcaaactctgtgccacccagaaaggaaaattagtagtggtcacctgcagttttacaagttgctaggcatttgactttagtgatacaaaaaagataaagaaatggagttatatttagtacccagtttgctgggatggggacggggagaactggagaaactgggtggcggtctggagaatgcttaccatcaagtctctgcagcaggtcattcttgggtaaagaaatgacttccacaaactctaaacagacaaagtgcaagtgaaaacaaagctaacgtcaagagcctaccaaaacaacccaaaatgtctgcagccatcaccactacactaagtcatacacgctcggccaccaggagttgcagaacatacctccatcccctggaaataaacagaaggaaaacatttcagcaaggcctggagtggtaacatcggaagacttttatacaagaggcgtcaaaaaggctttgagaatttcacagaagcctgggtttctgctaacttaatttatatacattgtcaaactcgagcagtatgaagttattgttctccacataatgttaagtagcaaaatttaaagcatattcgatagtatgtatatttttatagatatgaatctgcgtattatgtaaaatatacagaacatataaaaacttaccttttaaccactatgaaggtacaattcagtagcattaaataacattcaaaaaggtgcacaaccaccaccagtatccatctccagaacttttcatgacacccaacagaaactcgggatccactcaacactaattccccatccctagtagcgcttactctactgtcttcctctatcagtttgtctattctgggcacccagatacgtagaatcagagtatttgcccatcatgttatcgcatgtttcagcgtgtatgtgtgtttgtgtgtataccacactttgtggatgcattcatctgctggcagacacctgggttgtttccacagaggcggccatgaacacaggcacgcaagtatatgagtccctgtttcacttcttctgggtgtagacttaggagatgaaatgccagatcatataataattctgtatctaatatgctgaggaactgccaaacttttccacagtgtctcatatgtatatgtgcagttcaaaaattaagatttattttatttatttatttatttatttatttatttatttatttatttatttattttttggagacagggtctcagtctgttgcccgggctggagtgcagtggtgtgatcttgactcactgcaacctccgcctcctgggttcaagtgattcttgtgtctcagcttcccgagtagctgggattacaggtgcgcaccaccatgcctggctaatttttgtatttttagtagagtcagggtttcaccatgttggccaggctgatctcgagctcctgacctcaagtgatccacccacctcaaccttccaaagtgctgggattacaggcatgagccaccacgcccggcaaaaaataagacttaaaattagttgcagtgggatactgaaacataaatatgaacaactgaagagggtaagaagttaaagaatatcactgatactgatttactgtggtgcacatataaataccccctttaaaaggatgggagagacaacacggaattgacagagacatcacagcttttgaatccaaagttgctaagaaatattatagagcaaagagaaatagtgaataatctgctgcccgttaacaattacttaggccatttttttttttttaagagagacatggtctcattctgtcacagagtggcaccatcatagctcctccaactcctgggcttaagtgatcctcctgcctcaccttccagagcagctgggactacaggggaacttaggccattcttaaaatatacatgaagacagaaaccagggtgatttaagtttctcactgtttactacttaagcctgcagctcatattactaagtgggaatacacttcatatagaaaacagggaaatatgtcatttaacatttttttacaaagaaagcgtaaagatgaatgaagtggcaaaagaaaaatgctaaaatacatgattaggaagagagacaagaatactgatgaagtctatttgaaagaccgattctttccatgaaagactacattcttttaataaatcaaactagcagcaagttccaagacacgtaatgcaaccacaccaccttcatcacagccgacacacacatacctggctttggcttcggccttgcgttttcggcatcatctccgttaatggtgactgtcacgatgtgtatagtacagtttgacaagcctgggtccatacagaccgctgtggagagaagggacagtcagatgcgtcagtccctttggcatttgtttcactatggtcttaggaagaagatgcgtcccgcagctcagcattgacgtggaggtgatgcgggaaaactagttctcacatttggtaggcagatctgcaggctgcaaagcatctgggcactcacactctccccagagctctcgagtcaagcttgctaggtctgcggggttagatggtactgtcaagtcataaaatcccttcaccacatcaaactcaaaaaaatcttccagtgatgagggtagcacatgcatgagatgggtgagcaataaaactcagggggtaggaaattcctaaaggcaattgattttttgagacagagtttcactttgctcttattgcccaggatggagtgcactggcgtgatcttggctcactgcaacctctgcctcctgggttcaattctcctgcctcagcctcccgagtagctgggatcacaggtgtgcgccacccggctaatttttgtatttttagtagagatgggtttcaccatgttggtcaggctggtctcgaactcctgacctcaggtgatccacctgcctcggcctcccaaagtgctgggattacaggcatgagccaccacatccagccaaaaggcaatttaatttcattaattctcccccaacttcaggcccttctggctccagtttcctcctgggaggggagattcccttacacttggtgaccagtcctaatctgtgatttctttctcttcagtgaattctgagcgtaaagaacacccaaataatcaatcccttcccagacggaggaatccatcacttggtgaattttcaagcaataccaacctggagaacattcggcartgtcccctttgtagccagtttcttcttcaagctcccggagagcagctgcttctggggtttcaccatcatctatgagacctgcaagtccaaatcattggtgtgatgggagcgggaaatccggttctttaaaccctccttttttttttttgagatggagtctcactctgtcgcccaggctggagtgcagtggtgcgatctcggcccactgcaacctccgcccgtccaggtttaagcaattctctgcttcagcctccagagtagctgggattacaggcgcgtgccaccacgcccagctaattttttgtatttttagtagagatggggtttcaccatcttagccaggctggtcttgaattcttgatctcatgatccacccacgtcagcctcccaaagtgctgggattacaggtgtgagccactgcgcccggctgaacccctcattcttgtaacacacctgctgctgcgctacgttaggagaatcggagcactgtgaaaagtggtcttacagagaaacctgaggattggaactctttttttttttttttttgaagatgggagtctcacactgttgcccaggctggagtgcagtggtgtgatcttggctcactgcaacctctgcctcctgggtttaaacgattctcctgcctcagcctcctgagtatctgggaccacaggtacacagcaccatgctcggctaatttttgtatttgtagtagaggctaatttgtatttagtctcaccatgttggccaggctgctttcgaactcctggcctcaagtgattcacccgcctcagcctcccaaagtgctgggattacaggcatgagccactgtgcccagcttggaatttttatagaaacaaaaaggcgaaagaataaaactctgagcagatgaatcaggttctgaaggcatcatccagtcgtcctattcagacccagatccatcatgagccttcacgaccatctccacgctgctctgcacagcacgggcagcatctgtgaggagatgtgacttggtggtgaccaactggcttaggcttgggagcttgctgtgtggctgcagcacaggaagcctgctcatattctgcttcctcacacgtaggatgctgacagcatcacctgtcttgtcttcctccctcatagtaaaacaccgaggcctgggaatgaaaggccagaaaggagcaaactggtggccattaggggactcccatggccactgtgaggagtgaacagagaggccaaggaagaggaagggagcagcaacgcagactctttttcctgaaaggaattaaaaaatataataaggctgggcgtggcggcccacacctgtaaccccagcactttgggaggccgaggcgggcagatcacctgaggtcaggggttcgagaccagcctggccaacatggtgaaaccctgtctccactaaaaatacaaaaaattagccaggtgtggtggtacgcacctgtattccagctacgcgggaggctgaggcaggagaatcgcttgaccctgttaggcggaggttgcagtgagctgaaatcgtgccactgcactctagcttgggcaacaaaagygaaactgcatctcaaaaaataaataaataaaataaaataaaataatgaaaaactcaggctgggtgtggtggctcacgcctgtaatcccaacactttgggaggctgaggcaggaggatcacttgaggccaggagtttggggccagcctgggtgacaaagcaaaaccccatctctacaaaaaatttaaaaatcgaatgcggtgatgcacgcctgcagacccagctacccaggaagccaaggcaggaggatcacttgagcccagaaggtcaaggctgcagtgagctgtgattgtgccactgcactccaacatgggcaacagagctagacatagtctcaaaaaaagagcccgggcatggcggctcacacctgtaatcttagcactttgggaagctaaggcgggcagatcacttgagccaaggagttagagatcagcctgggcaacatggcaaaaccccatctctacaaaaaaatacaaaaaatgaggtgggaggatcacctcagcctggggaggttgaggctgcaatgggctgtgatggtgccggagcacaccagcctcagcaacagagaccccatctcaaagaaaaaagaaaaagtgagagaagaatttattcacgttaatattaaaagtaattaaatagcctggccaggcg

SEQ ID NO: 95225 - DNA, 33683 bp, Homo sapiens
cctttggtttgaatgtcctcccatacctcagagtaatttgatcatctgaagccttcttctctcagctcgtcaaagtcattctccatccagctttgttccgttgctggtgaggaactgcgttcctttggaggaggagaggcgctctgcgttttagagtttccagtttttctgtgctttttttttccccatctttgtggttttatctacttttggtctttgatgatggtgatgtacagatgggttttcggtgtggatgtcctttctgtttgttagttttccttctaacagacaggaccctcagctgcaggtctgttggaataccctgccgtgtgaggtgtcagtgtgcccctgctggggggtgcctcccagttaggctgctcgggggtcaggggtcagggacccacttgaggaggcagtctgccggttctcagatctccagctgcgtgctgggagaaccactgctctcttcaaagctgtcagacagggacatttaagtctgcagaggttactgctgtctttttgtttgtctgtgccctgcccccagaggtggagcctacagaggcaggcaggcctccgtgagctgtggtgggctccacccagttcgagcttcccggctgctttgtttacctaatcaagcctgggcaatggcgggcgcccctcccccagcctcgctgccgccttgcagtttgatctcagactgctgtgctagcaatcagcgagattccgtgggcgtaggaccctccgagccaggtgtgggatatagtctcgtggtgcgctgttttttaagccggtctgaaaagcgcaatattcgggtgggagtgacccgattttccaggtgcgtccgtcacccctttctttgactcggaaagggaactccctgaccccttgcgcttcccaggtgaggcaatgcctcgccctgcttcggctcccgcacagtgcgctgcacccactgacctgcgcccactgtctggcactccctagtgagatgaacccggtacctcagatggaaatgcagacatcacccgtcttctgcgtcgctcacgctgggagctgtagaccggagctgttcctattcggccatcttggctcctcctgaacttttatgctctgcttcttctcgaatgctttgctgcttagaaatttcttctggcagataccttaaatcatctctgtcaagttcaaagttccacagatctctagggaactagttctgcatggctggggaggcctcacaatcatggtggaaggcaaggagatgcaaaagcatgtctcacatagcagcaggcagctacagtttatttttaacatggcattcaggagaataatttgaacacgtaagttgggtcatgtcccaaccgtgctaaaacttcctgtggttctctctctctctcagagtgaacaggccaagcacccatcctccctccctctgctcacccaccctgacctctcgctgttccctgacctcactgggtcctcctgcttctcagcatctgtgctcgttcccgctgcttgggcagctgtggccctagatacttgcgtgactcactccctcgcttcctctggtctctgctcagacatcaatttatcaatatttccccaactcccccaccttgcaatagggtcgcatccctctccctctgccccgacctcctccaaggttcttcagagcatccctcaccatctgacacatcatctactctgtttattttctgcttccctgcactagaactcaagccttctgagagcaaggacttgcttttgttccctgcgataaccccagtgcctagatctgtacctggcacataatgggctcaacaaatattctttgaaatgaatgatagtattattcttctcgtttgacagacaaggaaacaggctcagaagtaacatgctaaggtcatcaacctagtaatatagcaattaccaggagctgagcctgtcccatccccttcgctcactgacctaagtgtgaagtcattcccctccttccagtcaggaaaaatgccctcccatctcccaccccaccaccactacaggaactcttctgcagaggctgtccggaatgttcaagcaagtatcactctttatggtagaatgtttcatttgactgaaggttaacctgatcaatgtcagaatggcaactacttttcctttctccttgaattattacttttttttagagacagggtcttgctctgtcacccaggctggagtgcagtggcacaatcatagctcactataacctcaaactcccgggctcaagcaatcctcctcacacagcctcccaagtagctggtattataggcacaggccaccatgcccagctcattttttttttttttgtattttgtagagttgggggctttctgtgttgcccaggctggtctcaaactcctggcctcaagtgagcctcccgcctgacactcctgaagcactgggattacaggtgtgagccatcatgcgtgtyctcttcttgaattatcgaaatgtaactgaaccttctctttgtgttgcaggattaaaattattgtgagatgcaggtcatgtagctaagatgctgtattagtccattttcatgctgctaatgaagacacacccaagaatgggtaatttataaataaaaagaggtttaatgaactcacagttccacgtggctggggaggccttgcaatcatggcagaaggcgaaaggcacatcttacatggtggcagacaagacagaatgagaaccaagcaaaaggggtttcccctcataaaaccatcagatcttgtaagacttattcattaccatgagaacagtatgagggaaccacccccatgattcaattgtctcccaccagagccctcccacaacacatgggaattatgggagctacaattcaagatgagatttgaatggagacatagagccgaaccatatcagatgcagatgcaggaggtgtagaagataggggtgagtgggtaccagcccctgctgtggctttgggacttggcttgatccttggtctcctgctccgtcctcattgagggacaatgaatggtgattagcagcctgggttctgcagctgccccacagctgtccttctttaacagcagttaacgaatccaacattaaacattcctctcccaagcgacttcttgcccccctagatggtgtctatcactgtcactatcacgatcctttaacttttcaagctcatttaaagtgttatctgtaaccaggatgctgtgaaacacatacctcttcatcagtttacacagctcttccagaccttacctgaagttactgagtctgttttgatgtttttttttttttgagacagagtcttgcactgtcacctaggctggagtgcagtggcgcaatctctgcttactgcaccctctgcctcccaggttcaagtaattctcctgcctcagccttccaagtagctgagattacaggcacktgcccccatgcccagctaatttttgtatttttagtagaggcggggtttcaccatgttggccaggctggtctcgaactcctgacctcaggtgatccacccacctcagcctcccaaagcactgggattacagttgtgagccaccacgcccagccgagtccgttttgtttaaggcatgtgagcaacctcaaaaatccatgccaagtggggagcaaaggaagctcatttcacccccacacctccatttatcttctaaactaattttcacccaactcaaggtctgggtccttgtgaagacatttaagtttgcaagaggcacgtgggtaatgactggtggattattaataaaatacagaataataaaaccaggacatggccaagcatctgcagctgtgtggaccaatgaaaatctgaaatctttctggtttatgggcgcttgatcctcctttggctttgtggggctgggggggacagatgtggagtggaggatgagggtgggaaactggaatctgatcatgttacatgcccaagggctctcactgaaagtaggcctcaccatcttccccattgcacctctgaaccatgtcattacatgtctaccttagaaaggcctgaaattaaaaaataataataaataaaaaataaattcaaaaaccactccataagaagctgaaaatctgtacttcacatttctttccctgagccctgaggtggtctaagtcttccttcattcattcccacggcctcccgggaaccgtgtcttcatcctgagttatttctgcagtgttccatcaggcatctgcgggtctttaaaggaaatgtgaaaaggtagcaaagacacatctgtgcagyagagacatgtggcacaggaaagaastgcagaaatcaaagccagggagaagcctgctagccacctagaaatcaaattgtgtcagggagaargcctgcgtggaaaatagattagaaaggcactgaacaagagagaagaaagaaaggcagcccctgcaaaagttaatgagaagcagaggaggccgggagaagcagcctgaatttgaaaagagtcctgcactgcttgaggaaggactcaagattcagtaagttctatcgacttctgcctgggtaatgcggtggccgtccacctgcatgtccctctttgctcaccacgctcaaactgggggctgcaggctctgaaagaaaaccagggaggagggagacatgaaaggaatgggaacgcaggcctaggacttcagatgagaggggaccctccatccacagcgccatccttcatctgacctccagccccgtcctgactctgtaactactrggcctggtgccaacagggctggtgaaattggtgggaactgcgataatgatacctgcctggacaaccccgaatgttgaaagagacggcataggtacaggaactggcagagtggggctccacaaagagcgacctgttattattaaatgtagaagcaggtggaagtggcctctgagcctttccattttcttttgagacggagtctcactctgtcgcccaggctggagtgcagtggcacaatctcggctcactgcaacctccacctcccgggttcaagcgattctcgtgtctcagcctctcaagtagctcggtctataggcgcgcgccaccatgcccagctaattttttatatttttagtagagacggggtttcaccatgttggtcaggctgttctcgaactcctgacctcaggtgatccacctgcctcgacctcccaaagtgttgggattacaggcgtgagccaccgcgcccagccgtctttccattttcatctgcgcagtccaggctcggagtgctctcctagctccttcgtcttcccgaaaccccgtgtatcagttccctcttgcaccagctcccctgtggagtggggcctcctcatctcctcccagccagcgaaagtcatcttagtaagagaccagcagtgaccctaagccctgggggcggtcacttttatcaggctctgcgacccccgtgctcccccgtgctcggcctcgtcggtggcacttggcatgactgggagatcaagctcaggtgttccggaaatttaactttattttgtttatgaactcactttccatttccagatacctggaggcagaaacttaaagtgtggacccccagcgtctggatgagaggacacaaaggattaaaaagtcaacatccgcgcagccaggccccccacgtgctcgccctccaggctcggggcgtttcccaggcaggtaggggagcggttgctaacagtgcagcgccaatcacccctgacgctcgttttcctaatgcaggcaaacgccacattcccggtgttggtgcaaaaagaaatcatcctactcctcccctcgcttaaactttcccacaggccttgtcaaacaacccctggagccggcctgcaggttttcaatgcgcgcctttcaccgtgcggggcgcggcggggagcggcgagccgggggcgggcctcgtgggggcggggcggggcgtgccggggcggggaggggcgtgccggggcggggcggggcgtgccggggcggggcgtagtacggactgggcctggcctggggcgtccccgcgaagcctgggcctgtcaggcggttccgtccgggtctcggccaccgtcgagttccgtcgagttccgtcccggccctgctcacagcagcgccctcggagcgcccagcacctgcggccggccaggcagcgcgatcctgcggcgtctggccatcccgaatgctatggccgccgtcgccgtcttgcgggccttcggggcaagtgggcccatgtgtctccggcgcggcccctgggcccagctccccgcccgcttctgcagccgggacccggccggggcggggcggcgggagtcggagccgcggcccaccagcgcgcggcagctggacggcataaggtcagccccgggccgcgcgggctcctcgcgttggtgccgagtcggggtcagggcgccgccattgacccggggaggacccggggaaccggagccccgtttacgcccctggggagggaactccccgtgtcccggacccgggcctggcagcgagacgcgcaggtgggattgtagggccgtcggtgggactgcccggggctccaaagccctcagggcagcctgcggggtcactgggcctccagtcgctgggcctgcggagaggcctggagaggagggctctgggccccagacccggccctaggggaagtgtgggcttggtcgagctgctccttggccctcacacagaggcgcggggctgggggccaggacagtaaataggacaaagtgcacagcttcctgagcgctgcccttgtggctacgggcccaaaactcttaaaaatgtgcttgtacgccaactggaatctgggcgatggagtcatgaaggtggagggccctaccccctccaggcctgagccgggtgcttgcctggccggggcaagggtgcaaagggaggcctgcgtaccgtgtttcagcatgtttcagttctaaatcaagctattaaataaaacgtcgtcttctcctaccctgagatgttcaccttccgaagaagacctagaaggccgcctgtgaactgataatcctcagatgaccaggtggttccccgcaggggtagagagccagcccatggcttcagcgttttccttttctcctcaccctcctctcatcctttcctacctttgcacccgtcctttctgctgctctgcaaggggctgggtgcacagatctgcagacacccttccagccctcatgctctacagacagctgctcttggccacctttgggcttggggtgcccacagcaggggcagggaattccagggtctcagtaatggccgcagggtttggaaaggggatggttcccttccctgtggaccccttgctcatcaactacaggagcacaggccagagcagggcccaggccagggyctttcttgcccattgctaagtttctgcttctgtaaatctggtcacatctggttggaagcctgacttctgggcatggcggccagatgrcaaaaaggaggccggtcgagttctccagaattaaatatgaatcagcaaaggtggtgactgaaacactctcacatgaatgctagggtttgtttagtaggaaaggaaacttcttaaccaagcattaaagcagcattatgttgggcactaagcaggtgaacttgagcaagaacttgagcgacccaccactcttcaagtgtcccttttccatgctcctcctcccagcagcactgctgtcatggacccagggccagctctgtgctgggctccctgcatccatgatccctaattcttaacagtggcctgcaaagtggataattttatgcccactttactgtgaggaagcaagttcagagaggtgacagcctgttcagggccacacggccagtaggtctcaccagggttcagagaggtccctctgccccaaagtggtttctactctgtttctactcaccacttggtttgaaaagagatggygaaaaaatgggrtgtgatgtcattccactgcattcggtggaattggctgtgaaaaaatagaaatgctattttttgtcmttaggtcaacagatattgagtgtcttctctgtgtgagaacatgacagtccctcacttcagggaccttctcgtggtttacaataatgatcttcagacagctcatgggggcatttatagggaccatctcttaccttgacacttatcacatgctctggtggtgacctcattcttaaagaggttttctcttcggataggtgatattggtggagctctcggtgcaaggcatcgcatgttttgaaccaagatggccactgggagggttcagtgaagagatttttttaggaggtattattaacaggctttgatgccagttgaatcaggaagggatagaaaactagaatgactttttctctcattcaggcaaytgagtggcactgctcagataagaaagagaggagagggscaggtttgagaatgggggratgcccaaagacacctagatggagaaggccagtagacatcggsatgaacgcgtgcacctggagctcagctcagaggcagctgttgacatcaaagtcatcggtgaagttgcctgggaagagtgtggaggacagaattcaggatggctgacattcaggggtgaacagagggctagtagcccacgaaagaagtcaagaaggaccgaccagagaagtacaaaacaaccaggagagaagaaatctgtctccagaaggagggagtgatcragatggccagtggatttggatctggaaattaggagatggttggtgagaagagcttgggtggggygggaggagctgagcctggttcctctgggttggagagtggactctgcagtttagaacactcacagtgtgggagccaaacagctaacaggacacatgaacagattccgyggcgcacratggcctcrggggctggaatctttttatacaattttgcctgagaccttagcactaagattaagcatacgtcaccgatgggatggcagctttttatatttgctacaagaagcaccctcaatatttgatggagaggtttataagcagttctcccaccacccccaccaaatataagttttgaagtctatcagcaaatcagtgcaagtaatttttgtacttaggagagaacaatgtttataagaaacaacaagatgaatagcacagccacttgaagactgcagcaaccttgaaatggtattccaaagaaagtggttattcttattgaaatcaattcagtcatcaaacttgttttccggaaaaccatgacacagaatactatttatggaggatccaagttggctgtaccgcggaaggaatatcagattcaaaaaagattgaggaaggtaggaaacctgtaggtgaaaactgataggaaacatataaaatatataataacaatctggtgtttggctctttgcccatttcttgtaacagccaaaaataagacatttctgtgtataagcagcaagatgacaatacaggttattttattcagcatgtgggctgcctcaaaagagccaacaggccctttggaygccagctttttgtgagaggatatgtccagaagagccctcttgctgtgtggcttgtacttttttccttcatgtatcagcccacttgcagacagcatgaattgttttgtaaacttacaggatgccactgtaagaaaagacgggcctaggtgcagtagctcacgtctgtaatcccagcactttgggaggctgaggcgggtgtatcacctgtagtcaagaatttgagaccagcctggccaacatggtgaaacctcagctctactaaaaatacaaaaattagctgggtgtggtggcacacacctgcaatcccagctacttgggagcctgaggcaagagaatcacttgaacccgggaggcagaggttgcagtgagctgagatcatgccagtgcactccagcctgggcaacaagagtgaaactccatctcaaaaaaaaaaaaaaaaagatggagtgggtacagaaaaatagaatgaatgaataaggccgagaattctatagcacaacagggtgactatagtcaataataatttaattgtacatttgaaactaactaaaagagtatcattggattgttgatttatcctttgtcatccacaaaggataaatgcttgaagggatggataccccatcttccatcacgtgattattgcgcattgcttgcctgtgtcaaaacatcccatgtaccccataaatatatatacacctactatatgtacccacaaaaattaaatataaaaaattgggtcgggcatggtggctcatgcctataatctcaaaactttgggaggctgaggcaagcggatcacctgagatcaggagttcaagaccagcctagccaacatggtgaaaccccatctctactaaaaatatgaaattagccaagtgtggtggcgggcacctgtagtcccagctactcgggaggctgaagcaggagaattgcttgaaccsgggaggtggaggttgcagtgagccgagatctatagagggagttattttcattctgggctcgttttctaacttttttctaaggaacaatggaaagaaagcagtggaaggtagccactgtttgtcagatttctccagcgcctgctatcatgctaagcttgcagcctctctgggtggtgttgattttggaaccgctgtgcattgccctctccgtggaggtggcagtcatgtttctgacagcaaacatggagaaaaagagaaacaaatcaagggaagagggaggaaacccagcctgcatttcaggtcgcctttttcttgttttgacttggctgtaactccagagagttgacagaccctctaaattggcactaagccccagcagttctcctttcttrtctgttaaaaatacctcctaaattagacaggaatcgcagsggtcctcacttgttttgactggtgtgtgaccctgtgattgtaaaatgttcttcmcaggaacatcgtcttgagcartcccaagaagaggaacrcgttgtcacttgcaatgctgaartctctccaaagtgacattcttcatgacgctgacagcaacgatctgaaagtcattatcatctcgggtatgtatctgatatctgtccttagtattctgcagtgcccasaagagctttctgagtctttagtaaactggggcatccctttatttaactsgagaattgttttgaagctcctttacaagaacattaattatggaaaacacctgtgtagttggtggtttggtcctaacrctawtaactgcagaatttataacaaagatgactgttcagtgaarctatgtcttttcctttttgtcagatactaaaacatttctgtacttggctatactggtcttcccctcaaaatcagagaactgatttcttcatggaccttataaaatgggtttaaccactaatcctttggcgcatttgattggtctgacttttcttttcttaccaagctttcgaactgatatctgcagtgcctttaatggtgctggaaaagatgacatattctgctaatttgtttgcttgctccaaaaggaatttttacagaattattttttcttgtgatgatgggactggtmtaaataatagtaatattagcattttaaagcatacacaaaaaaatatgatgatgatgctttgtgatgctatgtttgtttggcaaatcaagcatcagtgtttctggaggcagaaactcagaatgttaccatcttatccatggttaatcgaaagtgttcaactgttttatatggtgaagagaaaagaaattagaactagtacagtccagcagccatgtgggatgttacctggatacagcaaaggcagttaacgtcttctttttttttttatttgatacatagtcttgccctgttgcccaggctggagtgcagtggcatgattatagctcattgcagcctcaaacttctgggctcaagtgatctcccacctcagtctcctgagtagctgggactataggtgtgtgccactacactcagctaattttttattttttgtggagatggtgtcttgctatgttgcccaggctggtctcgaactcctrgcctcaagcaacattgccaccactgtgcctggctaatttttcaggttttattttgcagagacagggtctcactatagcttcttaactacataattacctcacttacaaaaagacaataatattgcctatcaatcaagataactacaacagccaggcatggttgctcatgtctgtaatcccagtactttgggaggccaaggcgggcagatcacttgaggccaagagttygagaccagcctggccaacgtggcaaaaccccatctctactaaaaatacaaaaattagctgggcgtgggggcaggcatctgtaatcccagctacttaggaggctaaggcacaagaattgcttgaacctgggaggcagaggttgcagtgagccgagatcgtgccactgcactccagcctgggcaacagagcaagactctgtctcaaacaacaacaacagcaacaaaagggaagtatgagaaaatgttatcagctcatcagtaggatgacattttcttgttgatgacagcagtgatagcagccacatcttatgatccctcatctgtaaaatgaagaccagaaggcttccgaggtctcttcctaccctcaccttcccasttcagccatgacggctggccactacttgtagatgaaatgacatggacactgccttyggcatgggggattttgatgagcttgtgtgactcaatacactcaggccagagcgagtccscaaataaaggctctgtataaaataccttcgccttggtaactgaatcttctccttatgtaattgtgtatttstwtcattttccatgaagaaattttaggacacggaggcacctaaaaaatgcctcgccttgcatttttcatcacaaaaytctggctggaacttttcaagcaaactggaattattcttctcaaaattagrccattaacttgctctaagtgaaagtttgctgaagttattcagtagacarggaagggaactaactgcccaactctgggtgtttacatctttttgttttcttttctcaattggaaacatttgcagctgaggggcctgtgttttcttctgggcatgacttaaaggagctgacagaggagcaaggccgtgattaccatgccgaagtatttcagacctgttccaaggtaagccaagacgacagtcgacagtgyaaacctgcaaatgatcattacattaaatgttgagttcgccttcgaccttacagataagattttatccatgagacccaaacacccagagcaactggaaactgtttggtcatcagatcctttatcccagcaattatttggtttagaccttttttttttttttttttttttttgagacagagtctccctctgtcgcccaggctggagtgcagtggtgcaatcttggctcactgcaacctctgcctcccaagttcaagcgattctcctgcctcagcctcttgagtagctgggattacaggcatgcaccaccacatctggctaatttttgtatttttagtagagacggggtttcaccatgttggccaggctggtctcaaactcctgacctcagatgatcctcctgcctcgaccttccaaagtgctgggattacaggcatgagccaccgtgcacagcctagtttagacttttaagaagtgaccataatttgctattgattttgttttataccaaagaaagtggaatataggatggtactcatagttgccatgtctagcattgtgggagtatgtcttggtatagaagtttggagtaagaaggaaaaggtgaaaatgtgcgtctttagggaagaagaatctcagattataataattttaaaagattttaaactaaaacaactctattaaatgggaaagaacattaataaatggaataacaataatggtttttaaaattatttttgaatgcttctttcaaccagcctttataatcaccacctccaagtaggaaaattaacctcttcgttgttgcttcttttctgcctctttcaccatattaaggaggaaaaataccgacagccacagaggaagaagaggcacaaaagttttgaatgatttataaaggcatgaaatcaaccccttgggtaatgaaaaattgaatagtgaatccagctttaagtaatacattgttcatctaatgaccatttattgagcacctattatagtacctgcaaggcattgagggaaacataagaaaaaattgttttctgccaaactgaaactgaaaatctatttgggaaacaacacatataaaatggtttcataacctgcctctaagatagtttaacctaattttttattcattcattgacttattcattcatgtatttggtcattaatgatttcacagatgtttaatgatacaagacagaagtgagcaacagggatgtgaatgggaagatgattaagacatccccatttgttttccttgcccttccagaaacccataaagagatcaggttatatttttctcactccatggaaggataaacaggaacagcaatttactcgaagcttcatggggaagtgggagcaagttagagccgagacctgggtctttcgtttcctacattaatgatgtttatgtaacattccactcttgggtttgccaagccttggtgctttaaaagtttttttctaccaatacccagtatgtttggctaaagttgaaaagcatcagagagaaccagtaaagcccttttatcctccttaagggtctgcttttatcactctgctctggtaacttcatgaactgggatctaaacagcatagccatgggccacaggggagcaggccttcttcagaggataaagcccagatttcttggaagcccctaacccttggaggcctctgactccctgaaaaagactcagtgcataaacagggcctaccccaaagtagtaaaataggactgaaagtgtattgatatctttaaaccatttctaagaaaataacattgtcttggataaatatgagtgccatgaacttgtgcaagatttccatttccaagtgaaatcaacagcagattggaacagaatgagctagatatttcattgttcagttcatgcatgagaaaatttgattttagaaaggaggatagaggtatctgaattagctaagcatctaaaaactataccaattggttacagatgacaagtactgcatgatagttaattatatacaaaccaggagtagggcaaattaaggatgagtagaatgagaatgagaagaacttgrctctggaagagtgaaaatgacctgccatggcgctcaggttagagacttcttccttgtctctctacttatatcctgttgaagtttggagacggaaactctagtttaggagaagattctgcactttgctctcataccccgtcaatcaaatgacaatgggacaagatttcttgctttggggagataacatgaaacccttagcgatgctgttaaaggaggttagggcagagttctatttatgtcacattttggagtcagcagacccaaaacagtacctaattcaggaaggtcaaataggtataatcagttcttgactatcaagtgtttgattattctagcttgttgattatttaaattccctttgtcttttttgaacttctctctaactttatattttaaatagtctttttttttttcttgagacagggtctcgctctgtcgcccaggctggattacagtggcatgatctcggctcactgcaacctctgcctcccgggttcaagcaattctcctgcctcagcctcctgagtagctgggactacaggtgtgcaccaccacgcccggttaattttttttttttttttttttttttagtagaaatggggttgcaccatgttggccaggctggtctcaaactcctgacctcaaatgatccgcccaccttgacctcccaaagtgctgggattacaggtgtgagccacagcacccggcctaaaatagtcttaatcatgaaagtaatgagtacttgtaaacagttttgaaagtctagaacagtaaaagattaccaatgtcataccataatcataccacccagagagaaccgtgattaatattttgctgtatttccttttagatcatttttccatgtgaacctgtttttctaaataatcatatatagatgagattacagtatagaattacataatatgattatagcattgattgcttactatatgccagataatattttaagtactttagatatgttaatttatataactgtcgtgttctataaggttggtgctattatcatgtccattttacagatgtgaaaattgaggggttaaatgacttgtccaggattaggcagagtaagtgacagactgggcgtcaaaccctggcagcctggttccagaccactgcataagctccagactgccatgctggtgtttctcttggaaattttcatttcagtgagaatacagcatcctagtcgatgtagtttagtttccactgccatttatttattttgtatatttatattatttatagtttgttactattacaaaataatgatttggtgagcatctttggcatagagctttttacctatttcacattatttcttagaagtagaattcctagatcaaaggtgaatgtatgcatttttaggccggtcacagtggctcacatctgtaatcccagcgctttgggaggccgaggtgagtggatcagttgaggtgaggagtttgagaccaacctggccaacatggtgaaactctgtctctactaaaaatacaaaaaagttagccgggtatggtggtgtacacttgtaatcccaggtactcgggaggctgaggcaggagagtcacttgaacccgggaggcggaggttgcagtgagccaagattgtgccaccgcactccagcttgggtgacagagcaagtctgtttcaaaaaaaaaattaataattatatgcttttttaatgttgaatatatacatattacctatttttctgccaagttttatgaaatcctagccattcacagatgatggacaggacaggtagactgttcaactctaatcccagtcaattggcttttcattagtaacttcagttccttgggtggtgcaacaacactcagaackaaaacaaaatcttttctttctttgcmgcaagactttagaagttcttgggatttcttccccttgttattcattccagttcactggtaatgagcactctcactagcccatccccagtctcgccttacagtgcatgaaccccctaaatccgtgaatagtgttgtgtacaggtgtttacttatctgtgcattcttcttctttttatttttatttttatttttatttgagacagagtctcactgtgtcacccaggctagagtgcaatggcgcgatctcagctcaccgcaacctccacttcccaagttcaagcaattctcctgcctcagcctcccaagtaggctgggattacaggcacgtgccaccacacccagctaatttttgtactttttttttagtagagacagggtttcatgattttgaccaggctggtctcaaactcttgacctcagatgatccacccacctgtgttcttctgaggaggatgtatttcctcatttatcctagggaagagaaatgtcattagcgtttatcaggttctcaaaaggagacctcccccaaaaaaagtcaaaaagcactactataggatatgataccatagccttaaatatataattggttattttagaagaaagctaacgaatatcaaatgtttatggatataaaagataagcttcttagacaaaatcttcaaatcaatgaaggtcatttgtctttgaatacctgccttggggaaagtaacccaaatttcattcccatcctctctccctgccaaggttcaaagagcagcactttagaaattgaagttaccatagcaacacactctgtggcatgaaaacataagctgcaaaaataagttaaagttctggaaatgtattggttggaggggtcacattagcatatttttgtctctcctctctgtgccaatggctctattttaggaattttgtttactttgatgacagcagagtccccccacccccattttaatagaattgggagcatcttcatggtggtaattggagaagtaattattaagaaaactgccttcaaggcccttttccacctcaatttttcaaggaagcaccaaataccagcttcagacctttaacccaagagcttcacacaagcacartgaggacagaactgtctgtgaagggtttgatttgttccccagagagaaaaatccacactcttcttcagcacatttgccaggaaggcaggcgggggtctgtcactactcaagagctgagcttggggccaccccctgcggcagcccccaccaagcttagtgtccttgttgtacaatagggctctgtccccatggggctctcagaaagaccaaattacagtgcctggttcagagtagatatttaataggagttagtgctttctgtgccttttttcacccttcttccatagaatcggataaactcacgcttatgaaaagtgctctggaaacaggaaagtcatataaaatgatagacgttggctgggcgtggtggctcacgcctgtaatctgagcattttgggaggccaaggtgggtggatcatttgaggtcaggaattccaggccagcctggccarcatggtaaaaccccatctttactaaaaataccaaaaaaaatttagctgggcgtggtagcccrtgcctgtagtcccagctactcagraggctgaggcaggaggatggcttgaactcgggaggaagaggttgcagtgagccaggatcttgccactgcactccatcctgggcaacagagtgagactctgtcaaaaaaaaaaaaaaaaaaagcaataggcgttaatgtcgtgcctccctctgggtggaaatgaagtaggtgtgtttgtcccgcaggtcatgatgcacatccggaaccaccccgtycccgtcattgccatggtcaatggcctggccrcggctgccggctgtcarctggttgccagctgcracattgccgtggcgagcgacaagtcctcttttgccactcctggggtgaacgtcgggctcttctgttctacccctggggttgccttggcaagagcagtgcctagaaaggtaatttaactscccccacccacctctgcctcccagccttctccggagttcctcctccagtgcatgcratgattcaagatccgcttgttaaaagtgcctttcatatcaggacgttctgcccagagtgcctctggctagatgggccaggatrttccctctaatggcagggagggaagagccgaccgcctgcctgttcctctgtagcttctgacgccaggcgtcaatttgtgaaatcactgcatttccatcatgcgtacyctcagtaccactgggtaggtttgccgattagttttgtttgtcttcctaatggcccatattttgtaatcttatttgaaatgcaattgagactcagttttgttgcactgaatggttgcccatgagatagaatagcgtactgacataatgccagtatcaagagcctaggatagtagtgtcgctggctcactcttcatcaacagtctgtcttgttccagaacrgatttagaataggtgatttctggagtgtgttgggtttacaacggttgcatttcaggaacatgaatctcctgtgcgtggtatgttgaatctgcccaagaaggagccgtgttgcaaagtggttttgttaactacagtgaagtctgtttccgccacaaagctttcttccttcctataacatcataaaataatatttcctaaacttccctcaagtgtaaaccaacagtgttcttgttgcggaaaaagtgcatccttgttcttaattggaaatctataaaaaagggggcagaatcttagaccacaccaagyaaagaagctaaattgctttctaatgtatgtgatctgctttagcatcagctgtgaaaatcagcaattgctcacatgcctaagacgcaaaagaaataagatccaagggaaatccagtagtaggaccaagaagtttagggaagtattcctttcttttgcagtgcccctttgttagtttttgcagaaatgtgtgtttgtggggaaattctgaagacagatacctgcgaacacacacacttaggacagtgggctggaagtgggcttcacactacagtaggtgccggctggctaaagtgtcttcagactaagaggatgttttcgattctgtcaagatagacacttaccttaaactcattcagtaattttttttttttttttgaaacagagtctcgctctgtcacccaggctggagtacagtggcgctatctcagctcactgcaatgttcaagggattctcctgcctcagcctccatagtaactgggattacaggcacgtgccaccatacccggctaattttgtatttttcgtagagatggggtttcaccctgttggccaggctggcctcaaactcctgacctcaagtagtccgtccccctcggcctcccaaaatgctgggattacaggcgtgagcygccgcacctggcccattcagtaaatatttcttaagactctactttgtgtataacaaattgattgtcagagcttattcataaactatcttataatggtgcaaatcaactyacaaggcctttgtctaataaaagacagctgtgctgacagctgcttgtcctcttcaacacctgatgygctggaaggttccacagtaaagcacttgaaaccttgaagtcagccctactgtctggataagaacccattctctcttaaacttttgaaatcaaggcttattaaatttgattcctagaaacttaacgctagaccatatktatcaagttttaaattgataaaatttaaagtttttgagaagaaaagggggaaaatatgacaaaaacaggccttaagttccaaggaagcccagtcttcagaaaccccatttcataatcacccagttggatgaaccaaagtagcttttacctcccaaggacagagcttctcagaaaatggggcaaaaaatctccagacagccctactcaggttcctggtctctgttctcatgttctgacccccagaaggcctctaaatcactcaacttggagactcgccagttttttctaatcagctgcctgaaagcggttcagagttctgtcaacaagcccttgcacgctgggcttattaatgctgggccactcagagccatgactcaggaacatggcttggggtcaacactgaaaagcagaaatcacagtactgataatgggaattttgyaggargaaacaggcttttggaacttaatgcctttgttaggtttctggatttgcagatctmattgtgtgggcctgctttaggaggaaaagctgggattcataacaatctaataaacctgacccaaaccacctgcccgttgtctttgctgattgtgcgcatgtgaacccatccacggacatccatgcacaggcccaccgagtattttggggggtgggtgcgtgtccctcatacacccacagggaagctagcaggtactttgcaaactggcctgggcaggaagttgggcctgtctcacactggataagacaacatgtatgggtcactagtgccctctcctggccgccgcagggacctgcttggctgtgctggagactggggcagaaactatgcaatcaagcctgtctgttcaaatcagaccaagcctggacatgaataatattccccatttgtaaagagcktctctccttgggcatgatctaaataatgcatctttctggcaccctataaaacaccctgcctggcgcagctgctccgttcccaggcagagctggccttgctcagaccctgagccagtgcctcaagcagctggcctcactggagagcacgtgggaaatgagaagcccttcctcccagaacagtcattttcttgaggcaggcagactctgatttcctaatcagctaatgagaacagagtggggtttccaagctggaaagatggttaaagcccgctgctcaaactggtgcagttgttagagagcctgggagaaaggctgggtctccagcctgccccagacaggctgcgttttagcagtgatttgtgtggccagaggttgggagtgaagttttagaggacgcacagttccacacccagtttgcaagagggtctgggagtttcagggcctcgtgtcctgtgtccggccagtgagatgggacccatgaccctcactccagtgtgcttccctcagagcctggccatgtggcagccccagggacagaccctgctggtgccacggtgccagtgcgaatgcatgtgtgtgtgtgcacaagtatcccatgggttctgttcaggcctgactctttccgtagtgctccttctgcagctcctcaccctgctgctggtgctccctgggagacagatgctatgtgctgtggtctcaatgctgtgtcctccccaaattcctgtgttgaatcctcactcccaaggtgatggtgctggaaggtggggcctttgggggtgatgagatcatgagtatggagcccttgtgaatgagatcagtgactttatgaaaacagccccaggctgggcgtggttgtctcatgcctgtaatcccagcaccgtgggaggccgaggcgggtggatcacctgagatcaggagttcgagaccaacctggccaacatggcgaaacctcgtctctactaaaaatacaaaaattagctgagtatggtggcgcatgcctgtaatcccagctactcgggaggctgaggcaggagaatcacttgaaccctggaggcggaggttgcagtgagccgaggtcgtgccattgctctccagcctgggcaacaacagcaaaactccatctcttaaaaaaaaaaamaaaaaaaaaaaaaaacacgcagtcccagagagctgccttaccccctttttctccatgtgaggacacagctagaaggccccgtttacgaatcaggaagcaggtcctcaccagtcgctgagtgccggcaccctcaccttgaactctccagcctccagaacttgtgagatataaatgtctgttgtttataagccaccaggctgtggtgctgtgttccagcaggctgaatggactaagacaccacacccatgcaaaggggcatgacgtggggagagtcccttgtgggctgtagcacacggttcttgccatttgggtggcctatgagatccagaagacccctctgctttaaataatcacccccgttccaaggctggggtaaccatttaaaagccagcattagagatcatggaccatctgcagttggcctagttgtgttaaaaaataggtgttgcattcactgggtgcctactgagtgcccaggactgttrttatacgagccttgcacctgctatctctaatccttgcaatactgcaggaggtgctcatttttgttttccagatgaaacaaactccaaggcgttagttgaaggycttgtggttagtaagtggcagagctggggttggaactcaggtacatctggctcrgccaggtcccttgagctcaaaccaggtccctgagcttttcttctgcaagcaaaatcttcatagtgacctccctgatttatgtctggctcagatggacaatttttcccccagcctttccattgtacttgatgtgacagtgtgccctgctgtcattagttagtggcttcttcactgtgtcccttggtgatggtcatttgtacccgagcgtgctggctgcggaagtgagaggtgagaaatggcttgctcagaggtcccaggaggaccagtgcccagcaggcttgggaccaggccccgcctgtgaagcttggactccaaaggactcaaccccaaaacatctggggcatttggaattccgtgcagttctgcagctacacactgccggcccaggctgcaagccccccrcctgggatgaatacttgcccatctgctgagccggccaggaaggaacacttactactttggatttactctttcctccttccagctctgactccattcttaacgactctgagagtcatctaggacttgatcattgcaagtgacaaagggatcgataaggttgacttgggtggctttcgttgttttttcttgttgcatcagtttttcaggcttggccacttcctgacatttggtccctctgagttccccaagagccgcctgtgtcagtggagggtaagtggctgggaggagctgtgacacggtctccaccttggcttctgatcccagctgacacgcagttcaggggcagagatggagcagagcactgtcctggccccgtgctgtgacctgctaggtgtcttcagcagggtcctatttcacagctgttcacaacaggatccgctttttagctcctggttcaaccagggcttcagacacgctttggcatgaagtgctcttcctggtcaactaaaaatggtctgccctggaacccccatagctgtcacgttcctgcttcctccarcgtaaaatcagtacagttccaaaacagaggtggtgatttagtccatgcctttaactttacagaggagaaaaggaggccctgcatcacccgtccctggctgccagcccagtgcgtgtggctccatctccacccacggtggcaggaggggccttgggccaggcttctggtctctctatccaagttcaattctgggggatccaatctagtcctgtgacttaaaaaccttctagatccgtggttctaaactgggagcagtattggcccagggatatgtggcgatacctggagacattcttgattgtcacagcttggtggggggtaggtactactgataactagagagtggaggtcaaggatgctgcagaacgtcctgcaatgcacaggacagcccccaccctccctgcaaaagttatccaaacgtcagtatcaccagggttgaaaaaccccactctacatgctgatgcctcccctgtgtgtgtctccggctagtccagctatcaccaggcaacaggccacccacagtatagtagctcaagacaacagaatttgcaatttggacagggcttagcgaggaaggcttctctctgctccagaaggttggcagcctcagctggggattcatctgaaggctgcttgctcacgtgtctggctgtgaatgctacctctcagctgggcccccrcaagggtrgttggcggcacactgcacccggcctctccgtgtggcttgggcttcctcacagcatggaggccaggtcccaagagcaagagccagagccagctgcaagctgtatcacctccttgcccttgtctcaaaggarccaacctgccacttgtgctgtactctrttttcctgcctgcctgcctgtcttcctccctctctccttccttccctcataaatatttgataagttgcttgctatgtgcaggacagtcttccagtgctggagatacagaaatcaacagaagactaaaaaaaatggccaggcatggtggctcacacctgtaatcctagcactttaagaggccaaggccgtggggtcacttgtgcccaggagttcaagaccagcctgcgtaatatagtgagaccccatcttggaaaaaaaaaaaaaatcctgtcctactggagtttacgtgctacaaaggacatacactataaacaaacgtgaaatatatagggtgttaaatggagagaagtgcaaaagatttaaaatgtagccagacgggggtcgcatcagggttcgttttacacttggagcagggcggccatggaagacctcagtgataggggatgcaggaccagaggcctgcaatgagggcgtgtgccaggatgacacccagggaaaagtcaccccaggcagagggaccagcgagtccgaggaccctgaggtgacggtgcatgggcgtatttgaggaacatcagggatgccaccaggattgtgagagcctgagtgacgggtggggaagggaagggcccctgcckgtgtgtccttgtgcacctggggacccctcttttccattttaagtttgactttagaggagccaggcttggtagcgtgcaacagaattggttggtgcagcacgcagtggttgtgaagcagaggacacggtgrggagggagggagctgggctcccccgctcttcaccagccctggaacctcaggggagggtagtaggaggggagagggcatcctttccttgccacatcttaccgattggtgagttaaaaccatgctgggctctacgtctggtccccgaagacattgtctgtaaatccttgcctctccgggaggctgggtctgctctttccagtcaggccaaggtgacagccccgtgactgcttattgtgggaggtggccccagtgggttctgagaggtactggaacccccactccccgccaccccacccccatactgcagtgtctgtggggcatcccatctgatgtggctgccgtcctgtgcttggccctcaaaagaggtagacgaaatccccagccgtggcagggctcagtgaccagatctttgcaggagcaagagaacacgggacagccactgctcccctgggcctggtgtggtttcttcgctcttggaaagatccgctctcctcccgggcaggagttagggcactgaagacgtcagggctggcggatgacgtggtatttgaggaagcaggtcattgagccgaggcgggactcaggtggcgggggcgggtcacaggagagcacytcagtgacmtcccgtgtctccccgtaggtggccttggagatgctctttactggygagcccatttctgcccaggaggccctgctccacgggctgcttagcaaggtggtgccagaggcggagctgcaggaggagaccatgcggatygctaggaagatcgcrtcrctgagccgtccggtggtgtccctgggcaaagccaccttctacaagcagctgccccaggacctggggacggcttactacctcacctcccaggccatggtggacaacctggccctgcgggaygggcaggagggcatcacggccttcctccagaagagaaaacctgtctggtcacacgagccagtgtgagtggaggcagwggagtgaggcccacgggcagcgcccaggagcccaccttcccctctggcccagccaccactgcctctcagcttcaacaggtgacaggctgctttcgtgacttgatattggtgtcatagcatttggcctacattaaaagccacaatttcatggggaaaggacaaaatggagagtgactgaggtgctgacctcagtgcaaggctggtgaaccctgcagcgggccagctatggtgggaagcctggcatttggggtgctccttgcaacgtcttaagcaagcgaccccccgacatagcaaaaggtggcaacccatggaggcagaaagaaggacgccagcctgacccttatctgaaacgtcctaagcagagttaatcctggctgctcaggagaggcgacacatttcaaatctccacgagatattctccacacagaaaatcttcttgattctatagagacttaatcatgcctatggctttgaataatcttatgtgatttaaataaattaaatctttatagagactggtatgttttatctccccagctacactgcaagctgtctaagaaaagaaaaaaaaatcaattaactgtttttgtatgctcacgctgatggcatagagtaggtgcctcctatttctataacaaatgcccttgttatccacgtttttgtgaaacccggaccccaggctcaacctgaggatgaaaacactggggagaggaggtggggtgcacacatcctacgcattaagagcacctcctcccggctgggcgctggctcccgcctataatcccagcactctgggaggccgaggcaggtggattacctgaggtcaggagttcaagaccagcctgaccaacatggtgaaacccgtctctactaaaaatacaaaaattagccaggtgcagtggcgtgtgcctgtaatcccagctacttgggaggctgaggcaggagaatcgcttgaactcagaggcggaggttgcagtgagccgagatggtgccactgcactctagctctggggcaatagagcaagactccgcctcaattaaaaaaaaaaaaggaacacctcctccagacacacttccaaatgatgctcggcttccaggagagatcacagaccagaaccaggtgcagtgcatgagtttcccacctgagcaagggtttgactggggacctaagtctatgacctgctggcttcaggtcaaacgtggcccaagaaatgtcccaaatctcttgtcctcaagattgccgtaaggctgattgtttaaaaccagtttatttcacctgtgagtagaacgtggcctttcatgggatgagtaccacgctggggatgaagagctgtaaggctctagcctgtggttattcaaatggccggggcaagggtctcatggtatgggtgtccctgagttgttctcacaggtttctgttgagaaagacaatttgtttctttcctagattttagaaaacatagagtgtgctcttgaaaaaaaggagtttgttacaactccttacgcacagaaaattatgagagctgccacttcctggacaaacactgtgtgctgagcaccctctgtacattctaatttcatcctcatgccagcccagtggtgtaggtaccgcagcgacctccagctcatgggtgagtaggtgaggccagctttgtccaaggtcaaacagctgagattgtagagtgaggattgcagacaccatctgcctgataaagccacagataattgtccccctggccacactgccccgaagggggccactgggctggtgtgaggttaacctggggtcagcaagcctgaagaaatggccgtcctaccctgtgacagtttcccaagacaaaggaatggccccagcattgaaccccttgctaccgaacactgccagtgtgcaagggaagggacaccagctttgcttatccacagagcaccagtggagtttttactgccaagctcataaacaccgggctgaagcttctagatgagggcgtgatgcactggctgtcgtgggcagctcaagaatcctgcaggtccgtgggaccacctgctgtctcttccccttcagaggacctgctatggaagtcaccaccttgtggttgccagcccacaccatgtaggggagagtgtgatgtcaactctcagggccttggagaaagtaacaaacccttctcaaacacttgacaaaagaaaatcaaaagttgactttcccatttccttatgagcgctatgccctcaaaccatggcctccagtctggcttcccggccccaagctgatgcacactcaggggctagctatacattttaatggccgcctgtgcagaaagtaatccagaaagaaaatctgctccccaccctgcaatgtcatgtaatttatccccaggcaaatatcaattctgggtttatttgtatctctgcttccttcccccgggatagtgaatacaaattttcgataaccacacatgataattgctttcggaaagcctggaaggtttatctttccctctgtgctgtttacttcttggggtagctgagctgagctctgcccagtaggtcatactccatcaggttcaggggccatgcagtaacatgggtatccgtttctgtccgccctggctgagagatccttggagagctggcttgaccctggaaaacaaaaacaaatgaagtgaatgagagaacaccagctccctgactgattctacaccagtgactttaggtctgttacaatgcaaaagcacatggtgatttaggctgaaactgtgccaggcagccctaggaagtacgtcgtcgttgtcttctttttttttttttttttttttttttgagataggttcttgctctgtcacccaatttggagtgcaatgtcatgatcatagctcactgtaacccccacctcctaggctcaagtgatcctcccacttcaacctcccaagtagctgggactacaggtgcatgccaccatgcctggctaatgttttatctttagtaaagacgaggtctcactatgttgcccaggctggtctcaaactcctgaactcaagcgatcctcctgcctcagcctcccacggtgctgggattacaggtgtgagccactgtacccaccctagaatcagtttgttgatatccacacagtaacttgctgggattttgattgggattgcgttgaatctatagaccaagataccagcccaaggaggtgagtctgtgtccacatttttatgatcaaaaatgttagaaaggttgaaaaaaaaatagtacaactgtcaaccatagccaccatctagagtcaattaacatttaatatgtttccatatttgctttaatctgcgtgtgtgtgtgtaaatagtttttggctaaactattcaaacataagttgttgagatcttgatatcttagtcctcgatacttcagtatacatcttctaaaatataaggatgttctctcacacagctgtcatacttctgtctcaactaagaaaatttaaaacagttccttaatattaattatctagtccatgttcaaatttctccagttgttcctgaaagagactttatgctagatttttgaaccaagattcaatcaaggtccacacattgcatttggttgttaggtaccttttaaaaaatgttttagtgttaaaaaattcagaacagtccaattcacttttttaatgacattggctatttaaagtgaccaggccggttgtcttgtaaatgtacaagtttttggatttgcctatgtgtaacaataacacttcactattttccgtatgtatttatttttagaagtaaaccttgattagtttgtgccaaattcggtaattctattccctttcccagtggctagattaagaatgacccatgatataattccaaaaagatgactgggaggcttcttgaaaaaaagtactcccagcttgggcaacacagcaaaacctcatttctacaaaaacacacacaaaaaattagctgggtatggtagcgcacacctgtggtccctgctacctgggaggctgaggcaggaggatcacttgagatgaaggctgcagtgagcaaagattgcaccactgcactccagcctgggcaacagagcaacaccccatcttgaaaaaaagcactcaaggaagttcaattcattattactgtgtaaccatattaccacaaacttaacagcttaaaataacccgttttttggtttttggtttgtttttttgagacggagtctcgctctgtcacccaggctgaagtgcaatggcacaatcttggctcactgcaagctccgcctcccgggttcaagcgattctcctgcctcagcctcctgagtagctgggactacaggcgcgtgccaccaagcctggctaattttttgtatttttagtagagtcagggtttcaccgtgttagccaggatggtcttgatctcctgacctcattatctgccggcctcggcctctcaaagtgctgggattacaggcatgagccaccgcgcccggccccaccagttttttaatcttacaatttctgggggtcaggagtccagggacagcttagctggatcctctgcttcagggtctcagaaagatggaatcccagggtcagccaatgccgcagtctcatccaaggcttgactggagaagggttcacttccagtctcacatggcagttccttgcaggctgccagactgagggcctcagtgtcacactggctgctgagcagaagccacactcagttctctaacatgtggctttctccatgtggcagctcacaacatggaagctgcttcaccaaagccagcaagggagagagagggtctcctagtgacgtggctgttacaattgtatgtaacgtgagcacatgtgtgtaatcacagagagcccatcacctttgccatattccattggtgagaagcaagtcacaggttccatatcacaacaagggatgatgccaacagctggggctcatgaaggccaccctagatgctgtcctctgtagagtaatggcttctctctggagttgtggctgcagacacctgtactcaaaagaagacaaggcagagggcaaaagccttcccaatgaaggtggcagagtggaaagatggaaaaaagccaagactttgataatgtgactgaaccactgtatctttggactcctaattacgtgaaataatccttatggcataagccattttgaagggcattttctgtattttcaacctaaagcattctctatcgtagacgcttttggtggaggtgataaaatcataaataactaatgaacccaaggtagaatgtcctcagatgcaaagaggtacacggtgctgtctgagtccagacaaggaggagtttccttccagctggagagccagaagaaacttcatgaagggcattttgaagaataggtaagtctgggccaggcgcgatggctcatgcctgtaatcccagcactttgggaggccgaggtgggtggatcacctgaggtcaggagttcaagaccagcctggccaacatggtgaaaccccgtctctacttaaaatacaaaaaattagctgggcatggtggtacgcacctgtaatcccagctacttgggaggctgaggcaggagaatcacttgaacccaggaagcgggggtcgcagtgagccgagatcgcaccattgcactccaggctggcggacaagagcaagacctcgtctcaaaagaaaaaaaagaataggtaagtctggaccaggggagatgtgagaggacattccaaggggagaaggccgtgaaagaggtgagaagaggttgctggagtgttcgatacgtgatgggcagtgagagaaaattacgctggggccagatttccaaggcaaaagccagggagttgaagccatctgctaggtagtagggagctgcctgagatttttgattgacagttgtgatcaaaagagggggaatcccaatgtttgagaggaggactacttttcctcaacccaacagacaggaggcttatggcttcatcattttgcagtaaaaagtgtctgaggtgaggagttggagaccagcctagccaacatagtgaaatcccatctctactaaaaatacaaaaaagtagccgggcatggtggtagctggactacagtcccagctacttgggaggctgaggcagaagaatcgcttaaacccaggagacagaggttgcagtgagccgagactgtgccactgtactccagcctaggcaacagagcgagactccatatcaaatatatatatatatatatcttaaatatatatatacacatatatcttaaatatatgtatatacatatatcttaaatatatatatatacatatatatatatttgataatctgaatgaaacagatgctttcctgggagaataaattctaattttggttggtacaagaattagaaaatataaatagaccaatatcacagaagaaaagtgtgtcacagtgatgcaaaacacatgaggcctcgcttgtcttaacagtaaattctagaaaacctttatggaaac

SEQ ID NO: 95226 - DNA, 90904 bp, Homo sapiens
cgcatttaccactgtctgactttataggcttcccttgctcactggcaaactaggtccaccagggcagggacctcatcagaattgttcgttgctgtatccccagaatctggcatctaatagttgctcaagaccatatttattgaattaattgaatgaattgcaatttgagtttaaatatttacttctttttgcctcctcaaccagacaggaaattcatggaaggcagccaaaggccctggttgcttatttatctcctctaaagcaattagctcaattctgcatgggtgacagacattcaaccaagatttgctgaaggccttgaaacaaggataagttacacagctaaccaacatgcattctttccaggtgaatgaacacagtaatgccttgtctttaggcccacacatcacagtctacaaagttttatttttttttttgagacaagagtctccctttgttgcccaggctggagtggagtggcatgatcttggctcactgcaacttccccctcctgggttcaggtgattctcctgcctcagcctcccaagtagctgggattacagacacacgccactacgcctggctagttttttgtacttttggtagagatggggtttcaccatgttcaccaggctggtcttgaactcctgacctcaagtgatctgctcacctcggcctcccaaagtgctgggattacaggcatgaaccactgcgcctggtcataaaggttttttgtttgtttgtctctttgtttgttttcagacagagtttccctcttgttgcccaggctggagtgcaatggcacgatctcggctcactgcaacctccgcctaccaagttcaagcaattctcctgcctcagccccctgagtagctgggattacaggcatgcaccaccatgcccagctaattttgtatttttagtagagacggggtttctccatgttggtcaggctggtctccaactcccaacctcagatgatccacccatctcggcctcccaaaatgctgggattacaggcatgagccaccgtgcccggcaccacaaagtgatttttatatttttttctatagaggtggggtcttgtcatgttgcccaagctggtctcaaactcctgagctgaagcaatctgcccactttggcctccagaagtgctgggattataggcttgagccactgcacccggcctacaatgtatttttatgtatgttaactaatttttatcattttgccaatactttagtagttcttaacctttgcctgaggaaatcagcactcaaatataacaaatgttaatttcttgcacatgctattactaattttgagtaccttgaaaaaacttagatatcaatggcatttaatgtgttctagaatgtctgaataaatattttattttatttatttttttgagacagggtttcattctgtcacccaggctacagtacagtggtgcaatgtcggctcactgcaacctctgcctcctaggttcaagtgattctcctgcctcagcctcccaagtagctgggattacaggtgtgcgcctatgaggcccagctaatttttgtgtttttagtagagatggggtttcaccatgttgtccaggctgctttcaaactcctgacctcaagtgatccatctgcctctgccttccaaagtgctgggattacaggtgtgagccaccgtgcctggtcctaaagaaatattttaagagactggaatatatacctgtatttcaacatgtacatatgcatggagagatttttggatgaatgtttaacaattttcacagtgggcatttctgttggtgggaccttgataacatctgtttttttttttttttgatggagtctcgctgtgtcacccaggctggagtatagtggtgcaatctcagctgactgcaacctctgcctcccgggttcaagtgatccttccacctcagcctccagagtagctgggactacttgtgtgcgccaccaccccggctacattttttgtatttttagtagagatggggtttcaccatgttggtcaggctggtctcaaactcctgacctcaagtgatcctcctacctcagcctcccaaagtgctgggattacaggtgtgagccaccgcgcccagccaataatgtttagtgttttgggctttccattgttcttatttgaattaaaaagaaaaatgttttcctgaccttatgtcttgagattgaatttaaaaattttattattattactattattattattatttttacaggcagggtcttgctatattgcccagactggtctcaaactccaagcctcaagccaccttccggcctaaacctcccaaagcactgggattataggtgtaatccaccatgcctctcctgaatttttttttttcaagcagggtttaagaaaatatatttaaattttttagttttatttccttttcttctcttttgagacaaaaatctcgctgtgttgcccaggctggtcttgaacttctgggctcaagtgatcttcctgcctcagcctcccaaagtactgggattacaggcatgagccactgcgcctggtcatttttatttttatttttaagacaggatctcactcaggctggagtgcagtgtcacaaacatggctcactgtagcctcgacctcctgtgctcaagccatactcccacctcagcctcccgagtagttgggaccacaggcactcgccaccaagcacagctaattttatttatttatttatttatttattgagacggagtctagctctgtcgcccaggctggagtgcagtggcacgatctcggctcactgtaacctctgcctcccaagttcaagtgattctcccacctcagcctcctgagtaactggccttagagatgtgggccaccatgcccggctaatttctttttttaagtagagatggagtttcaccatgttggccaggctggtctcaaactactgacctcaagcgatctgcctgcctcagcctcccgaattgctgggattacaggcgtgagccaccacacttggcctgaaagcatggatcttaagtacccagcatcctgagaagacagagtttacaaaagtatgtaaatcaaatgtatctctgatactttgctgaagaaagccttttacttaacatacttaggatattactatggtgtaactgatgaattagcatctgataatagtttggatatctgtctcctccaaatttcatgttgaatatttttttcttttttattaccttgatcctacgttaaaggaaaaggcccagctcatttttaaattttttgtagagacagaggtctcaccatgttgcctaggctgttctcaaactcctggcttcaagtaatcctctcacctcagtcttccaaagtgctgggattacaggcatgagccactgcatcctgctgagagagagagagagatagatatatatatatatataattttttttttttgagacagagtctcactgtgtcacctaggctggagtgcaatgacgcgatctcggcgcaccaaaacctctgcctccaaggttcaaatgattctcctgcctcagccttccaagtagctgggattacaggcatgtgccaccacacccggctaattttttgtatttttagtagagacggggtttcaccacattggccaggctggtctcgggaactcctgagctcatgatctgcccgcgtcagcctcccaaaatgttgggattacaggtgtgagtcaccacgcccggccagagattcaatttttaaaacaaatatgaggtcagcaaacaaaatctatttctatacaatgttttatttttgtcagtgtaaataacacaaaaaatacggctacttattttcctggctatgtaataattagtacatagcaaatttcattcagggaaaacttttttttttttttttttttgagatggagtctcgctctgtcacccaggctggagtgcaatggcgagatctcggctcaccacaacctccacctcctgggttcatgtgattctcctgcctcaacctcctaagtagctgggattacaggcatgcgccaccacacccggctaattttgtatttttagtagagatggggtttttccgtgttggtcaggctggtctcgaactcccgacctcaggtgatctgcctgccttgacttcccaaaacgctgggattacaagtgtgagcaaccgcccccggacagagaaaacttttaatactgatttctagtaaagcaacagcaacaatcaaattgaatgaatcaaaattccgaagggttttttttgtttgtttttggtggacaggaagtaggatttactggggagtattaagagggggcagcacagtggaagccctcacgagggcagggcacgccacttgtccagagggccatgatggggatgtacttgaccccacagtcatctgcgatgagccgcttttcagccaccatgtcttcaaattcatccgcagtgaacttggtgaagccccacttctttgaaatgtggatcttctggcagccagggaacttgaacttggccctgagcagggattcaatcacatgctccttattctgcagcttgttgcagatggacatgataacttggccaatgtgaaccctggccacagtgccctggagcttttcaaaggcacctcgaatatctgcctggagcctacattggcgtagtgcaaggtcaaagacatgaacatacatctgaaaggcctgtctccatggtcccttagagcagcccatacaagaaacaggctgcataaactaccaaggaagctgttgtttgcagctgaagggtctttgtgtgttttccgtatttctggtcgtgctatttattctcttaccaaaaaaaaaaaaaaaaaaagtaaggtcaggcgtggtggctcacccccttgtaatcccagcagttttggagtctgaggtaggaggatcgcttaagtccaggagttccagaccagcctgggcagcgcagagcaacttcgtctctatgccatgttgacgcgtgcctatagtcctagctactcggaggctggggcaagaggatcgcttgaacccaagaggccgagcctgcagtgagctgtgaatgagtcactgaactccagatgacagagcaagagttagtctcgaaagaaagaaaaaggtagagcgacacttagttctttgatagttttccactatttgtcataaaaactttccaggatattgagctcccaaaatggaaggccaatatcaggcatcagggacttgttctggacgttggaccaaccttaaagggcccacatagaagctgttcacttactttcttttagtctcttgatttaaaatacttaacattcccctttccttggctttttaaccactgagatttgaaagacatgcaaataacgacctagtggacaatctttgctgatgctaaatcttcattttaggattaaaaggttttgggttttcttaaaatttaatgctgaactcagaagagctttctaaggctgttggtgcaccttagggcaggagagcgtctttgctacgccgcgcaggagtgtgtctgcttctctgtgcatctacacgtgtttgcgtgtccctgtaaagtgggttgagtgtgcggctgcggctttccgcccttggctcacactctcagtcttagtggtctcccccagggctatgcatggggtacaggtttctgtggcctcaggccggggtgaggggtcccccaccccggccagggcgcagcagggcggggcacacgtagccgtgcagggtctcgcgcagcccgcgtcaggaccccggggcacacgctcgggcagggggcgtgtccccacgccaccagaaaaagtgttataggctgtttttttttttttttttttttttaaaaagaaagtgttttagaaagcaggcagaagccaagacgtcaggaagggttgcgagggcccgggatccggcggccacagggatgggaggggcgaggagcgaggggcggagtggcacctcccacaacgcgctccctgcggggcgggcggcaacctccatgcggcctcgtccacgctcagcaccggggaagccgaggcggagaagccgcgcgcgcctcagaagctcccggacgcccaggtacgtgggagcactccacagatggcgcaagtacggttgggccaggcggttgcggccccgtcgcgccgcggcctctgtgacgcacggcgaggcctcccgggctgctgcgcggcgcagcgggggcggggcgagcgcgtgagggcggggcggtggggggggggggcggagcgagaggggcggagccggcagaggccccgccccggggccggaggagcgaggacgctacggagcaggcgcgtctcgctgccgccgctgcagctgccgccgctcgctcttctgtggagccgccgccgccgccgccgccatttgcacggggaccccagtgacaggggctcggcggaggggcggaggggcggagggagggggggagggcccgcggagcccccgagggcgggagcgacgccgccggcgccggccgggctccctgcgcgaccgcgccgcccgcggcgggccccgagcagcagcagcagcagcagcggcagcagcggcagcagcagcagcagccgaggccgggcgtgcgcctgaggcggcggcggcggcggccctgcgggcggccgggaggggcgggggcagcggccgccgccgtttgatggatccgaggatcgcctggtttcagccagagcagctcggaccgtccaacagtctgtggatgcagatctgggagacgacccaggggctgaggaacctctacttcaaccaccactgtcacagcagcggcggcgcgagcggcggcggcggcagcagcagcagcagcagcacggccaccggcgggagcggcagcagcaccggcagccccggcggcgcggcctcggccccggccccggccccggccggcatgtatcgctccggggagcgcctgctgggcagccacgcgctgcccgcggagcagcgggacttcctgcccctagagacgaccaacaacaacaacaaccaccaccagcccggggcctgggcccgccgggcgggctcctcggcgtcctcgcctccctcggcgtcctcgtccccgcacccttcggccgccgtccccgccgccgatccagccgattcggcctcgggcagcagcaacaagaggaagcgcgacaacaaggccagcacgtatggactcaactacagcctgctgcagcccagcggagggcgggccgcggggggcggccgagcagacggcggcggggtcgtgtacagcgggaccccgtggaaacggaggaactacaaccagggagtcgtggggtgagtgctggctctgcggcccgatggcctggccggtgcgaatgcgcagccgggcacacgcccacagaggggggttgtgagggtctaggagcggccacccccacggcctgccttcgctgctgttgcacgggggtgctgctggccatccccaaccccccagtcgttcacacctttccccaagcctccttagccgtccacaccctccgtctcctgtcctcccttagtcgtccacaccttcctcccctccctcttaaccgtccacaccttccccaggcccccccctttatccattcactctcctcccatcccccttagttaaacacatctacccttgaccaccaccccgcctccagccctccacacctttttccccatcatcacaactcaagatgagaccgcttagcacgggcctatcattcattccctgagaacattggtgtgtgagtgttttttgatggtgcaggacccggaggtgctttccttgccaagaatagaaacatccagaatgctcctccccatcccccaatcccagacagcaattatgtcagccctgtaaggcattgcctgctcttgaccctttggcccatctttttatttttaaaaaattcccatatcacagatgccctgtctatgcagagggtggcgtgggatgggtgaccactaagtttaggctggtgaaggtggtgagcccttctgaggccctgatagaactttccaggagttcatggtccgcggctccagcttctcactgtaaagttgtcatcctggcagaggcagccaatgcttttcattctagggggtagagatttatgctaatgagtgaatattgcaccactagtgactttctgtttaaagttcagctcttagaaaatggaatcttacctgacccctagtgaattatgtacataagcagggaatgtttccaactagatctcccttcagaagagtccctgtgctggaataggtcactgaatcttatttgttttgtaaaacaaagcttttgggtctcgtgggtgtgtgtgtgtgtgtgtgtgtgtgtgtgtgtgtgtgtgtagcttgagtatggagaaccggctttcaaattgcttttcatttttcaggttgtgttttacattgagggctttagcatgcaaatgaaattaccaattagtaatcccatgtgaaccttttcctggatttattcattcagatctgccctgctttggctgagagagagagttctgtgtacctttttgaaggtctggataaaatgagttggtgggttccatctgcttccagtgggctggtgtctgctctatgctactattacaactcctaccttttgtggaaaatgcagtcaagcgttctaggactggtgctgtggtacatgtcaaacctgccctcacattccagaaagggaacccttttagggttgagtcctctgttgctaagcttcaagggtgctctccatggtcatcacgttttattaaaggcttgtggttccatcctgttagcatttccaagtctacgcgtaaacctgtggtttagtgacaagcaaattgatgttgagggtttctggtagtttcatttcacaggagtaagctccagttargtaatcactgtcaacgaaaaccttgaagttccttaattgcattttactgaagcctctttgcatgtgtctagcaaaagatataagtccaagatgcttattttttttttgataaattagaaattgtcctctcctctacttgctatttaatgcagaagatactctaaaaggttcatatttatacttagaagcaagatgttcttgttcctgattcaaatatattgccctcaaagggattaggagaggaattttcatttcccggagggattactgtttaaaaactggttgtaaacctctttaaaaactgcttatcacttcaccagattttccattcttttgcctcctcccttagaggatgtcagcagttaattttttttttaaattaaaaaaagttcaattctgagacctcctagtttcaaaaaatacattaaacaattcccaagagtgttaagagtgtctgggtgcttagaaattcttgctttgattcatgtrttctgatttttttttttttttgagacggagtttcgctcttgttgcccaggctggagtgcagtggctcgatctcagctcaccgcaacctctgcctcccaggttcaagcgattctgctgcctcagcctcccgagtagctgggattacaggcgcttgccaccacgcctggctaattttttatttttagtagagacggggtttcttcatgttggtcaggctggtctcgaactcctgacctcaggtgatctgcccgtcttggcctcccaaaggactgggattacaggcatgagccaccgtgcccggcctcattatcctgatttcttttttttcttttgagactgggtctcactctgctgcctaggctggagtggagtgacgtgatcatagctcactgtatcctctaactcttgggctcaagtgatcctcctgccttagcttcctggagtagctgggactacaggcacatgtcaccacacctgcctaatttttttatttttactttttgtagagatggggcctccatttgttgcctaggctggtcttcaaccggcctcaagcagtcctcccaccttggcctcacagagtgctgggattataggcaygagccaccattctcgccagtatccttatttcttaactttagaaagtttttctatttttaatataggtatttaaaaaaatctgaattcagagtgcacctcgatgttatgctgttctgagattaaatatactaaaactgttaccattgttttctgaattcttaagatgtgactgatagttagctaataggttaacacattgtggtggttcttggcctctgaactgatagtccagatggggagaggagaccagaaagcatgtgaaaatggactagaaccatgggacagctatatagtctctcgcagctgtcttttgtgttctctgcttcsaccaaattggttgatttatttagaatgctgacctcttgcattgcctaagtccttgatgtttttggtttctcctctgaactctcaaaggtactcacttcatgctcttggtatagcccacttatgtttaactttccttttattatgtgttccctcttacacatgacatggacatttctttaatatgtagagtaagatattggatttcatcctaaagtcttcaaaataaaactcttgagctcatcatctcagacttcttcatgtacccacagaccagggattttgtttgctttttwaaacatttttttattttgtgttttattatttttaaattttaatttaattttatggagacagggtctcgctctgttgcccaggctggagtgcagtggtgtgatctcggctcactgcaacctttgcctgggctcaagccatccacatgccttggcctcccagtgtgctgggattacaggtgtgagccactgtgcctggcctaaatttatttttttaattttttttgagacagggtcttgctctgtcgctcaggctggagtgcagtgtcataatcatgggtcacagcagccttggcctcccaggctgaagtgaacttcccacctcagcctcctgagtagttgggactacaggcgagtgccaccacgcctggctcattttggttttttttgtaaagatggggtcttgtcatgttgcccatgaaggtctccaactcctggtccaagtgatcctcccgcctccgcctagcaaaatgttgggattacaggtgtgagccaccatgcctggccttatttatttatttaattatgaatgaatgaatgaattaatgagagggagtcttgctctcttgcccaggctggagtgtggtggcacaatcttggcccactgcaacctccgtctcccaggttcgagcaattctcctgcctcagcctcccgagtaactgggattacaggcgcccgccaccatgcccaggtaatttttgtatttttagtagagatggggtctcaccatgttggccagactggtttcgaacttctgacctcaagtgatctgcccaccttggcttcccaaagtgtcaggattacaggcatgagccaccatgcctggcctggccttttatgttttaagttgcttccactgattctcttgggctttgctcccctccagaactggcyatggtttaggatgctgtccacctgctgctgcttgtccatgaaaacgagccataaacccttttcttttgaaagacttaattgtttatcactatggagaaagaggggatggcaagaagtagcaaatacagggaatttgcagaacttggtcttgagccctgggtccagaaacttcttctggaaggtgcttggtgtttgtccaagctcatgataggtttctgttggctgtactgccagatctgtagatgcttttttaaggcttggatgacttgttcaaaacaatgttttggagtacaaatttggctgtggggacatcaagaccttgttgggaaacttgggtttaaggtacaatttcttaaactaggatggtgggaatggggatgtgaagggagaatgaatgtgagaggtattacagggtaaggatggagatgattcagattccttaagtggatttaataatcacactgtagctttgaacttgagtgactggggaaatatttgtggtgtttttggaaataagggccagaaggactattggtttgggtaagaagatagtagggggatgtataggtggacctgctagtggggagctgagatttggagggctgagatgtagtgctcttcactgccgtagggcagtatcctcttgtatgtgccatcctctagtgcccattgttcatcatgtcatagtaagcccaagatgttcatgccttttttcagcactgcattagggcttatatctgcttctctttctctctctctctcgctctcgctccctccctctctctctctttctgttttttttttttttttagacggagtttcacttgtgttgcccaggttggagtgcagtggcgcgatcttggctcattgcaacctctgactcccgggttcaagcaattctcctgcctcagcctcccaagtagctgggattacaggcatgtgccaccatgcctaattttgtatctttagtagagatggggtttctccatgttggtcaggctggtgtcaaactcccaacatcaggtgatctacctgcctcggccgcccaaagtgctgggattacaggcatgagccaccgcgcccggcctctctctgcttatttctacacagtgttaccaatgagattggtgttactgctgggctccaaagcaatcagacagattaaagtagattgaatatgaaagaatttagaggcctttttccaagtgatttgtgctctatttaatttctgtgcatttgcagatatagcccacagtaattcttagtgaactagaaccttcaggttattgaattttactgatttgggtactgacatgcgcttttaagaagacattaggttttctatagtgtagattgtacactaacaatataattcatatttaagaatgtctcaaaatttagtatactgtgttcaactaacttaactttctttgttttttttgttttgttttgtttttgttttttgagacggagtcttgctatgccacccaggctggagtgcagtggcgtgatcttggcttactgcaacttcaacactcctgggttcaagtgattttcctgcctcagcctcctgagtagctgggattacaggcacccgccaccacaccggctaatttttgtatttttagtagagacggggtttcgccgtgttggccaggctggtcttggactcctgactcaaatgatctgcctgccttggcctcccacagtgctaggattacagacatgagccactgcgcccggccgctaacttaactttcattccacaacttccatcttttatccaaaatctgtgatcattgaatactgtcaccattaatcattggcatttcagtgtttggactttttttttcccccttcgtctttgtggactcttttttaacactcataaagttttaactattgaaaagcaaaggaaacggtgagtgactttttggagtctgtctacccagtggtcacacaaaaggcttactacattacaggaaagataggatgggaaagggatactagaaaattctaagtcaggaacgggggtgtgtattagaaaaattctgatcctggcatgccagatggccttacatctcaatttcttccgtgaaattcctgccaacaaatcatagtgttagaagtacagaagggtccatgggaacagaatttaagggctccgttggtgatacggaactgatcagatggttctcacttgttctcagataacctgtatactgaatatcacaggaagggtatagacgtcatggcagtggttagatattcttgcacctgctgaagctgagaaaattaaagtaattttttttcctgtggaaagtagaaaatcaagcttttgtatgatttcacacagctttctattctctcttttgttgactctgttaagagtaacatttagtggtggaaactatttcaggatcacacccacaacactagagactgtattaatcacttacacacacataggtatagagtaatcttgaaggggctgtaggccaaagataatgcttttttgaagaattagagactagttaccagcacctggtatttgctgtttcctacagagctgactggacagcctagagtctgctgaggaattcagaggatggccagtagaatgttctttccaccccagaatatttggtagggactcagctgctgtggaatgccaaaaaggctttgagtttgtttcactattcttaagattacacgtaattgtttttttgtaagagattatatatattcaagttgaggatggctttgagttagacttyccttaatttggaatcacacagcagatgatacatttatttccatctgataagttacttgatgatgtaaaaagacatttgagttaaagatttttgggaaaaaagctgaatgttgagccatttatgttgtgtactggttccctattcacttggacaattttaagtcttaaaacaatcttaaccatgtgcacaagagatttcacatagtatttggtaattaaattaaggaattctagctcaagtcatgctttttgctgaaatagttgtatatatttagtgcggaaacctgtgttttcaaattaatgtaataaaagtttcaataaaatggaagcctttattaccgtgtttcaaatgctatgctaaaccttttccatttgttattatattaacctcctcatacatagccctactaatttttttactttctattttgaaataattacagatttataggaagttgtgaaaaatagtacagagcccatgttcccttcaccaagtttcacctaatggtagtagctcacataacgataatttaatgtcaagaaccaggaaattgtcatcgttgcaatccataagccttttttagatttcaccagtttcacatgtatttgtgtgtgtgtgtatatatataattgtatgcaattttatcatgtgtagatctggatagccactgtaacagtctatagttctatatacagagctactccatcacctcagggctccctatgctaccactttatagccgcacgcacccttccagcaaccactaatctgtttgcatctctgtaattttgccattttgagaatgttatataaatggaatcatacagaatgtaactttggctttttttcttttaccatacttcctttgagagccatccaaattgctgcatgtatcagtagttcatttctttttactattgagtagtagtccatagtatggctgaaccacacaatttgtttaaccatttacttattgaaggacataccagaagggtggtttccagttttttggctattgcaaataaagctgctataaacattcatgtatataaatatttttatgtgaatataaagttttcattttgggggaataaatgcccaaatgtttggattgtatggtaagtgcatgtttggtttttagagaaactgctgaactatttattttctagaatgactatatcctcttatattcctatcaacaatatatgagatatccagtttctctgcatccttgctagcatttagtgttaccacttttttatttgagcggttctaatatgtgtagtgatagcctgttttgccttatattaatcaataaaaatagcctcatctaatcttaactttttttattttaaaacatcttggcagtattgaactttctcaatgaaaaatctctaaaattgtgacttgaaaggctttaattttccagtttttctttggttttactcttagcagtaacattttaacttttttttgtctttgaagtaattttcagtgtttcctttacatgttgctttttcttagaaactagttactagcatgaagtagatctttagcctcgttttctaaaaacataaaaaagtaaaactgtggggtttatttcaaaattgagagtcctgtcttttcatatgaggatattttatagtctgttggcttggctatattttagggagtaaacctgtggttagtggtttgttgttggtggtggtaaagttttcttacagtatttttatacctgaataatacctttagactctatagaatagatacttgatcttcaaatctatcctagaataaattgttttatctaaacagctttgtgacctgagaattgggacttagtcccttagttttcccttactggccctttgtagtcactgttttgattttgtgaaagtaacttaactcttagcactgtcaggtattgtacattcctgccaaagcaagaataagaatacataggattgtgttttaattctataattaggtgacttttggctaatttccaggaacttggacttaataaagtactagtgataagtttggaaattttagtgtccttgttctttgaagttattcaccctttactttcttgtttgtttggggtgtttatactactgtccctaaatatagctgaaataaaggaagaaaaataacccctgtaatatcactaccaggatataatttcttttttttttttttttttgagatggagtctcgctctgtcgcccaccatctcggctcactgcaagctctgcctcctgggttcacgccattctcctgcctcatcctcccgagtagctgggactacaggcgcccgccaccacacccggcttattttttgtatttttagtagagacggggtttcactgtgttagccaggatggtcttgatctcctgatcttgtgatccacctgcctcggcctcccaaagtactgggattacaggcatgagccaccgcgcccggcctgatataatttctgttaacagtttgatgtaaatattttttgactttttagtgtttttatatatatatatattttatgtttttcttttatcaatacgcactcttactgtgggaataattttaatgtttttaaagagttgggttttatttgtttattttattttatagaaatggggtctcgccgggtgcgatggctcacgcctgtaatcccagtactttgggaggccaaggcaggagcatcacctgaggtcgggagttcgagaccagcctgaccaacatggataaaccgcctctctactaaaaatacaaaattagccgggcgtggtggcacgtgcctgtaattccagctacttgggaggctgaggcaggagaatcacttgaacccggccggtggaggttgcagtgagcaaagattgtgccattgcactccatcctgggcagcaagagtgaaacttcatctcaaaaaaaataaaaaataaaaaagaaagaaagaaagaaatgggatctcaccattttggctggttttgaacttgtggtctcaagcagtcttcctacctcagcatcccaaagtattgggattacaggtgtgagcccatcctgtttgttgttgttcttttgttgttgtttttagatgaagtctacctctgtcacccaggctggagtgcagtggcgctatcttggctcactgcaagccccgccacccaagttcaagcaattttctgcctcagcctcccgagtagctgggattacaggcgcccaccaccatacctggctaatttttgtatttttagtggagacgaggtttcaccatattggccaggctagtcttgagctcctgacctcgtgatccacctgcctcggcctcccaaagtgctgggattacaggtgtgagccactgcgcctggcctgttgttgtttaaataaaagaaatttattctcttacagtcgaggccagaacttagaactggttttcaatctaaattttttttcttctttgggagaagggcatcagaatattgtggatatacttttttgacttaaaaaaaaaggttttactgggctgggcatggtggctcacctgggattaactgcctgtaaccttggcactttgggaggctgaggcaggtggatcgcttgagtccaggagttcaagagcagcttgggtgacatggtgaaactccgtctctaccaaaaaaaaaaaattagccaggcatggtgatggcgtgcccttgaagtcccagctacttgggaggcttagctgggaggatcgcttgagaccaagaggcagaggttgcagtgagctaagttcatgccactgcactccagcctgggtgacagagcgagacctcgtctgaaaaattttttttttttttactaatatgacaaacatcttttcatttcaaatatatttctataccatttttaatatctcattgcctttagaatgaccttgtattcatagtacatatgtatgtgatattccatttatttattttttttcttttgtctttttttggttatattccattgatttaatgtaccttaatttatcttaccaatttcttgttgaccattttgtttccagtcttttgtttttttaccagacatggattaagctgagcctttgccccagacgacattatttcttttttatcagcaaaatatgcgtgtaatgaaattagaattaaaaggcaaaaaaggttatcctttatttttctacttatttttattgagatagtaattcacataccataaatttaacccttttaaagtgtacagttcagtggttttcataattagaaggttgtacaaccatcgcaactaattccagaacattttcatcaccccagaaagaaactctgaacccattatcactccccactccctcacacaccctaaccctggcagtcacatatagactctctgtctctgtggatttgtttactctggacctttcatataagtggaatcataacagtttgtggccttttgtgcttggcttctcaaacttatctgtttccaaaggttatctgtgtcgtagcatgtgtcagtacttcattcctttttatggctgaatattttattgcatgtatatgccacattttgtttatccattcacctgtagaaggacatttaggttgtttccattttttggctgttatgaatattactgctgtagacgttcatgtacaagtttttatgtgaacgtgttttcatttttcttgggtatatacttaagtgaggaattcctgggtcttaagttaactctctgtttaacattttgaggaactgccaaattattttttaaagtggctgtgacattttatattctaccagcagtgaatgaaatttccaatttctccacatacttgacagcacttttttttttttttttttttgaggtgaagtcttgctttattgcccaggctggagtgcagtagcatgatcttggctcactgcaacctccacctcccgggttcaagcaattcttgtatctctcagcctcccgagtagctgggattacaggcgcatgtcaccatgcctggctaatttttgtattttttatagagacagggttttgccatgttggtcaggctggtcttgaactcctgatttcaagtgatccacctgccttagcctcccagagttctgggattacaggcgtgagccactgcacccagtctgcactttctttattatctgtcttctttattatagccaatctagtgggtatgaagtaagtgtgtcatttgtgattttgattgttagtggtgactaaaaatgttgaatatctttacatgagcttgttggccatgtgcacatctttgttggagaaatatctattcaaatcttttgactattttaaaattgggttatttatctttttattgttgagctataggagttctttattttattttactgagacagggtcttgctctgtcacctaggctggagtgtagtgatgccatcttgactcactgcaacctctgcccccaccccaggctcaagtgatcctcccacctcagtcagcatcccacagctgggaccacaggcgcatgccaccatgcctggctaatttttttttttttttttttttgtattttagtatagacagagtctyaccttattgcccaggctggtctcaaactcctgagctgaagcaatccgcccatctcagcttcccaaagtgctggaattagaggcatgagccactgtgcctggcctattttattttaaagatgaggcctcactttgtcacccaggttggagtgcagtggcgtgatcatagttcactgccattttgccctcctgggctcaaacagtactcacgactcatcttcctgagtagctaggactgcaggcatgtcgctagcatgcccagctaaaacagttctttatattctagatcggggtgtccaatcttttgacttccctgggccacattagaagaagaagaattgtcttgggccacacataaaatacactaacagtaatgacagctgatgagctaaaaaaagaattaccaaaacatctcataatgttttaagaaagtttacaagtttatgttgggccacattcaaagccatcgtgggcctctggccgtgggttggatgagcttgttctaaatgctagacccttatcagatggatggtttgtagatatttatcgcatgctgtgggttttttttttttactttcttttaggtttttttttttcttaaataattaaactgattaaaagctttaatcttttcattttcttgataatgtcttttaaagcacaaagttttgtttcaatgatgtctaatttgtctatttttttttctttggttgcttgtcatacgtaagaaactgttgctaaatccagaatgctgaagatttacttgtgaactttgtttccttctatgagttttatagttttagctcttgtatttaggtctttgatacattttgaggtttttttgttgttgttgttgagacagtcttgctctgtcgcccaggctggagtgcagtggtgtgatcttggcttactgcaccctctgcctcctcggttcaagcaattctcatgcttcagcacccgagtagctcggattacaggcgtgcaccaccaagcctggctaatttttgtatttttagtaaagagggggcttcaccatgtttgtcaggttggtcttgaactcctgggctcaagcaatcctctcatctcggcctccccaagtgctgggattacaggcatgagccaccacgcccagcctgttttgagttcatttttaaaatatggtgtgaggtagaggtcccatttcattcctttgcctgtgggtatccagttgtcccagaaccatttgttgaaatgactcttgtttcctcattgagcaatgtcgtgagaccctatctccataaaaaataattaaaaaaaaaaaaaatgcagaaggaaacagttttgccaattttgtagtatttactgacaatttgcatatgtctttacattctttagctatttatttttcttttgaattactgcctttgttcatttttcttttggagttgtttgtctttttcttattaatttgtaagagattttgcaaatatatacaatttcttttctcttttttttgagatggagttttgctcttcttgcccaggctggagtgcagtggcatgatcttggcttactgcagcctctgcctcctggtttcaagagattcttctgcctcagcttcctgagtagctgggattacaggtgcccaccaccacacccagctaattttttttttttttttttgkatttttagtagagactcggtttcatcatgttggccagactggtctcaaactcctcacctcagttgatccacccaccttggcctcccaaagtgctgggattacagttgtgagccaccgtgcctggacctcccacattattttgaaacaaattccatatcacataatttcttttttttgagacagagtctcgctctgtcacccaggctggaatgcagtggcgtgacctgtgcttactgtaccttctgcctcctaggttcaagcgattctcctgcctcagtctcctgagtagctgggattacaggcacgcaccaccacacctggctagtttttgtatttttagtagagatggggtttcaacatgttggccaggctggtcttgaactcctggcctcaggtggtccgcccacttcggcctcccaaagtgctgggattacaggcttgagccactgcacccagccaatatcatataatttcatatraatagttctttgtgtatctttagataaggacttaaaagaaggcataatcgtaacaccattattaatacctaaaagaagtgagcaataaataattcatttgccgtatcaaatatccaatgttcatatttcctccattgtcccataataatttttaaaagtttgctcaaatcaaaatccaaacaagattatttcaaagcattgtttgaggtacattttaaatcttaatttatagatttctctgctgtctcttttcccccatatttatttgttgaagaaaccaagcgttgtttcctatggactttcctactctctggattttgctggttatattcctctggtatcagtttactatgatccctttttcccctgtattttctgtaaatttgtaactagatctagagatttgtttagattttgtgggttttttttttttttttttttttttttgcaaaaatgcatcataaatggtggtgtgtacatctctcagaagacacatatcttaatgtctttttgtggtattagttattaatgattactgcctatatttattaattcattatttggattgtaagtttatgatagtctcttgatcctttttctgttgttagctggaatgcttctaaaaggagaagcctttcctcttcaagctacttggttgtcttgagggtttgcttcttatagggaaagcaggctaagggtgaaaaaggaaatagtttctaactgggtctgttaatgagctgtcaccccaggcaaagagaagcaaggcaggtcacaggaaagtgaagtgggcttgggatgattggtgccccatgcgtgcatgcatgaagggaagttaatcctccctgtagtgaactctactgggcttttggtcagtagccaagactgtcaaggaagacctttgtcagaagccatacctggcctttgcttttagctgttggtagctgaaggaaaccagaacagacctatgacctgtgaacttctgctcagtagacaaagttctctcagcctaaattcagtaagcaggagtaagatgcttgctttcccttgaagtgaaacgtgaattatatgtttcttcaacttgtgctaatattctttttttttttgagatggagtctcacactgtctcccaggctggagtgcagtggtgcaatctccgctcactgcaacctcagcctcccgagtagctgggattacaggcgcctgccaccacgcctggctaattttttgtatttttagcagagatggggtttcactatgttggccaggctggacttgaactcctgacctcacgatctgcctgcctcggtctcccaaagtgctgggattacaggcgtgagccaccacacctgggcaacttgtgctaatattcttaaccttcatgtgaatcattcctgccctcaggctagcataacccatacagccttccttataggaagatttcctactgggagtgaatttgtccagtgattcccccaagatatcccccaatcaaatattttaaaagtcatcatttacatgtaaaaactatgtaacaagcatggtagcagcagcgttaaagaaatggcagtatggcccctgtaagggaaggctccagaagatgagccgcactcagcctctargtcacagctacyttaggagtttgcagttgttcctggggaagtcagtagacaaagctatctctcaggcctgggcaagatagggattttttttttttctttgagatggagtctcaccctgtcatccaggctggagtgcagcagcatgatctcggttcaccacaacctccacctcctgggttcaagtgattttactgcctcagcctcctgagtagctgggactacaggtgcgggccatcatgcctggctcatttttgtatttttagtagagatggggtttcaccatgttggctaggctagtctcaaactcctgacctcaggtgatccacctgcctcccagagtgctgggattataggcatgagccactgtgcccagtgttttttttttttttaattgtagtgacaggatctcactttgtttcctgggctattcccaaactccaggcctcaagccgtcctcctaccttagcctcccagagtgctggggttacaggtttgacccactgtgcctagtctcagaattcatgtttttaaaagtcactctgtgccaggctcatgcctgtaatcctaatactttgggaggctgaggcaggagggttgcttgagcccaggagtttgagaccagcctggaaaccatagcaaaatcctaactctacaaaaaatacaaaaaatagccaggtgtggtggcatgcacctgtagtcccggttacttgggaggctgaagtgcaaggatcgcttgagcctaggaagttgaggctgcagtgagctgtgatcatgccactgcacaacagcctgggcaacagagtgagaagtaactctggctgtggtggggaaagtggattagtggagaatggaagctgggaaacatggtggttcttgctaagtcagtatcaagggatcacagatgagggggctatttcgtcctaataagggccttggtctcccagatagtcatggatttttctatttagaagctccttctcagtttttcttgcccggttgatatttgtacaacacaggctggatctgtatgggtccacttatatgtggattttttttcaaccaaacttggattaaaaatatagttgtaggccaggcacagtgacttatgcctgtaagcctagcactttgggagcccaaggcaggcggatcagctgaggtcaggagtttgagaccagcctggccaatgtggtgaaaccatgtgcctactaaaaatacaaaaaatagctgggtgtggtggtgtgcacttgtaatcccagctactcaggaggctgaagccagagaattgcttgaacccgggaggtggaggttgcagtgagctaacgcagcagaggttgcagtgagctaacgcagcagaggttgcagtgagccaacggggtggaggttgcagtgagccaagattgcaccaccacactctagcctgtgtgacagagcaagactctgtctcaaaaataaataaataaaaatacagtgtaggccaggtatagtggctcatgcctataatcccagaactttgagaggccaaggcaggcagatcagttgaagccaggagtttgagaccaacctggctaacatggtagaaccccacctctactaaacagaagtacagaaattaaccaggcataggtggtgcatgcctgtaatcccagctgcttgctaaactgaggcaggagaattgggaggcagaggttgcagtgagctatgattgtgccactggactccagactgggtgacagagcgagactctgtctccaagagaaaaaaaaaaattgtacttacaggacatgaaacccacctgtacggtgtgctgactgggagactggagtatgcatagttcttggtaaacaaggggattcctgaaaccaatcccctgagtatatggagggttgactatatattttaatagaatttattacttttttttttttttttagcagttttaggtttatggaaaaattgagcaggagtacatagtttctctatctccctcacatttccccattactagcatcttgaaatagtgtggtacatttgttacaactgaagagccaaatattgatacattactgttaactaaggtccgtaatttactttagagttcactcttggtgttgcagtttctatgagtgttggcaaatatatcatgacatgtatctagcattatagtatcatattgagtagtttcactgccctaaaaatcccctttgttccaccttttcatccctccatctacctgaacccctgataaccactgatccttttacagtctctatagttttaccttttacagaatgtcatatagttggaatcatacagattggcttctttccatgttccttcctggcttgatagctcttttcttttttttgagatggagtctcgctctcgcccaggctggagtgcagtggcgcaatcttggctcactgcaaactctccgcctcctgggttcaagcaattctcctgtctcagcctcccaagtagcttggactacaggcgcatacctcccctgcctggctaatgtttgtatttttggtaaaggtggggttttaccatattggtcaggctggtctcaaacacctgtcctcaggtgatccacccacctcggcctcccaaagtgctgggattacaggcgtgagccaccctgccctgccagctcttttttttgtactgctgaataatactccattgtataggtgtatgagtttatctattcaccttctgaaggacattttggttgctcctaagttttggcaattatgcatgaagttactataaacatctgtgtgtaggtttttgtgtggtcatgtttttagctcatttggataaataccaaggagcacgattgttggatcgtatggtaagagtatgtttagttttgtaagaaactgccaaactgtctttcagggtgactgtaccattttgcattcccaccagcaatgaatcaagttcctgtcgctccacatcctcgttagcatttggtgttgtcagtgttttggcttttcaccattctaatagatatgtagtgatatcttgtcttactttgcagttctctaatgacgtatgatgttgagcatcttttcatctgcttatttgttgttgttgttgttgtgttgttcattgaaatggaatctcgctctattgcccaggctggagtgcaatggtacaatcttggctcactgcaacctctgcctcctgggttcaagtgattctcctgcctcagctccccaagtagctgggattacaggcgcccgccaccatgcccggctagtttttgtatttttagtagagacaggatttcaccatgttggccaggctggtcttgaactcctgaccttaggtgatctgcccgcctcggcctcccaaagtgctgggattacaggcgtgagccactgcgcctggctttcatctgcttatttgatatgtgtatatgttatttggcaaagtatctgttctgatcttttgcccattttttaatcagattgttcttttattgcttctggggttctttttgtttgctttttttgagacagagtcttgctctgtcgcccagtctggaatgcagtggcatgatctcagctcactgcgacctctgcttcctgggttcaagtgattcttgtgccttagcctcccaaatagctgggattacaagcatgtgccactgcacctggctaatttttgtatttatagtagggacagggttttgccatgttggccaggctggtcttggactcctggtcttcagtgatccacccacctttgcctcccaaagtaatgagattacaggcgtgagccaccatgcccggcttattgttaagttttaagagttctttgtatatgtgtattttttgattcttttaaaattaatacttaataaaataattgtacatatttatgggatgcatgtgatattttgatacatgcatacaatgtggatcaaatcaaggtaattagagtattacctcaaacatttgtcatttctttatgttgggaacatttcaaaatgtctagctattttgaaatatacaataaattattatctataagtcacctcattgtgctgtcaaacattagaacttattctttctacctggctttattttttttaccccttaaccaaccattcttcatcagctccccgtctcccctactcttttttttttttttttttttgatacggagtcgctctgttacccaggctagagtacagtggcacaatctcgactcactgcagcttccgcctcccaggtttaagcaattctctgcctcagcctcccgagtagctgggattacaggcgaatgctaccacacccgactaatttttatatttttagtagagatggggtttcaccatcttagccagactggtcttgaactcttgacctcctgatccacccgcctcagcctctcaaagtgccgggattacaggggtgagccaccatgcctggcccctcttactcttttcttagcctctggtatctatcattctactctctacttctatgagatcaacttttttttagctcccacatatgagtaagaacatgtaatatttctctttctgggtctggcttctttgtatattttggataataagtcttttattagatacgtgttttgcaaatattttttccgagtccgtgacttatcttttcattctcttaaatagtgtcttttgcagagcacacattatacattttagtgcagtccagtttaccaattctttctttgatggattttgcttttggtattgtgtctagaaagtcttcgccaaaccacagtcatctagagttccccttatattatcttacaggagttttatagtttttgttttacatttaggtctgtgatctattttaagttaatttttatgtgaaagatataagatctatgtctggattctctctttttttgagatggagtctcgctttgtcgccaggctgaagtgcagtggcgcgatctcggctcactgcaacctctgactccctggttcaagggattctcctgcctcagcctcccgagtagcacatgacaccacgcccagctaatttttgtattttgagtagagacggggttgcaccatgttggccaggatggtcttgatctcttgacctcgtgatccgcccgcctcagcctcccaaagtgctgagattacaggcatgagccaccacgtccggccagtttttttgttttatttatttatttatttgaaacagggtcttgttctgttgcccaggctgcagtatagtgacaccatcaaggcttcgttgcagccttgacctcctagggtcaagttatcttcttgcttcagcctcctgagtagctgggactacaggtgagcaccactctgaccaggtactttttaaatttattttagagacagggttttaccatgttgcccaggctggtcttgaactcctgggctgaaatgcccctcctaccttggcctcccaaagtgttgggattacagacatgaggcactcagcccagccaatataattcttttttttttttttgagacagtcttactctgttgcccaggctggagtgcagtggcatgatcacagctcactgcaacctctgcctcctggactcaagctgtcctcccacctcagcctcccaagcagctgggattatgggtgcccatgaccacacccagctaagtttttaaatttttttagagattgaatctttctttttctcagcctggtctcaaactcctgagctcatatgatctgcccgcctccgtctcccaaagtgctgcgattacaggcatgaaccactacgcccagcctacaatttatttgtaatccaagttttattgaaaaaaaaatccacatataagtggacatatgtagatccaacctgtgttgttccagtgtcaaccatatataccaataattcttttttttttttttttttttttttttttttgagatggagtcttgctctgtcgcccaggctggagtgcagcggtgcaatctcatctcactgcaacctctgcctcccgggttcaagtaattctcctgcctcagcctcctgagcagctgggactacaggcatgcaccaccacgcccagataatttttgtatttttagtagagatggggtttcaccatattggccaggctggtctcaaactcctgacctcaagtgatccacccgccttggcctcccaaagtgttgggattacaggagtgagccactgtgcctggcctataattctttacgtatattgttagattcagtttgctagtattttatttagcatttgtgtatctgtgttcatgagaggtattgttctgtagttttctttggtttcttttctgtctggtttagggtaatgctggcctcatagaataggttaggaaatatttcctctgcttctgtttctgaaagagaattgaggtaatatctatttttttttttttgagatggaatcttgctctgtcgcctaggctggagtgtagtggcgcaatcttggttcactgcaacctctgcctcccaggttcaagtgattctcctgcctcagtctcctgagtagctagaattacaggcatgcaccaccatgcctggctaatttttgtatttttagtagagatggggtttcaytatgtgggccaggctggtcttgaacttctgatctcaggtgatccacctgtcttgtcctcccaatgtgctgggattacaggcgtgagtcactgtgcctggcccgagataatatctaatttaacagtttggtagaattcaccagtgaacccatctgggcctggtgccttttgctttagaaggttattgattattgattcaatttccttaatagataaaggtgcattgagattgtcttttcttcttgggtaagttttaatacattgtgtctttcaagaaattgttccatttcatctaggttatcaaatttgtgggattagagtccttcataatatttctttgttttgcttttggtgtccataggttcagaagtgatggccctttttcattttttctattagtaatttgtgtctttgcccttttttttctttgttaatctggctagaagcttatcaattttgttgatcttttcaaagaaccagtttttggtttcactgatttttctctattaattttgttttcaatttaattgatttctgctctaattggttttcttctgctcactttggatttaattttttttagtttttcyagaaaactaagtttttaagtgaaaactgagattattgatttttagatcttttttctaatgtttacagttaacactgtacaatttcctgtaagcactgctttctctatatcttacaaattttgatgtcatattttcattttcatttagttagaaatatctcttgagacttctttgacccatctgttatttagaagtgtattgtttaatctccaagtatgtattttgggatttttctggctatcgttctgctgttgatttctagtttaattacatgtggtctgagagcataccttgtatgctttctattcttttcaatttgttaaggtgctctttgtggctcaaggtggtctacttttttttttttttttttttttaaagaaaagctggccaggtgcagtggcttatgcctgtactccagcactttgggaggcgtaagtgggaggatcacttgaggtcaggagtttgagaccagcctgggcaacatatagagacttcacttgcacaacaaatttttaaaatattagttgggtatggtggcatatacctgtatatggctgaagtgggaggattgcttgagccctggaggttgaggctacatgagccatgatcgcaccactgtactccagcctgggcaacagagtgaaattttgttctctcttgaaaagaaaaaaaaagttgatgacataaagttcattcatcttttttgtatgtgacttcaaaataactactgatggttaaaaaaaaaatcagaatgatgcaacccaagtgtccatcaatggatgaatagataatatgtggtgtatgaatacaatgggctactattattcagcctttaaaaataagaaaatgctgacactgctgtaacatggatgaacgttcagatcattatgctaaatgagaaaagccagacacaaaaggacaaatattgcatgattgcacttatatgaggtatctggaatataagagtcatagaaacagtaattcagtaattagaataatgcttgccagggcctgtggggaggagggaatgaggaattcatgtttaatgggtacagagtttcatttggaaaagattaaaaagttatggaggtggatggtggtgaggattgcacaacagtgtgaatgtacttaataccactgaactgtacacctaaaaatgattaaaatggtacattttatgttacatatgttttacaacaatttttacagatggaaaaaaattataaaaaacatcaggatggtgttgacagtgaaaaggttaaagagttactttaaaaatttactttattccagccgggtgcggtggctcacacctgtaatcccagcactttgggagaccgaggcgggtggatcacctgaggtcaggagtttgagaccagcctgaccaacatggagaaaccccgtctctactaaaaatacaaaattagccaggtgtggtggcgcatgcctgtaatcccagctacttgggaggctgaggcaggagaatcgcttgaacccgggtggtggaggttgcagtgagccgagatcttgccattgcactccagcctgggcaacaaagcgcaactccgtctcaaaagaaaattttttttttttactttatcccaaatgtttatatttactttggggcttatgtgaccagtttaattttcatttgtaattgacttgatagaacacactaatgttcagttaagatttcttatggtgtggtgaggagtaggatttttatgtaaataagcccaaaattgtatatatgaggttaatctgatatttgcagaagatattcatgcattactgtaaggaccactctgcttattcatttgaccgatttgttacaacatggttagaaatcatcaaggtgtttgagatcaaaggatcttcagaggtgatttactccaatccttttttaaaaaattaataacttgagcctcagagaagttaagtgacattaccaagttctgctgttagtatagtgactttatctttacctgaatccagggtttcttagccctagtctgtaatgtgtcctagtgtgcctctagaatctggtcctgtcagcccaagtctgttaaatcaaataaaaccagggcttggtgcttcaccttgtcttctgccataccgttgggtttcctgtggaccatgcagataatgatgatgggctcagtgggcttgatagtgataactcctaaagcagctccttctaagtgcggttctcaatctgaggaagttaaaaaaaaaattagtgactagaacccacttctcaggtactctgataaaatacatttgtaggggagtgatagttttcactttctttttttctttttcttttttttttgagatggcgtctcgctcttttgcccaggctggagtgcaatggtgcgatctcagcttactgcaacctctgcctcccagtttcaagtgattcttctgccttagcttcctgagtagctgagattacaggtgtgtgccaccatgcctggctaatttttgtatttttattagagacgggatttcaccatggttggtcaggttggtctcgaactcctaaccttgtgatctgcctgcctcagcctcccagagtgctgggattacaggcatgagccactgtgcccagccttcacatattttttgaaataataggccagttgcggtggttcatgcctgtaatctcacactttgggaggccgaggtgggcagatcacttgaggccaggagttcaaggccaccctggccaacatggcgaaaccctgtttctactaaaaatacaaaaaaattagccgggtatgatggcatgtgcctgtggtcccagctactctggaagttgaggcatgagaatcgctttaacttaggaggtggaggttgcagtgaggcaagatcgtgcccctgcactccagcctgggtgacagagcgagactccatctcaaaaaaaaaaaaaaaaaatcgtatgcagtaaaggttgaaaactgctgcccaaaggcgctattaaactataggttcccaaacctggccaattgtcaaaatccctcaagaaggggcagtggggtctaagggaccccattgctgtagaggagattagtagtccaagagtgagatgaactgttggaagtcctcaaacttccaaactattaaaatagaatagttttgcttcctcaaaatagaatagttttcttcctcactgatttttctgtattgattagaaccataacaagtgaattaaacaactacaaaatagttatgtgggccacagacattattgtaatgaagtgaagtttggctcaggccttgtaacacaattgctttttggattaaaagtaaaaatattaaattgtgaaattatgtgtaagttttaaaaaattggtcttgtacaaaagtgttgggtttttctttgtttttaactggatttgtttttaagcaagacagaatatttatattgttggagagtcacaaaggaggtgtgtttgtggatttaaatgtggagacagtgtgccttgaaatgccctttatcagtctgattcaagccacctgcaatcatggatttgaacttttttttttttttcccctgagatagggttgcctaggctggggtgcagtggtgtgatcttggctcactgcaacctctggctcagcctcttggagtacctgggactataggcacacaacatcatatccagctattgtatttttttttttttttttttttatagagacagagtttcaccatgttgtccaggctggtcttgaactcctgagctcaagcaactcacctgcctcggccttccagagtgctgagattataggtgtgagccaccatgcccagccttcactttatttaaaaaccatagtttttaaaagccacattcctactgatgaacacagaggttgtttccagtgttttcatttgcagggctgtagtgattgtttttgcacatgcctctttatgtacatgtgctgtgtcttctgggacagagagtggacattttaagtgttttattggtcctgctaaattgtctttcagccaaactgctgcagaggtgatggagatgaggtgggtactcaggagaattatgctcagtgcttgtgtgctagtcactgacctggaaacattttattaaaaatgctagattaggttagtgatgtaaataccaggtgatagtaaccagaataattgtgtcaaaacatcaagaatcatcaagagatgccaggcatggtggctcatgcctgtaatctcagccctttagtaggaggccgaggtgggcagattgcttgagctcaggagttcaagaccagcctaggcaacatggtgaaaccctgtctctaccaaaaatacaaaaatttgctggatgcagtggtacgtgcatgtggtcccagctactcagtaggctgaggcgggaggatcgcttgagcctgggaggcagaggttgcagtgagccaagactacactacagcccgggcaacagagtgaaaccctgccataaaaaaaggagaaaaagaatcatcaagagaaaacttaatttgatgtgctctgcgttttctttggtgcttcatgtcagtgttagaaactataggttgtatatttattaatttttctcctacatttgttcaacttgactaaaatattaactccaaatgcctagaatttcaaaatacctcttcgttataaagtatcaactatttcttagtccccttaagctgatagtattgtgtcattgtaaaagatcccttgtgaaaaataatttttgtcaacatgaaaggtcttaatgtgtctcctagtttacattttacatggtcttttccatgtatttatatagttgacatatatagctttttttgtaaatacactttcctatgtgaacatgccaaggtttacttaagcattctcttattcttggacatctaaattgcttcttattttctattgtaaataaagtgctagaagcttctttcctgaaaagttatttacttttcacctagtatttccatctgtgttcctcaaaataagattgctgagattcatgtatgttgccagaaagattgtgaggtttaacagtgaatgaggaaaacttttaacactcaaggtctaccaagtacagcaagttttattttaccctttttttttttttttttttttttttttttttttttttttgagttaggccaagttgcctaggctgggctcaagcaatccttctgcctcagcctccggagtagctgggattataggtgtgcagcaccacacccggctttcttgtatttttttttwatttttatttatttatttatttttgagatggagtttcactcttgtcacccaggctggagtgcaatggcccaatctcgactcaccgcaacctctgcctcccaggttcaagcgattcttctgcctcagcctcccaagtagctgggattacaggcatgtgccaccacacccggctaatttttctatttttagtagagacggggttcctccatgttggtcaggctggtctcaaactcccgacctcaggtgatccacccacctgagcctcccaaagtgctgggattacaggtgtgagccaccgtgcctggctgctttcttgtattttatcttgctgtagcggttgtgggatttttgcctggtgtgttcattggagtgtgtgtgtgtgttttgagatgtatgactgtgttggttgtgttgtcatactttgaaggttcattaatgtgctggtctttctatttttcttgttatacttagtcacttaaaaacccttttttttttttttttggaattcttatttttacagtactttgaattcctgttttattaatcaccttcttatctgaaagtgaagtaatagtgtacttggcaccattgaattagaaaattgtgtgtccttggccagaagatcacatacacaggaactcgataagttgagagatttagccgtttcagaaatgggcatttgtgtcttccagtggagaagcatctgcaaaagaattgggcagatttggccaggcgcggtagctcatgcctgtaatcccagcactttgggaggccgaggtgggcagatcacctgaggtcaggagtttgagaccagcctggccaacatggtgaaaccccgtctctactaaaaatacaaaattagccaggcgtggtggctaacccatttaaagtgggtgaattatatcttttatgttttaatgtattcctagagttgtgcaaccatcaccagaataagttgtagaacattttcatcaacccaaaaagaaactttgtattcattagtcgttcctcctcatttctcccctaacctcccagcactaggcaaccatcagaatactttttgtctccacggatttgactgttttggacatttcatattaatggaatgcacaatacagtagtataatacattaattttggaaggccaaaattaatggcttttgatgtctgccttttttcacttagaataatgtcttccaggtccatctgtgttatagcatgtatcattactttatcctttatgtggctgggtaatattccattgtatggttataccatgttttgtttatctattcatcagttgatggacatttaggttgttttccattgactattaagagtaatgctgccggccgggcgcggtggctcacgcctgtaatcccagcactttgggaggctgaggcgggtggatacgagggtcaggagatcgagaccatcctggctaacacggtgaaaccccgtctctactaaaaaacaaaaaattagccgggcgtggtggcgggcgactatagtcccagctacgcaggaggctgaggcaggagaatggcgtaaacccgggaggcggagctggcagtgagccgagatggcgccactgcactccagcctgggcgacagagcgagactccatctcaaaaagaaaaaaaaaagagaataatgctgccatcatgcttgagggtttttttttattttgttttgttttgtttgtggggggagcggagggcacagtctcactctgttacgcaggctggagtgtagtaggcttactgcagcctcctccgccccctggttctagtgattcttgtgcctcaggctcctgagtatcatgctgcaatttttgtgtgagcatacatttttcatttctcttgggtcaatatctaggagtatccccacttttggttctgagtgttaattgagcctgttgtgttctcacattccctgtacttagatggaaatagtgctttgcctaaaaagaaaataaaagacctgattgtgcaggcgagtgagaaagagagagaggcgctagggttatttccaccctgatactctttgggtagtcttggtatgactagcaaagaagcaagctccaagttgtagtttgcttccaagtttctggcttctgtgggaatttctgcatctaagtaatgacaattttcagttacttgcagtaagtaaattatcaaccaatcttactgtgtattactagcctagtaggaatttacttgtatatcgagaggaatgctgcagctttcaccttacttctaatggggattaatgcttacttaacttgcagttttggaggcaagtacaaagtacaggaccaattatggtcatgaagtgagagagaagtctggctagtgaatggtgattggcaactccagttgactgttcatggcatcttagatctgtgaggagggaggagggaaggaaagttcaagctggtctttatggtaagttctggaacatttccctgtgtcaatgggtcatctgttcattcactgtgtgaaatggttgagggaagttttaatttacatgcttccttattgtgtaaacctttgatttttagtgatttcagagtttgtttttataattacttaacacgtgaagaggatgcagagtaacgtatcgaagctctggttaccttccactgggatttgacacatttgatttcctttattccctccttccttcccttcctccctctctcttttcttaaggaatgcaactactcagattcacctgcacacccttggcatacctctcactcccccttacccccacttcctcagaggtgacctgtcctcagaggcaaatgtgtgccctttccatccgtacttttatgctctcatctatgtttacatctattagtacactattgtctgtatttttaaacattacataaatggtgtaatttttacttttaattctgtagtggtgtttctcaaattaagttctgcacaaaacatttttatagatatccagtgttagcttaacgtttttcttattgtggtaaaatatacataagataaaatttaccattttagccatttttaagtttacaagtcagtggcattaagtacattcacagtgttgtataaccatcaccattgtccattgccagaacttttcatcatcctaaacagaaactctgtactcattaaacaatagtttatcactccttccctgcaactagatgctggcaatcaccattctactttctatctctatcaatttgcctcttccatctaagtggaatcctacatatttgtcgctttgtttctggcttttttttcttcttgtgatgctttgttttaattatgttcctggctttcatcatctagcaggctgattccaagktttgtccatgtggtagcttgtatcactttaatgtttttagagatagttaatattacattgtttatatataccacattttgttttttcattcaaccttgatggacatttgaattgtttccccctttacctgttgtgaataatgctgccgtgaacattgataaccaaatatttgtttgaatctctgatttcagttcttttggttccatacctaggagtggaattgctggatcatatgataattctatgtttaactctttgagggatggccagacttttccaccatagctaaatcattttaccttcccacaagcaaagttcaagggctccagtctctccccataaggtcctttgcacttttttttttgagacggaatctcactctgttgcccaggctggagaacagtggcaccatcttgcctgacctcaagtggcacctgccttggcctcccaaagtgctaggattgtaggcgtgggccactgcactctgccaattttttaatttttattttcatttatttttctttttttaatttttaatttttttattttttgaagggataaggtctcactttgttgcccaggctggtcttgaactcctggcttcaagcaatcctcctacctcggcttctcagagtgctgagattataggtgtaagcccctgcacatggcctttactctcttgatagtgtcctttgatgcacaaaagctttcaattttgatgaagtttattttttatcttgttacctgtacatttggtgtcatatatctaagagaccattgccaaatgcagtgtcatgaagctttccctcagtgttttctttctgcagttttatgattttagctcctaagtttaggtctttgatccattttgagttaatttttgtatacagtttgagagtcacacttgaggctctgggcgcagtggctcacgcctgtaatcccactacttggggaggccgaggcggatggatcacctgaggtcaggagtttgagaccagcctggccaacatgccgaaaccctgtctctactaaaaatacaaaaattagccaggcatggtgatgcatacctgtggtcccagctacttgggaggctgaggcaggagaattgcttgaacacaggaggcggaggttgcagtgagccgagattgtgccactgcactccagcctgggcgacagagcgagactccatcgtgcggggtggggggtaaaagtcaaacttgagtcttttgcctgtggatatccagttttcccatcactatttgttgaaaagactatcctttctcaactgtgaatggtcttggtaccctagctgaagttatttttattattatgttacttaggaatgcacataaggcctggcacggtggctcatgcttgtaattgcagcactttgagaggtcaaggtgggaggattccttgagccgaggagtttgagaccagcctgggcaatatagcagcaagaccccatctctatattttaaaaaaagaagaaaaaaaaacctctgatgcataaaatatttaaacttgtatgcattcttttctttctttattttttaaaaattgagacagcagcttactctgttgtccaggctggtcttgaactcctgggctcaagcagttcctctcaccttggcctgcagtgctgagatgacaggtgtgaaccactacacctggcctgcttacagattataaaaagaaaataagtttacaagttaaagacagataaaatgacaaaatcagtaaaattaaaattacttttatggagccgatgatgtttattccagttgctccgctcattgtgaatatggtattgttgctgcggcagatttggaggccgtggcagatttggaggctttggcaatggcttctgttaccttgccatgaggtaactcagttccctcatcacttttctctgagaactataaaaccttggaggggtgccttctgcccttcgcttggcatgtatattatgcagggatcaggtcttactccgttcttgattgttagtacaaattagttaaaatcgtattgtttggccttagcctgatggtaaacacaacagcacacgtgggctgtgaaatctctgggcagctctgtgtttctagggaagcatctcgatgatccagaacaggcttatactaatgttttagtgtaattttgaaatgaaaacacagcatttaaaaattcttatagagaatgtatagaccttgagaagtgttagcagacccagtttacgacatgtctcaatattatgaaacattgctttattccctatcctgcttgtacatttaattttttcatccagttttaaacaacttgggtactgtggcctgtgcctgtattcccagctactagggaggctgaggcaggaggattgcttgagcacaggactttgagggctgtagtgagctgtgattgtgcctgtgaatagccattgtgctccagcctgggcaacatagcaagaccctgataccttgggtttttaaaaaacaaaacaagatacatgctgacatttctggtttggcaggcagagcttgttctgctccccaccctcccttttcccatagtaaccatttataggacatctcactgttgtctactctgtgttgcctctgcttccctgcstggtagatctaggaatcttaggatttcttagttttagctggtgatccgtatctttttcttaattccattgtaacttcagcttttcttattgcttgtaggaaggctgtttccattgaatacaaacaaaataaaagcttttattcttaatcttagagataggatgtttgtatttaaaaataattgtgctgtcaaaattctgtcaagttggcttttaccacattagttttttttaatgtggtttatatgaccctggagtaccttgtcttctcactgttaaattctcaactgagttgtccctatttaaagtgtgagactgtgccagtttgattttaaaatattgcaagtgcgttatggcaagataaaactgcaaagaaagaaccttcatgtccctttgattataaatgcttttggcacttgtttctactttttcctaatgttttttgaggaaagaacctccaactctccagacaggtctgggggcaaatgactaaaacatgaactgaggccctgggctgtctctgtgaggatatcccctctattctctctgaaatgtcccagcatgtggtgcatttcttgttagtgtggactcctctgtatataacacatcttatttatcttctgtgcataacatgaagtagtgccctaatgcaattccaggatgtaattcagcatttctataaaaatacagtgtttttctacatttgcatcaaaaaataaccagataattatatttattaagaaaatagcatttttggctgggtgtggtagctcacgtaatcccagcactttgggaggccgaggcaggcagatcacttgaggtcaggagtgaggcaggcagatcacttgagatcaggagttcgagaccagcctggccaacatggtgaaaccccatctctactaaaaatgcaaaattagcctggcgtagtggtgcatgcctgtaatcctagctactcaggagactgaggcaggagaatcacttgaacttgggaaggggagattgcagtgagctgagattgtgccactgcactccagcctaggcaacagagtgagactctgtttcaaaaaaaaaaaaaaaaaacaaagaaaagaaaagaaagaaagaaatgtatttttggtatttgttttcacaaactagagcatttatgtgaaataacattgctagtattgatattataccatagtataatacttagttcttcagcgatgtatctctgctgatcagctacatgatatctacttgagctgttggattttttttaagaacagtgcatttttgaatgcttttgaaaaattgtagtaaaatacataaaacaacatttaccttgtaagcattttaattggtacaattcagtgacattaagtacagtcccagtttagtgcaaccactgttactgtctagtttcagaacgtttttgccccagatggatactctgtacctgttgaacattcagtcctcatggcccaataatctttatgtctgtatagatttgcctattctgcatattttatataaatggaatcatgtcttttgtgtctggcttcttttacytagcatagtattttcaaggttcatccatgttgcagcatgtttcaatactttgttcctttttatgtccattgtatggatatgccacatttcgttaatgacaattcttttgggtagctacattttaaaacattatagtagaatacatatagcatacaatttactatcttaaccatttaagcctgcagttcagtggcattaaatacattcacgttactgtgcaattatcaccaccatctgtttgcagaaayttttcatctcctccatttgaaactctgtatacattaaacatgaactctcccttctccccttcctccagccctggcagccaccgttctacatttttatctttctgacagagattttactactctaggtacctcacataagtgaaatcaaccagtatttatccttttgtgaccagcttatttcattagcttaatgtcctcaaggttcatmcatgttgtagcatatgtcaacatgactttccttttaaggttgaataatattccattgtatgtatatgtcacaatttgtttctccatttatccatcactggacatttgggttgcttttacctatcggctgtcttgaatcatgttgctatagctgtacaagtatctatttgagttyctgctatcaattctttaagtatatgcccagaagtggaattgctggatcatatggtaattccgtgtctggttttttttttgaggaagtgccatgctgttttccacacagctgtaccattgtacattccccccagcaatgtacgagggctctgatttcttcacatccttgctaacacttagtattttttttgatagaatagccatcctaatggctacttttaaagtatgtttaacattatttatttatttttaattttttttgtagagatggcatcttactgtgttgcccaggctggtcatgaactcctgggctcaagcagtcctcctgcttcagcctcccaaagtgttcggattataggcgtgagccaccatgcccagcccaaatttaaatatataactaaacacatagcagctaacaccaagcctttaaaaatatcattaataggccaggcgcagtggctcatgcctgtaatcccagcactttgggaggccgaggcgggcagatcacctgaggtcgcgagttcgagaccagcctgaccaacatggagaaaccctgtctctactaaaaatacaaaattagccgggcatggtggcacatgcctgtaatcccagctactggggaggctgaggcaggagaatcacttgaacctgggaggcggaggttgcggtgagtcgagatcgcaccattgccctccagcctgggcaacaagagcaaaactccatctcaaaaaaacaaacaaacaaacaaaatatatatatcattaataggccgggcatggtgtctcacgcttgtaatcccagtgctttgagaggccgaggtgggcagatcactggggtcaggagttcgataccagcctgggcaacatggtgaaaccctgtctctgctaaaaatacaaaaattagccatgcatggtggtaagcacctgtaatcccagctactcaggaggctgaggctggagaatgcttggacctgggaggtggaggctacagtgagctgagatcacactccagcctgggtgacagagcaagactctgtctcaaaaaaaaaaaaaaaatcattaataaatgtgatcttttttcttcctatacaacaagttgtcaagcaagtatgaccttcttaattgaccctttgacatgaactgggatgagatcgtggaggatgttgaggagacagttgttaccatagtgcacttctaaaaactttaattctatagatttctttaaaattttttttaaaattattatgagtacacaataggtgcatctatagatttcattaccctcaaataaatgtacaaggcaatgcagagaaatgcacagtgtaacttggtagacttgacctatcaagttactgttgaatatattatggagcctgtgtattaccaggggcagcagacttttcctgtaaagatagttgttttcagctttgttgaatctgtggtctctgtcttaactacaactgagaaagccattgacaatatatagatgaatgtacatgactattctaataaaactgtgtacactgtaatttgaattgcacataattttcatgtgtctcctgtataattcttctttgacttcttttcaaccattaaaaaatgtaaaaacaggccaggcgtggtggctcatgcttgtaatcccagcactttgggaggctgggtggattgctggagcccaggagcttgagatcagcctgagcaatgtgacgaaaccctgtctctacaaaaaattagctgggcatggtgttatgtgcctgtggtcccagctacttgggaggctgaggtaggaggattgcctgaacccgaggaagtcaaggctacagtggtttgtgccactgcactctagcctaggtgacagagtgagaccctgtctcagtgaatgaatgaatacattattagcttgtggactatacaaaaatcagaggctggaggtgagctgggtatggccattgggtgtggtttgctgacttctggtagagaggaattaggagatgttaaaggtggtggaactgtcagatacttgcattcttttagaaatactttggagttagctttttggttcaggcaaaggaccaaagggttaggagagtcaggccggtaaagaggagtggtgggcccatagcagcagttcctggagttttttttttttttttttttttgtgagacggagttttgctctgtcgcccaggctggagtgcagtggcacgatctcggctcactgcaacctctgcctcctgggctcaagcaattctcctgcctcagcctcccgagtagctgggactacaggtgcccaccgccacgcccggccaatttttttctatttttagtagagatgggatttcaccgtgtttgctaggatggtctcgatctcctgacctcgtgatccacctgcctcggcctcccaaagtgttgggattacaggtgtgagtcaccgcgcctggccaggtcctggagtctttaagaggaggtttgtctgatggttggttggacaaaagcctgggcatgttgtcaccttccataagtgtttgtgggaatgtaggtaatgaggaggagtaaaggattcctgaaggatgaggaggagggctggtggctgccataggaagtgatcactgttttggcagacctgtcttagagtaatgaccgtcatactctctcattgcccttgtgaactcatgaaatcccatggctgctaaagctgaaggtcaagtggggacttcccggccactgggcttagcaccccacagagctgtggagtgggcattaatgtcccttttttatagatgcrgagactgagaatgaggactgttggtaacttttgaaagggcactcagctagaaaagtctgagccaggatttcaagtcccatggctttacctctgtgktcctaatatttggtgtgttcaagtgagatctgtttttttcctatttcattttgattattgattttcataaatttttttctcttttgagatagtatcttctctctcttttcttttttctgttctttctttctcttttctttcttttttttttttttctctgagacggrgtcttgctctgtcgcccaggctggagtgcaatggtgcaatctcagttcactgcaacctctgcctctcgggttcaagcgattctcccatctcagcctcctgagttgctgagattacaggcacctgccatcttgcctggctagtttttgtatttttgtagagacggggtttcatcacgttggccaggctggtcttgaacttctgacctcaggcgatccacccgcctctgcctcccaaagcgctgtgattatatgcatgagccaccatgcctggccattatttctttctttctttctttttctttttttcaggttcattgaatttgctttgagacagggtcttgctctgttgcccaggctgaagcgcagtggtgcagtcatggctcactggagcatcaatttcctgggctcaagcgatacttgcacttcagcacccctccacccccacccgctcctttcccccacagtagctggaactacaggcgctagccaccgtgcttggctaatttttttttttttttttttttgagacrgagtctcgctctgtcacccaggctggagtgcagtggcgcgatctcggctcactgcaagctctgcctcccaggttcacatcattctcctgcctcagcctcccragtagctgggactacaggcgcccgccaccatgcccggctaattttttgtattttttagtagagacggggtttcaccgtgttagccaggatggtctcgatctcctgaccttgtgatccgccygcctcggcctcccaaagtgctgggattacaggcatgagccactgcacccggcctggctaatttttaaatttttttttgtagactgcccaggcttgtttaattgattttctatgtgatcttagggaaatcgattatttcccataaacatttttttaattagaagttaaattctgcctagtttgattcacaggattattgtggatgactgaaacagagaataggtaagagcttctttgaaaaatatgaggtaccatacagaagttagatgctttgtcctggtgataccccctccaaagcacagctaaggaaatgtggaaggcactcttatctcatcatatagctttgaaagcctagcattgaaagtacgaacttgattcttttggagaaatcctttggctctcagtgagtttactttctattaatgactgtgttaagcggaatgaaaactgaaagaggaaaggggaggaagtcagaattaagcaggaagagtgagcccatagcagagtccagatttagaccccaagctacttggaatgatactggacaattatgggtgtgtttaatgatggtcctgagtcatgaaaacaaaaggaggctttaaattatgtctggcttagtgtacagcatatttttgtcattattcaagttttagcatgtaaagaggaaagtgtgcagtacttatgcatatcattttcattaatgaaactaaatgaggcctctttaaaattatcagtgttcacagtatcttccaaaagacatgtaaatgtataaaggtataaaaaatatacatataaattttacaattttgtgagctatatagtagatctcttattttgtccataggtcttaaagatcttatactgtattcaggaataaagataacttcagtgggaggcctttacagggctaatgagtaagcattattttgataaagttctgtgttgtctacaatagatatagtagaaatactcttggaatggtaatcatcccaggccctgctttggagcggaagaaatagtcaatgtagaactttacagtatattgtacacagatgtgcctgctaataacttctgtagacagcaaagtttaagagaaattaggtggtaaatgcaacatatgtatctaaataaatttggtctgagggatttgataagatgaaacagtacatagtccagaaaatttttatactcaaagaattatagaaaatatctgaaatgttttcagttttgtgcatatccagaaaatgtcatcctgtgatctgctggttggcagcccagtggcagtattagatgtattgtttttattttgttttgtttgctatttatttggttaagagagttacctaattaggagtgtggaaaaaaaagatttattatagtagtgggcttttgtttgacttaaaacatttttgttgttaccacagtatgagtgccttgtttgtgaaatttgtttaccgggaagccatatacttagagtagcttttagtttatcattatcatcatcatcatcatcatcatcatcatcatcatctccttcatcatgaaaggaagaagctaccaatgttgctttattctgcaaaaaatacaatagatgcttgttgaaagtatggagtgaaatcttaaatatgtctgttaaaaagagtacaactggccaggggtagtgcctcatgcctgtaatcccagcactttgggaggccaaggcgggcagatcgcttgagccaggagtttgagaccagcctgggcaacatggtgaaatcctgtctctacaaaaaaaaaaaaatagacaaaaattagctgggtgtgatggcatgcagctgtagtcccagctacagtggggctgaggcagggggattgcttgagcccaggaagtaaaggctgcagtgagctatggttgtgccactgcattccagtgtgggtaacagaacgaaaccctgtctcaaaaaaaaaaaaatagtacaactttaagcaggatgtgggcacatgcctgtagtctcagctacttgggaggctaagtcaggagagtcacttgagcccaggagcttgatgctgcagtgagatgtgattgtgccactgccttccagcctggggatgatagcaagaccccatctctaaaaaaaaaacaaaaaacaaaaaaaaaacagagtacaacaacctttggtaaacttggaatataaaggtgtttccttaacctgttaaagagctgataaagagtggtactttcaaaccagtacacattatgtgaaacactagagacacttcccatttgttaaaagaaaaaccttagccaaattaaatttaagttttttttggagacagagtcttgctttgtcacccaggctggagtgcagtggtgcaagcacagctcactgcaacctccgccttctgggttcaagtgattttcctgcctcagcctcctgcgtagctgggactacaggtgtgcaccaccacgcctgggtgatttttgtattttttgtagacatggggttttgccatgttgcccagtctggtcttgaactcctgggctcaagcaatctgcctgcctgggcctctgaaagtgctgggattacaggcgtgagccaccatgccatttaatggtttaattgagcaaagaatgatttgcaaattgggcagcctcccgagccagagtaggttcagagactccagcacagccatgtcgtggaaaaagatttatgaatggaaagaggaaagtgatgtaccgaaaacggaagtgaggtacagaaacagccggattggttacagctctgaatttgccttatttgaacacaagttgaggtttgtacagttggccacctttgattggccaaaactcggtgattggcacaagagcaggttatagtctgtttacatctccattttggttatagttcattatggacagaaaaacctgtaggtcaaacttaaaatatgtaaggagacagttttaggctaaacttgatttaacacattaaatccgtaacaagacaggatgcctgccctcaccatgttatttgatcttattttagtaattctagccaatgtagtagggcaagaaaactgcctgcttggctacaaaataaacacacaaaagtcagtatctgtaatatgtgacagaaaatataattaaaaaaaaaaaaaaaaagccgggcacagtggcccatgactgtaatcctagcactttgggaggccaacgtgggtggatctcttgagctcaggagttcaagaccatcctaggcaacatggcaaaaccccgtctctacaaaaaatacaaaaaaattagccacgtgtggtggtgagctcctatagtcccagctactttggaggctgaggttggaggatcatttgaacctgagaagcacaggttatagtgagctgagatcacgccactgcactccagcctgggtgacaaagtgagactctgtctaaaaaaaaaaaaaaagaagaaaaggaaaggaaagtaaaagaaaaaataatttcacttactagagcatcaaatccctaagataatttagagcaaagccagaaaagtgaagaaaatataaaaatctttacagtgggttgcattttaaaaaaaaacttgaagatatcagatcaactcactaatgtattaattaatataatttaaattaaaatcccactgatttttttgtggggagggtgggagagtcatttgttaaaatgattctaaagagcatctggaagaataagcaggcaagaatagccaagaacattttgaaaactaaagatgagtttggaagacgattggttttgtactatcaactacttatagattttacatgaattttaaagggtaatctgagccctcgaatagacagaaatagccatagatctgaaagaacacttaagacctgatccagctatccatgagagtatatataatcaaagtctttgtgtgtgaatcaggagtctttcaggtgcaaggtaaataaactcataattgcttacgcaaaggtggtatttgctttagtgactccagagaaagctcaagtgcctatctctcccctgactttgattctttttggggttggctccattctctcctgttgctaatggcttcctttgtgcagccagaggaaaggaggtgtggttttttgatacttccaggcttctatttttatagcttgagatcaaagagggaagtgaccttccttagagtcagtgtgtaaagtcctaaggaagataccacgtggggtgctggggccatgtgcccatccctggcccatgaccatggggatgctacactaactgggggccacccatggctgttcctgccctgaactgccagctggctttgcagtgcagcctcaccagaatcacatggaatagtagggatatgaattgtttcccaaagaaagtgtgtggggtggtagaattactagtgggggagtaaggggacaggccattgggcatactggagcagcatttactcagtcattgagaaaaggatggaacattcaataaagggtgctggacacatttgtgctctaaaaattttgtgtttcacctattaatttatccctccccttagcccctggcaaacactgatctgtttactgtctccatagttttgcctttcccagaatgtcacacccttggaatcatacagcatgtaaccttttcagattggcttcttttacgtagtaatatgcatttaggattccttcatgccttttcctggattgatagctcatttctttttagtcctgaataatattccattctatggatataccacaattgatccattcacctactgaaggtcattttgattgcttccaagttttgataatttaaaaaattttttaagacagggtgtcattgtgttttccatactggtctcctgaacacctgggctgatgtgaacccctctcctcagcctcctgggtaactgggattacagctatacaccactgtgcccagtgtgacaattatgaataaggctgctgtaaacttctgtgtaggtttttttgtgtgtggacattggttttcagttcattatggtaaataccaaggagtgcagttgctggattgtatggtaaaagtatgtttagtttgctaaggaactgccagctgggtgtggtggctcatgcctgtaatcctagcataatgggaggctgagacaggaggatcccttgaagccaggagttcgagactagcctgggcaacatagtgagacctcatctctacaaaaaatttaaaaattagctgggcgtggtcttatgtgcctatagtcctaactgcttgggagactgaggtgggaggatcacttgagcccaggagctggaggtggcagtaaactgtgatcataccactgcactgctgcctgggtgacaaagcaagaccctgacttaaaaaaaaaaagagaaaagaaaaaaagatgagtcagagggtaaggaagcaaaaataagtaaataaataaatagaagagaaaagaaaaaagaaaaaactgtctttcaaagtggctgcgccattttgcattcctaccagcaatgaatgagagtctgttgttgcacatcctcaccagcatttggtgttgtcagtgttctggattttgaatattctattaggtatataatgctgtctcacttgttttaatcaatgatatatgacattgagcatctttttaatatgtttacttctcatctatgtatcttctttagtgaggcctttgtttaggtcttctgcccattttaaaaaatgggttcattttcttattgttgaatatcatgagttctttgtctattttgaatacctgccttttgctttatttttgtgttttttattttttttttttattgagacaagttctcactctgttgcccaggctagagtgcagtggcatgaacatggctcactgcagcctcaacttctcccagcctcaagcaatcctcttgcctcagccttccgagtagctgggactataggcacacaccaccatgccctgctaatttaaaagagtttttttttgtagaggtgggatctcgccatgttacccaggtggtcttgaactcctggcctcaggcaatcttccagccctcagcctcccaaagtgctgattataggcctgagccacttagcctagctcagaatttattttttatttgttaattttgaaaaaatataggacctcataaaagtcagtctacatttgtacacattatgtttttggtgaatatgtaaatggattctttgtgaatcaatttggttttgtttttttgcttttaaaaataccagccctgggctggatgcggtggctcgcgcctgtaatcctagcactttgggaggctgaggcaggtggatctcctgaggtcaggagtttgagaccagcctggccaacatggtgaaacgctgtctctactaaaaatacaaaaattagctgggcgtggtggcgcatgtcagtaatcccagctacttaggaggctgaggcatgagaatcgattgaacctgggaggcagaggttgcagtgagccgagatcgcgccactgcactccaaccttggcgatagagcaagactctgtctcaagaaaaaaaaaaatgccagcagtggctggctgaggtggctcacacctataatcccagcactttgggaagccaaggcaggtagatctcttgtggtcaggagttcaagaccagcctggcgaacatggcgaaaccccatctctaccaaaaatacaaaaattagctggatgtggtagtgcgcacctgtaatttcagctgctggggaggctgagacatgagaatcacttggaccctggaggcagaggttggagtgagccactgtattccagcctgggtgamagagggatactctatttaaaaaaaaaaaaaaaaaaagcgggctggatacagtggtgcacacctgtaaccctagcactttgggaggctgaggtgctcagattgcttgagctcaggagtttgagaccagcctagacaacatagtgagacatcgtccctaaagaaaaaaaaaaaataccagcacttagccaaaagatttcaacagtgcagaaaaagaaagttgtgatatcttttctccaaattagtcttgttttcagtttcattatccaagtaaccactactaatagttaaaacatttgaaatacgtgtgggagcttgtcctatttaatataaattatttattgagcaaataatcaccactagtatgttttggatactggaattttcatatgtaggagtccttgaatgtaaggtgcccctttggtagttctgtgcttcttttacctgtactgtaacatagggaaagatgttacaaatggttgtatttttaacagagcagtatctattcttaaacaccagcccttccactaaaggtaaacaacaaatgaatacataaatgaagttttggtattgggattatgtgggttaaacacatccatatttcattattaatatttaagaatataacaaactttttattggcatttggaccttgtagctaaggaaagattaaactttgtttatttgtgctttgttttttttcttcactcagatatttgaggatttcccatttgaggaatacatttattaatcaagctttagtttcaagatccttgatcttagggaataccatcaaccgttcttctttaagcttcctaactttgcccaaatttggttagaactactcaagagtagtttgggtaattcagaaattttattggaaggggaaagaatttttgacccaaattagataaagcaactcttgggtaatgatttcttttcttgttctctctttataatcaattgaaagtagtagtaaggctgggtggcaaaagaaagaggcctggggagaatcgcgtggttttcattatctcttttcayagcagcaaagtgggaagggaccaagaggaaatcaactgaaaaaccatccttctgaaacattggcctaaaaaactgtagtccagaaattgagtgcaactggcagtggcatttaaaaggaatgctctaatttctaggaaagcaggcacgagtacctcttaaaagaagaaaaaaatgaaaactgtaatttaggacacatagacgagtatccattccctgtacttttactctcatgtcctaaccaaggaagggttgccatagcaaatatggcattccttagccatgattcactgttgtaaatgcctgcagcattcataaaagtaagatatatgggctcttctttttccttttaaatctttatttctgtatttaaatctgtatgtcatcatctgtattttctctcttgttttttttaaatcttgggagatggtacaaattatttaggggagggaatgagtttcttgtccacaaatagaggagagagagggctttttgtctttctactttggaactggagagcttcctatttaggcatggcctttttcaagtgaccttgtattgttatcagtaytgtagaaggtaggcacgttgtgtaaactttaaaattgaaagccattaggcattccacttgtaaaccttggctttttaaagaaaattacatgttcattgtgaatattttcttatcgacctatctctgtgcacatgcagacttcctttgcctacattctgaaaggtgtaattgccttctttaaggacagcggacatctatagttcttgggtcaaattgtcctccttctggttttgtcagttctcagccacactgtgtgagcatccattttcttggattctggttcggagctcattttaaggaacatcatgtcccttttgagactctgtggacattggggtgggtagatgtccccctgtgaacagaaggtccctccctaaggaggtgcttctctgtgttgagtcctgcatctgggcacacagagcccgaagcaggaagagttgagtctgaatagggaggcctgtaagcctgactgctctgccacgggtaggcctggtctgccatgctccaggagcccccaggaggctctgaagtcattctgcctctgggaattttacagaggagctaatatttgagctgagtgagaaggtgattcttgaaaaagcaaggcrtgccctggtccagttctgtggggctgtcgtagaagagggctcggaagctcttgggagtgaggctagaaaggtaggcagtgttaccataaggaggttggaagtgacacagataggctaaggaaggggacttcagtaatcatgcagcaatggcctggaaaagggagaggctcatagtagggagaccagtttggaggctgccatagtgttctactgagagagaaaaagacttgaactcagagcacggtcagggaaggtggaggggcagggtctgatttggaagtgttttgttttttggttttgggaacaaggatttggaaacctcttggctccgtagatgaagaaaggtgaaccaaggaagactgaagtttccactcaaggaaacagtaactcagggaagaaaacacaggagtaggaataggtttaagagaatgacaagcagttgtgttttggacttgtttagttcgaggtgacatctttgtagggatgtctagctggtagctgcaagtataggaggaggctggatgtgtgcatgagtttcttggtaaagatccatctgcagtctcctgaagatgtcacccagattgccctgccatcaccccagggccttgagtcactcgcttctcttggtgtctaggcaggcttgaagaaaatcaaacagtacaaaatcatgcaaattcagacctctattccaccccagaggaaagtcctgctagcagtttttgtgtattcttccagaaatttgccttgcaacgcgtttgagtatataaataatcccagaaaggatgggccagacactagcagaaactcaccacacacactgcactgggcatgcagaaactgcaaaatgtactggtgtgtgctgtcactgcattcctgggtttggaggtcttctgtgtccccagctgtcagtattgcccacaggctgaccactgagctccttccacagccggcccatatcaccctctttcgaagtgtgtctgcaaggctagattattagagtaatttaagtgtttctgctttgtgttttctttaatgaatttttttatgatgaagttcttgttttaaaaatatacagtggtaattaacatgtatgcatttttcttaaaatgacccccccagtccctcttcggatgtgatcactgttaacagtatcgtatatagaccctgttctgtgtggggcgggcagagggctggttagtgggtggaacatgcatactcacaaccatatttttcacatgggaaaatataaaggtgacaacaaatctcctggactataatctcatcaagcagacaataatctctgtttcaaaagtggacaaatacatgctgattttttaaaaaaaattataatagtacagaaagatacaaaaataagttaaagtcttcctaactctcctgcctgtgccctccactgggcaaaagtccctgtccctaaggtaatatctgttaacagttctccttccagaaaacttgcaatgcaaataggaacattttgtgtgtctgcctctgtgtgtatgtgtttacatgtcttttttttttttttttttttttttttttttttttttttttttttttttttgagacagagtcttgctctgttatccaggctggagtgcagtggcatgatctcagcttgctgtgatctctgcctcctgggttcaagtgattctcatgcctcagcctcccgagtagctggaattacaggcgcctgccaccacacccagctaatttttgtatttttagtagagatggggtttcgccatgttggccaggctggtctgaaactcctgacatcaagtgatctacccgcctcagcctcccaaagtgctgggattacaggtgtgagccactgcttctgcccctgcacatgtctaacgcacacaaaagagattctgctgaacacattttttatgctttttctttccaatttaacatatttgacatctttatcagcttatatagctttatttttttaagaggttattggctataaagggaaagtgctttatgggtgcttctgttgttatttaattggatcctgttgatggacattgatatcatttctaaattttttagtatcctaattaatcctgtggtgagcatccttatacagatatccttgttccctcatgaaaatatttctggaggatggaaagaagggaaattttaaaaattatttgtataaacattatcgtttgttagtagaatgacctcaggagagattgtagtaatttatacttccccacatgcatatgaatgccttttcaatatattgtttcaaaattggatatcatgaaccttaagagataaatatatatgtatgtatttttttttttttttttttttggtgggggcatgtcctgttattgacagtttgttttggtggagggatgtcctgttattgacagttatcgaatagaactttgtcagttccttcatgtaagggatgaatttggtaataaaacaggtctgacttcagttatggaactgggaaagctggaccttgatgtggaggtgggctcagacatgctgtgtctgggcaggtatctcttgggaagcagtgtcatccctgaacagaaacatggatgagccgcaggggacggtgctgagcagaggggctggccgtgggtcatctgcctcccttggcctagaaggcacaagggagctttccaccttgcctttggttttgagaatgcagaagctactaagcaactcacagtgtgcccagggtggtccagctgaaggatgcgaaatggttcttccttttccagccaaagatcttgaacctcccaccccatgacaagcattataaaattcacataattttgataggctggattccttttctgtagcagatctttcctcagaacagaagtttgtttttttttttttaacctaaattacctgtgagttttattttttaaatatggaatctgttttttggacacctccttgtcatattaaatgttctgttattaattttgagattttaatgtaaattttaccccagcaaattaattttgtttctcttgctctctctttttttttttttggcatcctttcccattgtatagtggtgctcattttatcatattgcttttatatgacttttcttttgtgaacagggatcttgttcacttttccttttttaaaaatttttttatttttttgagacggagtcttgctctgttgcccaggctggagaacagaggcacaatctcagcccactgcaagttttgtcttccgggctcaagcgattctcccaccttagcctcttgagtagctgggattacaggcgtgcaccatcacgcctggctaatttttttgtatttttgtagagatggggtttcactatgtcatccaggctggtctcgaactcctggactcaagcgatccacccgcctcagcctcacaaaatgctagggttacaggcgtgagccactgtgcccgagccacttttccttttaacataaaaacattgatatcctagagagggcactgtattttgggtacatacaggttcagatcacggaagagttgtattctatactttttttcatcattcttagttcagtatgatgtattttataatttcatatgagaaactgtaacaatgggcatgtgtcatccagcaatacctactcataaatcatattaaattttgatccaaacatgggagaaactgaagttttctctgtgtacttggatgctttcagaggcataaaattatattaccatgtgaaagcaagcctacaaaattcctcaggtggtccactctgccactcaaatgagagccagacttacagtgcacactctacaaacggacttccagctcgtcagggtattttaagtgcctgaatatgcaaggcactgtgccagtaaaattactcagtcctgaggatagagcctgttagaattattttaaaatctgtacttgaagtttatttcctcagtattccaagatattttatctggttgttctctgagtatttcacacgtagctagttacatataggtgagatggtgatgcttgtgcctggtgtggatgagaaactgagcctggcagacccgagattggatttcctcttctgactttgcaagtgtggctttgctttaataatagccctcctctttttctgtattcctcttttctccttccagtgtggcaaatatgcatcaatcaaaatacaataacctgtggaaccattttttctaaaataggaaggtggtgccatgggctattgattgttgagggtagtctttagagcctgtcttataaatctataataattccccccaaattaatgtgctagttagaaccctagaattgcagcactgaaagtgaattttagaatcttttccaactttttaccaagctcagaaagcccttttattggacctttgtttgcctcatggtcatctggtttctttatgctggtagtaacaggaaccttactaacctacaaggtgacccagtccatcctgggcagctgtgatcattggaaagctctgaatcattcatctggaagctgcctgtggcagaatagtacagaacatatgcattgcacacactacaaaactgctttaaataagtgttcctttcattgttagatggaagtgacccagggcaaggatcatgttttatgagccagttttctcctagtgccttgaacataggcacttggtagtgtttagagaatgaattgtcttttttttttttgagacaaagtctcactccattgcccaggctggattgcagtggcacggtgtcagctcactgcagcctccacctcccaagttgaagtgatttttgtgcctcatcctcccgaggagctggaattacaggcatgcgccaccacacccagctaatttttatatttttagtagagatggggttttgcgtgttggccagatggtctccaactcctggcctcaggcgatctgcctgcctcagcctcccaaagtgctgggattacaggcgtgagccactgcrcctggccagagaatgaattcttaataagtttcttatgacttcagattgactggcagttgtgctaaatattttttgcctttatttgaattagaaaattcgtaagggggccttgagagtagatgcagtcacatttaggagatttttcccccccattggttaaaatgcagtttttctatggatctgctttagaactacaaataaactcygatcactcacagcagactacgcaatgagataagaagcagtccatttgttctgtcgtttattcatggccctcatctttgccagccaacctgtgcagaagagcacagcaaagcataagcttcctaacagctattcccattcagctgctgtcttcaagaagcagaagggtttagataaccttagagaacataatcaaacctgggaaactcaaatcaaaacaaaacttcgaaacggaggttgaaggtcctgaggtacccagaggcatagcaaggaaaacgtccccactgggatatcttctggattcacctacagacctctctggagttttaagatccacgttttatgacatattgcatagcaaacaggccgaacgctgttgtaaatcatcctctacgaaaggcccaggttttgaaactgaaggcctgaaaaggctcctgcttaccagctgtgtgctgtacctgacacactgaagcctgagagtgccagtcacctgtcagagggaacacagctgccctcaggcagaacctgagtctagaactcaaggtttttgactcttaggctaaaaataaaaaatcagaaggaggaactatggattgcttaatcagtcacattttcactttctaaggtttcttgtagcaaaagttatagtctttggggattgggatgtagacacttttttttccttccctaaaacaatttttggcctgccagtttttccagcttcctgctctggaccctgaagttgccatgcagttgcagacatgctcctccttcaaggctctgttaagctgtggctgcccttccttaccactgctgtgccccaggccaaaccccctgcccctccttcccctaaggcactttgcacctgttgctccgagccttctggtctatcccagttggtagagtccctgtgcttacctctgtggctcagtcctcgtgggtggtcagtgctctagggaaggtgagctgaccacttcactttcccttcccagccatagctcttcacagcctcaccaacttagaaaggaatgctgcttttctctctgtcccccgtcctgactatgttcaagtcattgctcagcccagtgagtttgtcctttcttccagaccagtagttttcccccagtccctcaggcttcagcccttgaaggcatccttagccccccaccaccatgatagtcaggcgctgcgcctatccgcagggtgtgggtatgtgtgtgtcttttgtttctggagcccattcctttccttccaccagcctctaggccttcatccaatccttttgcaactcagtgattcatgacttttccctgcatccagtctagtctctttgctggtccattgtttccatagttgccagtttaatcttcttaaaatgctgcatttttgaagtcagtctcttttggtccctctcagaaacatttaaatagctatctgttgccacagggggaaagcttgaacctcttagccagtcattcagagcctgccctctgctggggcctgctttcctctacagatgcttctcccactctgcctgccacagcccttgtagctggctgattgccctgtacctcgcaggctctggaagtcttcagctccttcatggagcctttgccagccattcttttcaagactttgctgttgttcactgcctgatttgttcatttgacacttaattcactgagcaaacattatgaaagatgtactgtttgctactgtgaggaatggatccccaagagataagagggtcagtccctactgccaggaaacttgcctgtgtcacctgggttcagtatcttgtgtctattagatcagaagtggaaaggcagaggccagcccgtatgcttgttttattttatttaaatcaccagcaccccagcaagtgttttgcacaggaaatttctcattatttaattattttgggttttttgattaaattctgtacattcccattttagcttatcttgagttataacwttaaaattaaggtagtcatcagctgaattataagacttaattagataagattatttaagatagtgatttctcattagattggccctgttcatattaacttttctgtttttttcttcagtctgcatgaagaaatcagtgatttttatgaatacatgtctccaagacctgaggaggagaagatgcggatggaggtggtgaacaggatcgagagtgtaattaaggagctctggcccagcgctgacgtgagtcccttcctgggtagcttatgcttcggacagtccttgtccacgggctagaagcctatctgctggtatctcatgctagtcctcacatgcaagtagaagtgctctgtagagttgtggtctaattaaattttaaaggcaaacaattttctgcagtctttagaattgaggcttcctaactattttcattggattggatgactaacaactattttttttttgtagtgctaatagcaactactaaaggcaagctatccttagaaattattagtgtaaagagaagaaagacaaatcaaacctcattgttgtagtggtctgttattggatatgatatatcaaaacctcattactacttagttccagcctgccagggtaaacattatataattgtttacagctaaatgaaaatgtcaagtaagaacttttgtcacttgaagttcatttcctttggctaatgcacgcataagtcttttcttatttctttcctgaaattgccatttttcatctctctcagaccagctaattgccttttagacagctcccagtcagtgaacaaaatgattactcaggatttcttcttggcttatttgtcgtttttgttactggtactaagtcttttgttttttgtttttgagatggggtctcactctgttgctgaggctggagtgcaatagtgcgatcacgacttactgcagcctcgatttcctgggctcaggtgatccacctcagcatcccgagtagctgggactgcaggtgcacgccaccacacttagctaatttttgtatttttttgtagagactgagtctcactatgttgcccaggttggtcttgaactcctgggttcaagcaatgtgcccgccttggcctcccaaagtgctaggattacaggtgtgagccaccacacttggcctgttactggtactaagttaatacgtcactttttagggcactttgagggcctgttctacaattttgtgtatgcaaagaagtacacaaaataatactaataaaatccattactttgtgtttgtagcttttcttcaggcactgtcctgggtggtggtgggaagctagggaaggtttttttccaattggcaaaacaaagaagtttcattgtatgtaaaacttgcaagtatatgacagtatgtatatgacactgtaggtaaagggaaaaggcaagggtactaatgttttatgagcaatgaccatacatcgcattctttctcctatgtgatccaaatcagtggttctcagctagtggctattttgttctccagggggcatttggcaatgtccgagacatatttgattgtcctgactgggtacgcactgctagtacctagtgggtagaggccatggatgccatcagccattctatgatgaacagtataggcccttacaacaaagaattatccacccccaaatgccaatgttgagaagccgtgatctaacttaacccttatctttcttaggtggaggttgattatctatctatctctttctctccagccagccaggcagccatcatctgtctacctacagatgaggaacatgagcttgtggttaggttcccaggtccatctcgcctcagaggttgaactggtttcactgtttatcatttttttcccccgagatggagtctcgctctgtcgcccaggctggagtgcagtgacatgatctcagctcactgcagcctttgcctcccaggttcaagaaattttcctgtctcagcctcccaagtagctggggttcaggcgcccgtcaccacacctggctgatttttgtaattttagtagaggtgggatttcatcatgttggccaggctggtcttgaactcctgacatcaggtgacccacctgccttggcctcccaaagtgctgggattacaggcgtgagccactgtgcccggcctatcctttttttattacaattacctgcatacatatttctgcctgagttccaccgttctccatgggttgagatggaatgcatcccagttttatgccacagcatgatgttacctgatgttctttgtggaattgacctaaaggccctcacttgccctacagttaaagtagtctgatcccaatttagtaatctattcgaagactcctgcttagagaacaaaaatgaaggatttgtgattgtgtctctggataatgagggaacattagtgatctgaactgcttctgaaagtttcctgtggttggctttctgtatccacaggtaccacacctccatattaaaccaacaatggattgaaaatattcagaaaaaactataaaaataacaatgtaccaataaaaacaatacaaattattktaaaaatacagtataacaactatttaggtagcatttacatcatacttggtattataggtattataagtaatctaaagatgatgtaaagtacatgggaggactagcataggttgcatgcaaatactctaccattttatagcagggactcaagcatcttcagattttggcatggtgggactggaaccaatctcctgccgataccaagggacaactgtattttggtctatgtgtttcatattgaaccagataagtttaaattatattcagaatgtctgcttgtgaaacagaatccccgcttcatgaagcttggggttagaaaaaaatgctcttgtcataccraaaagtaccagtagagggtagcaaaaactgacatttctccatatcttggtgactcaatatgataacaacttctgataactcaatataataacaacttctttttctgtttcaggtccagatatttggaagttttaaaactggactttatttacctactaggttagtacactcatgaatctttcaaaggacttttcttagagtgtattcattttggctgtcaaatttgtaaggagtagaaacaaaacaaatttataaaacaaaatggggctgggcatggtggctcatgcctgtaatcctagcacttcgggaggccaaggagggtggatcatttgaggtcaggagttcaagaccagcctggccaacatggtaaaaccccatctctactagaaatacaagaattagccaggcgtagcagtgcgcacctgtaatcccagctactcaggaggctgaggcaggagaattgcttgaacccgggaggtgaaggttgcagtgagccgagatcgcgccactgcactccagcctgggcgacagagcaagactctgtctcaaaaaataagtaagtaaataaataaaggatttaccagcatttaatttgatttaccttgaagtagaatatcacttcacatcatcttaccaagacatagatggtacagagagatggaaaagggatcatgttgcaatggaatcaattagttactaattttagaaattgactgcctggcagagtattgctcagtcccataacttaacccactgacacagatgttaatgtagtatcatgataaaatgtctgattatatatcctcttgaatgtgagttcccgctgtcttgctcactcactcttacactcaccctcgctttcaaattaagaactcattctactagttatggctccagcatcctgatccagaaattcagggtacagatctcttctctgagaaagatcttggcctttcaggactgttgttcagtttcagtcttctcaaatgagacctcttgtgacgcacagccttggaggctctcttttgggaaatgataatgtttctccaaagggtgaatasttgctctctaagaattgaaattgtttgaacattccatcatggttattattattattaccttaaattttaatctctccagaataaagtcagcatcatgtttttccatttgagcttgatttggtatactttaccccaacttaaagtgtgctgaagtggatggaccctggcaatttccgttcttctcatagatgcccttggcctgcaaaagtcataaaatactcaacttcgagttaatatttcttatttaggttgtcagcatcagtaaaacatgaaaaatcacctttcttaaaaaatttaattaaattttatgaataggtagtacattcacatagttcacatttggaaaaggcacaaaaatcaatacagggaaaagtctcagtcccacctctgccccctggttctccttggaacagccgcttttaccagtttctcacatatcctttcagagatatctgtgcatataaaaggacatgtgtgtatattaacacaaatggtagcatgctggatacctgttctgcatccagcttaaagcacttcataatatttctgagttgcaattaatctcatccggataggaaaatcattatgtctagtaccacaagcgtttattaaagaaaatacatgaagtgctttttgtttttttttctttgaggttttacttctttcaaaatcaccctatttcctgaggcctgaattctgtgaaatgactgagaggaggagtttgttaaaatcaacaactactatttcccttctccacaaaaccattatcaccaacacatttagtcttcgttggccagggtgggaaataggttttaattgtactaatgaagtctataagcatgagtgtcagttaaaacaagtttccaacttcttccgaccctcttgtatatgtattctgtgttcagtgacatcgacctagtggtgtttgggaagtgggagaacctacccctctggactctggaagaagctcttcggaaacacaaagtcgcagatgaggattcggtgaaagttttagacaaagcaactgtaagttctgcagcatttcatattaaaatccttagttatttacctatgaaacttgaattaaaattaaagtttggtgagcacagttgcattgcaagtgagtgattctttcattttgttaatgtcaccrtgcttgcacataaaaagttttctggttgtccacactggagtgtgaccatacaatctcggctcactacaacctgtgcctcctcggctcaagtgatccttctacctcagcctcttggggagctgtactacaaacacaacctgccatgcctggctaattttgttgtattttttgtagagacggggtttcaccgtgttacccagactgatctccaactcctgggctcaagtgatccacccacctctgcctcccaaaatgctgggattacaggcgtgagccactgcacctggtctgcatttcttttcacagcagcaaaatatgcaattttattatacacagtactcactgtagagatttttgttttattcattttttttagagagatacagtctcactatgttgcccaggctggtctctaactcctggactcaagtgatcctcccacctcagccttatgtgtatctgggactaaggcgcaccctaccacgccctgcttatttaaaaaatttttttttgtagagatagggtctccctgtgttgcccaagttaggccattttttgaaaagaactgctgatagctcatgtaaataatcctgtcagctttttagaataatttttatattttatcttgtcaggttgttttttgggctatttgcaaaactgaccagtaatgcaagtgggttgtagtgtacaccttaagaatccagcaattttcttattagaaacagtttgatgatacaaaacatttaatacctggcattcctagttcttcatcttatactcagaaagtgttctccaaattattgaggaaggtttttgttcattttaaaattatcattataactatatgtcaactaataaatgagatgatgggcatattaatttatttaactgtagtaatcacttcagtatgtatatcaagataagtatatcaaaacatgtacaccttaaatataaacaataaaaataaataataaaaaattggacaccaaacaaaattctcggttgatagaaattatactgtaatatactgtatgggacccagtgctaaatatgcagcatatagtatttgtagcagaccaggtttactggggtgtgccatatttagaatactcagtgttcttatgctctcatgagatgatggagacctcatgtctagtaggcttccatcccctgattttatcatttaatctggttaaagcatttacattttacctttcttctctttataggtacctattattaaattaacagattcttttactgaagtgaaagttgatatcagctttaatgtacagaatggcgtgagagcagctgacctcatcaaagattttaccaaggtcagagaatttagcrtttatacaacaaaactattagaaacgtaattttaagattctgttgtggtggtgttctaatatttttatatgcatgttgctgtctctctctctctctctctctctctctctctcttttaaatagagctagggtctcactctgtcacctaggctggagtgcagtggctggatcatggcccgctgcagcctcaaactcctgggttcaagtggtcatctcacctcagcctcccaagtagctgggactacagacgtgagccactacacctggctattttttgtattttttttttttttttagtgttggggtctcgctgtgttggccaggctggtctcttaactcctggccttagcctcccaaagcactgggattacaggcatgagccaccatgctcagcctgcaccttacttttgtatgcaacggttttgctttctttgaatctgcttgtaatgatcagtgattaacttataatgtgacctcaagtaagaattaaaagttgagaaagcttttgaagaaattgtctgctctagatccttccttgtagagacagaagagatggaattctactacacagttgattccatctgtttttaaccttcaggagttcagattaagaacctttcctttaacccrtttcccatatgccccaagaatactgtgcgggcrgtgagctgcactttttttttttcttttttcgaggcagagtctctctctgtcacccgggctggagtgcagtggcacgatcttggttcactgccacctccgcctcccgggttcaagcaattcttctgcctcagtctcatgagtacctgggactcgtgcctgggacgagtaccaggcacctgccaccatgcctggctaatttttgtatttttattagagatggggtttcaccatattggccaggctggtctcgaactcctgaccttgtgatccgcctacctcggcctcccaaagtgcccggattacaggcgtgagccaccgtgcccagctgtacttttttttttcctaaacaggaaataggttaagagttttaagagccttttctagatttcaatccctaaattacctttaaggtgtttcctacaggcttccttacttctgttttgaaattatttaagtttatttctattctgttttcttccaagatagagaataatttgtcaccatcatctgtggaacattttacatacttaggtagttgtcagctttctcacctctaacctaagccattaactcctttggcttctgttagaatattcacaattttttttttctgtagcagctctaaagtttctatttcttcttttttgttttttaagaaaaaaatgttaactacttgatgttacaagcattatcatcttgcataaatgtatggaagacagaaaagcagaaaaataaaagaaagattatccataatcgcactatattgggggtgtgtgtgtgtgtgtctgtctaatattttctttttctggaaaaaacttttaaaaattgaaattcatatgcatgataacattcatcagtataaagagacagtgtaaagtgagtcacccttacaccatagatacttagatcatttttacagaatttctcattgccaattattgttttttgcgttgcttttttatgttctttaaaattataagcaaaaggagtagcacattatacacacattgtcttataacttcataaaaacttaatgttttggaggtttcttccatattagcacatacaggcttgctttattctttttgttggttacacaggcagtagtcttttataaggctgtgactgcttgatttagcagttcttcagtattgttccagttttcttttgctattagaaaaagggattgatgaatatacttccatacatgcatcttgctttacacatgcaaaatgtttgtagaaagattcccaaaagcaaaattttgaggtcgaagggtatatccagataaaattctgttggatatttccctaattatttattctttcatattctcattttctctctctccctcccccttttcttctccctccccctcttcctctatccctccctttcccttttctctctttttctttccctcccttttcttttctcttttctcttcttcctttttcttccttcccctttcccttttccttccttctgcttcctttttttcctttctttcattttttgacaccgagtctcactctgttacccaggctagagcgcagtgatcatggctcactgcagcctcggcttcttgggctcaagtgatcctcccaccttggcctgagtatctgggatcacaggcttgcccaccacacctggctaactttttttttaattttttttttttgagatggagtctcactctgttgcccaggctggagtgcagtggcgcgatcttggctcactgcaacctccgtctcccaggttcaagcgattctcctgccttagcctcctgagtagctgggattagaggcgcacaccaccacgctcagctaatttttgtatttgtagtagagatgtggttgcaccatgttggccagggtggtctcaaaccctgacctcaggtgatccgccctcctcagcctcccgcagtgctgggattacaggcgtgagccactgagcccggccacttttttattttattttttaagtagagatgaggtcttgctatgtggccacttttttttttctttttttttaagtagagataaggtcttgctatgttgcccaagctgttcttaaactcctgggctcaagcagtcctccttccttgacctcccaaagtgttgggattacaggcatgaaccaccacacctgacccctaattgttctttgaaagggaactgtatctagactgacttaaccaccatgttttgttttgttttttgagacagagtcttgctctgtcactcaggctggagtgcaatggtgcgatcatggctcattgtaccctccgcctcctgagttcaaacgattcttgtgcctcagcctccagaatagctgggactacatatgtgtgccaccacgctgggctaatttttgtatttttagtagagatggggtttctccatgttggccaggctrgtcttgaactcctgacctcaagagatccacccgcctcagcctcccagagtgctgggattacagatatgagccaccgtgcccagcccacaatgtttaaaaatacttatttctccatatttttgttctttcctatgcttgcttagtttgatacaatttgcaaaagtataagcttttttttcttttttatagaagccatgcgtgttcattgtaggacatctagaaaacagagataagagtaaagaaaaaaaaatggaaatcaccggccaggtgctatgtttcacacctgtaatcccaacactttgggaggcccagacaggcagatcatttgagcttaggagttcaagaccagcccgggcaatgtggtgaaaccctgtctctacaaaaatacaaaaattagctgggcatggtgggctgaggtcggaggatcacttgagcccaggagctggagattgcaatgagccaagattctgctactgtactccagcctgggtgacagaatgagggggaaaaaaatggaaatcactagtaattttaccaccctaagtaataatagctgttaagacttctttgaagatgttgtgcctgctttgtttccctccgtggccccagcctatggcatggtttacagaggagtgaatgaatatgtgcacagcaaaaggtggactcattctgtacatacttgcccactcaggtgttctctcgggtagccctgcctcattccctgtgaagcgtggaagggaggggtggtctgtgtgtagtcatcagcccatgtgcaagtcagcaggcaggactcttgtttgccccagggctgtggcagaataatctaaaggtcgctagtctacagtggtacatcaccaagaaaagtgattcttaaaaatctcactgatttagtgctttaagatgttggttactttgtccttgtactctttctattctctgtttacaaatgaatattagagggtcatggtcacaaatgagcatcatcagttacatgctgttagtgtttctatcctatagcaagtacttttttttttttttgagatggagtcttgctctgtcacccaggctggggtgcaatggcacgatctcgcctcactacatcctctgcctcccgggttcaagtgattctcctgcctcagcctcccaagtagctgggattacaggctcccaccaccactcctggctattttttgtatttttagtagagataggcgtttcaccatgttggccaggctggtctcgaactcctgacctcaggtgatctgcccgccttggtctcccaaagtgctaggattacaggcatgagccaccatgcccagccctgtagcaagtacttagatactattattcatttgtacatgtcttacaatttaagtataaggggagaaccattcattacctatagtttacttttttttaatagcttactcttaaaatagaaaattaagtatgttgtatatctctaccaaattttataatgtaaggaccaatttatgcccctcttaatgcttagatctgttgctgatacaggaattcattgaaaatacaattttctttttcagaaatatcctgtattgccatacttggttttagtattgaaacaattcctattgcagagggaccttaatgaagtatttacaggtggaattggttcttatagtctctttttaatggcagtcagtttccttcaggtaagtcatatgggtatagcatgctagtgcacactaaaagcaaaagtgatcaatcagctgggaaacattttggaaaaaatcgaaatcaacctgtaattgcattgctttccttgattacttaacggcttttccctttaaactgggtacattttatcatttagcaaatatgtatttttaaattcctatgaaagaatatttttggttttaaatcccatacattctagtatttttgagacttttcactgcaaattttaacatgcaaaatgtacggcctggtttccataagcataaatagtataaatgccaacaataagaatgtcttctaagcagctaaatcttgtaagtttagttggaattgagaccagctatttgggtaagcgaattagagtcttagtattgtaagtgggtatgtttatgtggcacagggttgccaactgcctgagtctattcgtgagtcagaacgactttgctgatgtgttgggccaagccagccctggttggcagcctggtgcagccgtaaaattcagccttacaaacagtctcccgccattcccgcaccatgggactttagtgttgtgtgtaacaacagtataacctgctgttagcccattatcaactgactgctatgctaaaccaaaattataataatattgcttgtagaagttagaatataatttattccccctctccttgataatttagcaaaaatccaatataatttcttcttttctgcttttagttacatcccagggaagatgcttgcatccccaatacaaactatggtgttctcttaatagaattttttgaattatatggacgacacttcaattatttaaagactggcatccggataaaggatggtggttcatatgtggccaaagatgaagtacagaaaaatatgctagatggctacaggccatcaatgctttatatcgaagatcctttacaaccaggtattgaaattaggtaaatttgtgggcattcaaagagagggcactgtcagtcaccttattatactttaaattctctttagatgaaaaatgaaggaacaacttctaattgttattcttttttcatcgaaatatttcatgagcaaacatactaaaataaacagacacagacaatagaaaaacaccttggagacttccagataagtagggagtagaatctgtttaaccctaaaagcatagtagaaaaggcattcacttatttggatgggttcatgtttggtggctgtttctccttcttgggtccttattgccttgattacaaccaattgtcagcaattaatgaggctttaatgagatgattctgaagtcctgagaggcagcaagcatagtaatatatctttgaattcatgagcagaagggtgcaaggagacaatgtattttctttttgaatttctcctttcctgtttgattttgcatgtctctttgtgctttttccagcttcatgtgggcttgaaagtaagcagaaagtaaattccttccatgcttttctgaagttctgtttgcttgcttgtgtcctgatttttgtgagcaatattttttcttgatataattgtaaaatagattctgcgttattggacttcagtggaagtgcttttagtcatttgctttaatgtgtaaactttgaaaatgagtaaggaaagggggtgaagagatagagtagttgcctaggaaccattttctggcttattgagctgccttataaacattaatagttctatgtgtttattcattgaggaaacattacattgattgggagcctgctctgttcaaaagtattgggccaaaggacacgaagacttttcagcaagacgatccttgctttttaggggctcataatttagagtgagaaatagatatatagctaatataaacccaaaaaatatagaagtatttctgatgtaacttggggtttcactcttaggagtgaacagggcactatttcttttgtttgcataactgtttatgtatggaatgggataattcttgatgggccagaatacattccggcaactgatacaccataatgaagtaccaactgcatgattcacatattcagagactggggagctttggggacagctcacagctcagcttccaggcacaactctggtgggataactatggcccttgctctcctggaagagagtcatcaacatttagtgcatattaagcacagtcaggcttactatgttacgtatatttcttttaaaggtaacgatgttggaaggagttcatatggggccatgcaagtgaagcaggcctttgattatgcctacgttgttttgagtcatgctgtatcaccaatagcaaagtactatcccaacaatgaaacagaaaggtaaaagttcatctataaccagcccattgtgtcaaaattagttgtggcttcttatcttcaaattaatgttattccctccctctccctttctttttaaacacatgcagcatactaggtagaataattagagtaacagatgaagttgccacatatagagattggatatcaaagcagtggggcttgaagaatagacctgagccttcatgcaatggtaagatattttccttggtcgattgactgagtattagaggcttttctgtgttgtgtgcgtttaatgggaagaaacgttttccaatcttttgccactctttcaggaaatggtgttaccttgatagtagatactcagcagttagataaatgtaataataatctatctgaagaaaatgaagcccttggaaaatgtagaagtaaaacctcggaatctcttagtaaacactcttcaaactcttcatcaggtccagtgtcgtcctcttctgccacacagtccagctctagtgatgtagtaagtatgaaagcctcggctcttctgaactcagatgcatgcacgttctcttgctggggttaacactgtctcgaaggctaaggctacttcctttgcttacatgttactgggatattttaataactttcatgcttgtacattttctcaacattttgttatgaaaaagttcaagcatatagtaaaagtgaacaaattttagtgagcattcatgtactcaccagtagattctgctattaaccttttacttgcttatgtcatacctgtctatccatcactctatccattaattcatcttattctttgatccatttcaaagtagattacagacatcagttcccctagagtactgtagcttgtgcatccttgtagccagactccaatatttgtttattgttttttccttttttttttttttgagacgggatctccctctgtcacccaggctggagtgcagtggtatgatctcggctcactgcaacctccgcctcccatgttcaaacgattctcctgcctcaacctcctgagtagctgggattacaggtgcgtaccaccatacccagctaattttttgtatttttagtagagacggggtttcaccatgttggtcaggctggtcctgaactcctgatcttgtgatccacccgcctcaacctcctaaattgctgggattacaggcatgagccaccacacctggcctttaacgtttttcttttcttttcttttcttttttttgagacggagtcttgctctgtcacccaggctggaatgtaatggcatgatcttcactcacctcaaccttcgcctcctgggttcaagcgattctcctgcctcagcctcctgagtatctaggattacaggcatgtgccaccacacccagctaattttttgtatttttagtagagatggggtttcaccatgttggccaggctggtctcgaattcctgacctcaagagatccacccgcctcagcctcccaaagtgctgggattacaggcgtgagcccagctgttatgactttttaacaccatagttagttttgcctgtttcagaatttcatacaaatggaaccacatagaatatagtcttgtgtaaggcttctttcactcaattttttttcagctttctggttgaattttttgttgttgttgttttgttttgttttttgagacggagtctcgctctgtcgcccaggctggagtgcagtggcgcgatcttggctcactgcaagctccgcctcccgggttcatgccattctgcctcagcctcccaagtagctgggactacaggtgcccgccaccacacccggctaattttttgtatttttagtagagccagggtttcaccgtggtcttgatcgcctgacctcatgatccgactgcctcggcctcccaaagtgctgggattacaggcgtgagccaccacgcctggccaaatttttttttagttgagatatagttaacataaaattcagcattaaaaatgtacaattcagtggtttttagaacatattcacaatgttgtgcagccatctccagtaattctagaacatttccatcaccccaagaagaaaccctgcatttagcagtagtttcttctaattcttccttccctcccttaacctctggtaacctctaatctactttctctttctatcctgatagaattttttttgttcccccatcctgatagaatttatgtgtcaattataatgtaagttaccttttaaaatcaaagtgaatttgtagtgtactgatttgagatctaaagcaggcttacctgtttgagtttaactttattaagtgtaggacatgaaaagtaatctaaatattgtatgttgttgatgatgaccatgtgtcaatatggaatcataaatcctcctgtgcaaaatctccctgtgtgcttttttggttcctagagcagtatgctttggaggacagaagccaagctagatgtcacagacacagggagatggagtgttggggactgagagaatgtgactctgacatgctgggtagagtgccagggccagggtggagacctgcagagagacgtagcattgtcatggcccatgcagcccagaaataggtggagctcagcccactgtcgcgggaagtccacccccacccacaccagtatgtttggttagaatgatcactgatttgtcatcacagactctcagagattgaaccccttaaacccatcatcttgtgtctggctgaagccagggactaggacctaggttcctcactctttaccatactctttcattttctataaataaaaaaacaaataaacttagacctctgtgagctccttcaaggtcagatgtgggcagtggatttaacaatgaacagaagctctctgataaaatcagtcattttaaatgtttggaggaaaatttaaacaaacagttaattttttgtgtgcttcttttaactcccaaatgtttaaatttagtccagagagtactttaaccaaaattgtttttctttctgaatattgagtatctaaattactaatatgtcacattataactcaygtgacttgtgttaggattccgatgcaacaccatgcaaaaccccgaaacagctgctttgccgtccgtccactgggaaccgagtagggtcgcaagatgtatccttggagtcctctcaggcagttgggaaaatgcaaagcacccaaaccactaacacatccaacagcaccaacaaatctcaggtgtgtggaacgtgggtttttaattgttagtatttgatacaaaatatttagaatttcccacatgtaaataatatgcagcatgggtttgaagaaaacgctagattgaagaacaaacttattttattctaagaggttccaacacatgacagtgcttctaggaacaggatgtcctaaggatccttgtgagacaccattgtaacataaatctcttcaggaatctattgactggtccttataagatgttccagccaaactaccatataaaaagtgtctcagttgtacatgaaataagctggcatgaaggttttgtgaggcctcatggcagtgtgcatatctgggaataatgtatccttttctaatattttaatgttcaataccttgttgctggtgttgaaatgatcagctggctgtcaggcgtggtcagttgattaacattagcttggacttaaaaggccacagagatactctagtttaagtttttttgttgcctagaattgtcattaactgagtaatgactcagagtgaggggaggaagccattgatatggggctctggcctaaggctgggtcactcctcactatagctgggaacctgggaataggcctcttggtgtaaccttgtgtctgatttgactcactgagttcactttacctacgcggccttagccatgtatgccagacacagacttatcacaaaataccagttcaagtgacagggttgacagaagggactgaggtcacgagaaagccacaggccatgagtagcaggaagggagtagccacctgtgctgacccaaacctaccagtgtgcctgtcatgcccaagagcctcttcccgctctgtcacttatgatgtggtgtttgggttggtaagtttcttaagaaaacctttgcatcccacacactgttaagaaggcgggcgagtggtctatgcttttcattatttccattaaaataaagtaagggttttagagctaaaaagaacccctgtaacagctttttctgcccactagataagtcagtgatcagtaaggtaacaatctagccagcatattcctagttttgaaagcttccccaaatccaggtgtttgagaacactctgcttttctgcaatactgatgtctttgtggtcgttttctgtttctgcagcatggatcagcaaggctctttcgttcttccagcaaakgcttccaaggtacaactcaaacaagccatggttccttgatgacaaacaaacaacatcaaggcaaatccaataatcagtattaccatggcaaaaagaggaaacacaagagggacgcgcccctctcagacctctgtagatagtcagcgctgcgcggtggactgtcttctctgtgcaatgatctcatgctcaggacagttgcgcagggactcctgggagatattcaggagcctcacactgttcagacgttgacttagcaactgcgttttttcccagctcgccacagaatggatcatgaagactgacaactgcaaaaaaaacaaaacaaaacaaaaaaaaaagcaagcaaaaaagagggaaaaaaaaggctgcttatttgataagtcatatgctacaacagggtcattttaagatttaaagcttgaatgtaaaataaatatatttctcattggctttatgcagagttatagggaatagtattcagtgttggtagggtgatagaaacaaaaaacagtatcagaggatgaggtggggaaggaaaacaaaggtatctgataggaagtccagattccaaaggggaaagtgatctgtgcatgttttttttttaaatatttttgcatatatttaccattttattgtgtgtatatatagaagaccatataggaaattgatatttgtaatagtggatttgttaataatactttttacataacattactgtttaaattgtaaacagattttttctcaggattagtttgaaaaataatctaaattgtcatcttaacatccatatatagggaagtgattagttctattactcaatttgtttttctcagcattgaaatgacttaatagaacccttgtgtcctgctgcaaaaatttttcctctctaaagaaaaggtttatggtggcaaatgatgtttattttattttgtaaaaaaaaaaaaatgtactatgtacttttgtgtaaacactgaaaaatctctggtcatctccgagaattaacttgcaactgttttctatagtgctgtcgtcttgggcaatgggcaattacatgactttgtgtttgcttcctttgcagtcttttttttttccccccatttcttcctaataggaaaaaaaaaaaaaaaaaaggtcacccatgtctggtctcattcctgttgcagtgaaacttcgagttccacagactttgcatgctggcttctctaaccctgtgtgctgcgtgtgcctgtttctcatctcttattctttttaaaattcatgcttaactactgtgggagaataactgtaaacagctttaattaaatcatacttataaaaaactattttcttatattccactctatgcttttggtattgttgatctttacaaattaaatggtctttgataatggatctattttgtattgccttattaagaccaaatacttcttgtcatcccattctttatcctcttctttcatggaattgttatcgttaattaaaacttttttaaacattggcttgtttcaatcatactgtaaattttggttgtagtcagctttgagtgcaatgagatgtataattctgttatcattacctgttgagtttgaaactcagttgggaatatttaatataatagaatgtaagtgacatttctgaaaatgctttctttcagggtgaaagctcttatgtttagcatcaatgtgtatggctctgttaaatgcagccatttctgagacgagattcttttatatatatatacatataaagtactattggcttttaggagtttcttttatatacatttatgaaatactgaagaccaatcagaccattaatggacacttagtgtaactttttataaagaaaataatgctaaagtaagaccaaaactgatgtcatcactgaaattaacaattttcaatatgttcatattttaattcacaatggaaaaatgtgttccaaaactggaaactcatagtactcgtgtaaactgtggaagatttcaaatgtgatgttattttgacaatgttttaaattttagagtcacattttattctgatcagaatttttattgagatgttgagcttttgtttttgaaactagtttgtcataacattgtgcataatcacagtatttattttctaggacaattgtgaatgtgtagacttatgtttactgctaagggaacaattatttataaaataatattaaatccagtattagctgcctatttcagacacttaatacttgcagagatctatgttacatttaccacactgaagttttttttgttgttttttgtttgtttttaaagaatcaccctcattgttgaaagtaaatgtactcttagggtgcgaatattagtgttccaataagcatgtgattatattaaggtggtggtagcgggaagataattctgattccattgggaatcttaggttttcgtaaatttattgggaaaatagtttttcctgtactgctgaagtttctttttggtaaacagtatctttctaaaagaaaaaagcatgaaggagaaattgaggtgtgtatacatttcctcaaatgaccagcattgtattcgtgaatactgtgtatcttgcagtgaacagtgtggaagctgttcatttttcaatctgaagtaaaatactttcaagaacttttagtttgcctgctcatttgttttatacatttcatctatttgactcctatcttatttcttttttgagttttaatactttctatattttgtgaatatatcagaaatgtgtcatttatatattatagtccattcatatccatgaatcataaccttcctttgctaatacttgttgaatgggattttacaaattctccctcactctggtgacatttctcaggcagtcatgtatgtgtacctggccattagaaatattaatatttaaagactgttttttagaggagctgatgggttggtgaggtgtcagcacaaaatcttactggttatgttttgatgataaaagtatatccattttttccctccagctttaaggtgactgtgaaggtgcctggttttgaatgtctttgtttggtttggagatgtcgcactcagttttcaaatctagcttggatctgtaggacctatgttttttacaagtaattgccctccagtcttcaacagttgattctgttttatttttatcctgttttgagtgtactttacctttacttgcattttgagcctcattaatatttaggttatttgatttggctccagatattcctagatctgcacagggcaaaacatgggctatagggtgagcatttttaattgtctttttctgctggaaccttatatctctccatgtgttttctgctccttccctcccccatgaaatggtaagtgtgacttgtgtttgcctgaacctgtggactagtgtttggggtttctggaaacactagagggtcagaaaagagtaatgaccaccgtgacgtgcaggattctcttgctgtgacatgttcattgcaaagccctctccagtgactaggaggtgtagttattaaggttgatctgttagaaatcaccattattaggtattagtggtagatgttgctgatacttttattggtcatgactacatctcagttttactttaatattgatctatagtttgatcagttccttgaattctaatatgttgatttctcagtgtttctgtcactaaccaagaatgtttctaggcagttggttgcttcacagtcaaaactaaatggtaaactatcaaaaatacattcccaattttgctgtgataaatattgaaatgttaaaattaatgaacagaagaatttattcttacccatctattcttgttctcctagttcattaaactttcagttattggaaaggcacattctcaaagtattttatgagcaaaatattctataaatgcgtctaacaaacctaattgaatataaaagttatatttagtagttactgttgatagtaattttcatcagggtcatagttcatctagtaaaatatttagagaatgatgttaacattccagcattaaagtgggaacaaagatttatatatgaaattccttaaaagagttcatcttgccttggtttctgaccctcaagactctagctacctgccatcttgtcaaaacatttgtgggtagaataagtgttaaagatcaaattttaatatgcttctcgatatttaacatagctaagaagccagattttactgtagaagttatttacatgatttgaaaacttgacctaactggaagcctttttctcagtcatcttgttctaagccatcttgacttcacacccttagcgacttttcttttttttttggtcaaagataatgagctaaatatatatagacgttgaatgttgacaaaattattaaccagaaaaattgcttataaaggctgctgatctatttgatacctagaattaaatatttgaggacagtttttagttaataaactgctaatgtttattttactgtctctcaggtttttggtttttttaaaaaaatgtgtttggcctttacattttctacttaagtgtgtactttattgagtttaaccttgtctgtagcctagtagcctgaaagaaaaggagacagaaccagagagatggatgtagtgcattccctttggttattacacatttgtggtagctcctggatttactgagagatattttagctatgtcaataagaacagctaatgatgtggaaatcaggtgttctcttgtgtatttcagtgaacatttttattagtagttgcatatcatctctagttccacattttaacttaacgtctttgtggcttcaccactgagctacctttcactacaccagcttctgtgtggcctggtaacatggaaggtctctcctaaggacagtctggacgtattttgggggaatgttatttatcttaaagatgcctagaaacaaaacgcatatagtaccagtgagaaactatgaagtaaacaagttgctcaggccgggcatggtggctcacgcctgtaatcccagcactttgggaggccgaagcgggaggatggcttgaggctgggagtttgagaccttcatctcttaaaaaaacaaacaaaaacctgaatggtgaggtgtggtggaattgggtaggggagggaaaggaggacttggaaaagcattctccaaagccagcaacttgtgaagttcagtacttgcctcttagaggttaggccatgcctttcaaagagagtgaaatgatgggttatcagccacattcttggagttaatatttttcttcatctttcagtttgggttctgtgctattcatagttcttccctaagaccatttcattattaccttttatatttagttgcaatttattataatatgttgttttgtccctgaacttaatctcctaattttaagatcctctctgatttttgcatattgaaacttacagaagtcactttaaaaaagtcttttgaaagtcctacaatcctaaaataaatcacaagcttgtttgttagacgtgtcaagagtctccagtctttactactaaaaagcagcactgccttaacacacattgttatgggtgaaaagtgagggacgaccagtgtagtttctggatataaagtgtgaaggactgttgagttaaacatttttagtggaatatacatagataacgtgtatttagaaactttggtgaagccagtatttgtttttagtaacctttttatttatttccttctttgattagcattgtcttcagtgttaagaaatgtggactcctgtgaggtgctggaggtttgaatcatcttgaaaactttccaatcttgtctagttaccactgcagagacactaaggaatttaccagaaaaagatatttgatacaagtgatttaagaaatctcaacatttcctgaggccgtatcactgggcaaccagtgatgaaaactatgaatgaattgcacacctggaagattttttaagctaatgacagtttcttcaaagatgtcaattatttgccttggaaattttataaattgcatttctatgcacatcggcctctagtgcttaccactcggtttattattcataatctgcaattcaataaaggctttgtgttttcatttatcttcaaaaccactggtatgagcccttatgtaaaacctgaatgactactttttctaaaaaaaatttaaagacagctctgtttaggcaggttttcttgtgcacatatggcatttctgtggctggttctctaagctggatctctaagctagttctcatcctttttaatgctagtactgggagatgcttgaggatgctgttttcatcctactctgtcctagacaatgataaccatttggcccccacaacagccatggaagattatagaaattgatctcatagaatttggttattcacaaataccagcccagtttcaccctctactttaatgcaggggattatgcctgctatactaagaaaatgaaatgcattaccataggttgggcagagcaacaagtaacagatcattacaacagaataatgaaaatagttctccagagaaccgagagaggcagggttagtaaccaaagtgcagcctaaggcgtgtctcagaattctccctcagcaggggaggatttggtttagactggtctgtctgcctgggacccagctgagcggtggccaaaaaaaaatcctggatagtttcctgtaagatagtcccaaactggcttagagtgaaggtgctcagcagcatgtagacaactggcgggtgaaaccagactgcccactccagcgcgatgtctttttcccccccttttttttcttgagacagggtctcactctgtcatctaggctggagtgcagtggtgccattccagcttaccgtagcctcaacctcctgggctcaagtgatctgcccaccttggcctcccaaagtgctgggactacaggtgtgagccaccacacctggccgattgctgctgcttaaacctctgctgcaagtgctcacttaaaaaaggcaaaaaaaagcaaaatccttcgaaatattatcccaaaagtttctcaaatatgatagtagagaatgaactgaatatccatgacaattttgtccatctacctagacatagtgaattatttcacaagtaacatatgaatgtatgttttattgtgaagaaatgtaaacacttaagtaaaaggatctagctgcacttcaatccctaatcccactcatcaacccaaacccatccatcttaatattatgggacgtatcctagattttttttctatgcatttgtacacatgaacaagtataattttagggggtcttttatcctttaacacaaatgggatcgtattgtagttttctgcaactcccttaccatataaagatgtgtttccaggtcagtacacatggagatatatttcatttcctttttattatgctgactttagcttgcaagttgctttggtaaattaatgtgtcagacacatcaaagctaacaaattaatagaaatatccagtatttttcagcttcccttttgtttttagagagagggtcttgctctgttgcccaggcttactgcatcagcttaccttgaatagggattttctaaagtactgctatttgatgacaattttcttctgaacccattttactaaggaaaaaaactttcccacagttttacatgtaaaaaaaattttttttttggccaggcatggtggctcatgcctgtaatcctgcacttcgggaggccaaggtgggaggatcgcttgaggccaggagttcaagaccagcctaggcaacatggtgaaaacccatctctattaaaaaatactaaaattagctggatgtggtggcatgtgcacatagtcccgctactctggaggctgaggcaggacattcgcttgaacccaggagtcagaggttgcacagagctgagatcacatcactgcactccagcctgggcaacagagactctttgagacagagattctgtctgaaaaaaaaaaaaaaaaaaagaaaagtgaagagatggggcgggggcgcggtctcaccatgttgcccaggaactcctggcctcaagtgatctgctcatcttggcctcccaaattgctgggattacaggcatgcatcaccacacctggccggttttacattcttttaagttgaattttcatgacttgctttgaaaactgtttcatttgatatttttgctaggtttaaatgttataaatataacatggtcatctgaaacagtgctttgctattttttctatactttatttccactttttagaatatgtcacccttggcaaaactgatgaaacagttacattggtcattcaccacgtaccccttaaaaatcttttaatttcaagaccctccaataactgcagcagcaacaattaaaactcccactgaaaataagttacctgtcttagccaggtgtggtggcattcgcgtgtagtcccagctactcagaagacaggctggaggactgcttaagcctagaagttggaggctgcagtgagctacgatggtgccactgcactccagcctgggtgacagagtgaaaccctgtctctaaaagaaaacaaataagttatcaaaaaaaagtaggatggaattaattttatgatgagtagagg

SEQ ID NO: 95227 - DNA, 85021 bp, Homo sapiens
atttttgtatttttagtagagatggggtttcactatattggccaggctggcctcaaactcctggcctcaagtgatccacccgccttggcctcccaaagtgctgggattacaggtgtgagccactgtgcccagcctgaactgtgtaatatttctttttccgtgcaagttctttttgtttttcctgagtttttcttttccatgttgtttactaattccccctaaactatgccaatgttctaagcccctccaaatgcttagcacataaggtattttatcactgtcatcttctcagaggcacttgtcctggagtttctggccagctgtgcccagcacacaaacttcatcctaaatgacgcttttcttccatgcatcccatggggcagctcctctcctatgtgtcttatgtttccctctttcttgataaactgtttcctttcattggtgctcatcccccagtagctttctggaagcgtgcaggcagtagacatccgaaaatatttttgttcttcatttacactcaattgttagcttggctggatatagaatcctgagttgaaaacatctttcctccagaatttgaaaacattgcttcatcactcccagcgttgttgtgagaagtctaaagctagttgtaacctttctttttgaaacttttgggatctcctctttgtgttctgaaatgtcactattatgaaagttaggcgagtctgttttcatctactgcactgggaacttgatgtgatggggcatctgatgtggtactgcatgtccttcagtcctgggaaacttctggaattattttttcccctcctttctgttttctcaggaactccataactattcaggtattgcatctcctgaactgatcctctcattttagcttttcttctctattttccatctctgactttttgttccacttccaaactttctgttgtttttaaatttctgttatcatgtttttactttccaagtccttttcttggccccagatgttccttgttaaaaaaaatagtatccaattttgtttcctagttacaatataggtttggaatctctgaggatatgaatggtatcattttgttaggttgttgtctacctgcatagtccctgttagcttttttctcatttgttgttttggactctctgtggggttgaggctgtccatggatttctggtgattcctggttacctgcacatatttaagagctggggggaagctctgtcaatcaatatggctaagtcagtggtgtgcttctgtaagaattagcaggctgtggggttccccaaagaattcctccagcctgggggtaaggctctgggccaccaacatcctgggagctgagggtggaagagggctagtgtgaggtggggggaggcgtgtgtcccagccttccatgtgaatttgcctttaaagttttcctgttttcagttgggtagccctgcccacagctgggcttggtgttccccaattcagagactgtctattttaccttcttccagagaaaaggcttaccggttcctgctggggtaggggaaggactggcactcttagctgcttcttaaattttctttttttttttttcttttgagatggagtttcactctgttgcccaggctggagtgcagtggcataatttcagctcactgcaacctctacctcctgggttgaagcaattctcctgcctcagcctcctgagtagctgggattacgggcatgcaccaccacacccggctaatttttgtatttttttttttttttttttagccgagatggggtttcaccatgttggccaggctggtcttgaactcctggcctcaagtgatctgcccgcctcagtctcccaaagtattgggattacaggcatgagccacctggccttcttcccttttctaattagaaattatggttgagcgcggggcctcacacctgtaatcccagcactttgggaggccaaggtgggtggatcacctgaggtcaggagttggagaccagactggccaacatggtgaaaacccatttctactaaaactacaaatatcagccaggggtggtggcggacatctgtaatcccagttactccggaggctgaggcaggagaatcgcttgaacccagggaggtggaggttgcagtgagccaagatcgtaccacagcattccagcctgggcaacagagagactctgtctcaaaaaaaaaaaaaaaaaaaaacctcatgagcagtattgcctgtgcttaggcactcactgagcttctgtcctgtggcgagcaccactggaggaagtgtgggaaagcagggagctcttccttcctcggggacaggcagcaaggaccatctggctgaggaggctaacgccacgctctgcgtagtgatgcatcaggaggctgtaaaaggactgaaaggacaggcaccgctcaggaaacttttatattctcctacttggctgttgttctcattgcctggtgaagggcaggattaaggtggccgaaatacatgactgttagcttctgttgtggttgattttaaatttttaaatcttctcgttgcacaagtgaaataaagccccaaactcttgcccaccacagaaagtgactcgggaaacacatgcagagtgccctggagcagtgggcactgggcactcataagttaggagggaccccaggtcactgcgttctggagcttatcaacacagtggataattaaaatcataaacacggctgggtgtggtggctcatggctgtaatcccagcactttgggaggccaaggtggatggatcatttgaggtcaggagttcgagaccagcatggccaacatggtgaaatcctgtctctactaaaaataacgaaaattagctgggcgtggtggtgggcgcctgtagtcccagctacttgggaggctgaggcaggaaaatcgcttgaacccgggaggtggaggttgcggtgagctgagattgcgccactgcactccagcctgggagacagagcaacactctgtctcaatgaataaataaatcattaaaatcacaaacacattagatgtggacatctggagacttcctcatctggacagagacatgcaactttcaacagcagctcttccgtgtgcattcaatttcccatgcatacttctccactccaaaattactaacatattttctcttataggtttcattttcaaacacaaatatctttcctctattagtttttgtttgtttttttaaaaagacagggatcttgttatgttgcccaggctggtctcaaactcctgggctcaaacgattctcctgccttggcctcccaataggtaggactacaagctcatgccactgctggtgtaaaattttttttaaataaaaattaaacgaatttttattaaaaaaaatttttaggccaggtgcaggtgactcatgcctctaatcccacccagcactttggaggctgaggcaagaggatcacttgtgcccaggagtttgagaccagcctggataacatagtgagaccctgtctctacaaacaaacaaaataaccagatgtggttctgtgtgcccatgtctcgctatgttgcccaggctagggtgcagtggtgcgatcaccactcactgcagcctccacctcctgggctcaagcgatcctcctgcctcagcctcccaagtagctgggaccacagccacgtgccaccagtttatccagctgtggctttaaaaaaaaaaaggcgccattccttttcctttctgatttgaagtgccatccttgtcacaaattaaactcacctggattttaaaaatactgcatattcccagacccacccaaggaccagaatctctgggaatgggactccagccttatttggaatccagtgccttagagccttgctacccagtctgccaaggaccagcagcatcagcgtaacctgggagtgagacagaagttaagtctcagtacggacccagttctgctgaattcgaaactgagtggagcccagccatgtgtgccttcaccagacctctgggtgagtccgttgctggttaccatttgagaatcccctattgaggactgagtatccaacggggtgatcccgctgacaggtccacagtggcgatgaggaccatggggatgatggatatgtcccgaaggttctgatgggagcagttatgcaggcacggtgtataactcactttctccagctctgttttcctgtctgctgtcaggagacttgctcatagatttgcgtgaagatgacacacagatgacgggctgggaagtcatagcactgttccacacaccggaaagggctgagggctcctggcttggagagcactgagtgtgggtcccagcaggaccctccctccatagctggctccgctcccctctctctttccagggctgaccttggcagaggtcaccgtgaccctgaggcactggctgttctgaaggccttggggaaacaggtgggtttcttcgttttcaaggttctgctaaaggggtggggctgccgggggtgggcggtgctttcggaagctggctctgctgatgatcctattacctttcttcactgctgccgggattcccattaccggcgcagggaggccccagctgctcagatcttcccgggtgagccctcaggatgctgcagtgacccggccagggccctccacggggaggccgatgagtagtggagtcgcaccggcccagagagccaaatgccaccatgcttgatgcccgggggctgcacgagcccagaggagctgcctgaccagcgcgggaagccgagagggcttgctgctgctggatgtaagtctcaggtgggacctctctgtggccatctggagtggaaatcagaggctccaccttccagcctcggccatctgatttctcagcatggtttcaacgtgggtggcctgaggctgggttccaggcccaccgcggggggcaacgccctcccacaccaagatctctcccctctagggtgagccggggtagcaggctccaggatyccaccataggttcccagtagatcagcgtttctgctacctgtttgtcatagatttcctccgtgcttgttaaactacagactctctggccctttctatgaagacctgctagggccttgggggtcggacctgagaaatcggcataacaggtgcttctgtaacccctctcagtgaagtgggaacccccaattcctgggtaccagggagctttagaccagtgggaaagggcgggattcatgggggtctgcgagtgagaaatgccctcgtagacttgattactcctgcggacgacctcctctgcccctcccagggtgactcacaggaggctttcttgctcaccctgtctgagtttcttggaaacagagcagattttttttctgccaacactggggccccaccctgggttgcagggatcacaacgaggttacaacacctactttctgaggacacctacaggggtggtcgctgtcatctcccgcccctgagccctgccataggaggttaaggcctgagtgagacgtaaggcgggaccaaagctcccccggcttgggaggagggcactggcccgccgtctgtggatccttccagaaacacgggcgctcctgcagggggaggggaggcctggggcagaaacactggaagagtttgctagaaagtgtttccctctgggggtggggccggcctggcgctccccagcacgtgcgcgcggtacctggagaaggtcctgctgggacgcctttccttcctgcggcgccccgagcttgcccggccgctccctcccgcggcagcgcctttcccacggttctaggggagctggggtggggtggggtggggtggggcggggcggggacagctgcgcttgcagggtggacgcggcctcctgggcgccccccagcccccagccccccgccccggctcccgcccccgcgccccaggcctgggacacgcggccagcggggggcgcctgcggccgctcctccttccccgcccgcggtgagtgccgggccagcccgctgccactggggcggccactcgggcggcggtggagcgggagcgcgcagcaggtgagcgcggggcgcgggggagcgcggcgggcgggccggggatgcgcccggggtcgggggtgcccgtggccgctgcccctctccgcgcggtccccacacaggcgggcgggtggcccctctcccggcccgcccttccccggcctcgcgggtgcccggcggtggcggctcctgcccgggtgggtcggaaatgctccgagacccctccctcgggccacgacctcctcccttaggcacggccaggagacgcttcccagacgctgccccagctggcgcccgctttccgataacaagactgagactcgagggaggccgcccggccccagacccctgtggtggagcccgactggcttagggcacagaagggggctggctcggggcggcggggcctgttggaagcaaacactgcacagggtagcagcctctgtgggcgcaggaccgggctgtgggtctgcagcgctcccgccggagccagcagcgagcaggacccctcggtggccaaaggggaccagggtccaggggagagtgagccaggcccggcccctgcctcggaccccaaccgggaaacccagatgccttgcacatgaggaagtgacaatgggagccgaccccgggtaggggagagaggctggagcctctccatggattggagttgttccctttactggtttatgtctcaggtcccctccctcaaaggccaggaactcctttctgagtcccagagctgaagctggaaatgaccacgtgggcgccgtggacagaagtagagcccttaaaatgaggaacaggataccctgtgtggtcggctgaagccccctcgggcctggtccagagtgatgctccagagattgaatgaatgaatgaatgaatgaatgaatgcatgaccaacaggactgtagtgaactccgggtgaggctacagctgtggggacttaggcaggggctttgggccctgagaggagggggttctcaggttcagtgaatgccttcaaacgtgggcaggtgcccttgtagaagggagtttgtgggctgtggagctggggacaggctgtggggaggggtcagactccaggtctatggggggaccccacaggagtggctgactgggcctggggagcagaggtgagaaccctacatggtgagttgggtccatatgcggaggcaggattttttttttcttgaaacagggccttgctctgtcctccaggctgaagtgcagtggcacaatcatggcttacggcaacctccacctcccaggctcaggtgatcctcccacctcagcctcccgagtagcagctgggattacaggtgtgcgccaccacgcctggctaatttagtaatttttttttttttttttttttttggtggacgcatggtctcactatgttgtccaggctagtcttgaactcccgggctcaagtgatcctcctgcgtcagcctcccaaagtgctgagattacaggtgtgagccactgtgcccagcctttctttctttctttctttttgactcctgattttatgattcagtttcttttccatctgaagcagtcttctgtggctgggaacctggcttcgcaagaccaggtgttccaaaagctggcttttctttgctcgttcgggttcccccagggggcggggtcccttttccctcagcagccacacaggccctaagtgcccttgggcttaaaaaagagtgggtaccttttgggctttttcaagaggagagcagggagagctgaggctgttgagcccctcccaggggagcccctccaatttcccaggcccttacaaagcccctgcgtatcccttgtatctttaatcataagttaggcaggacccaaacgaccagtcccatttgcagatgagaaagcggaggtcctcacaggtctggtagcaaggagccgggctgttctcatgtgttcttggtggagctggtttgggtccacatcagcgagcctgagctccatccctaaatgcagaatcaagtgggcctggtgagtgcccgaccacgggcagcacacattccctgcccttgccccgcccacctctccctcttcctgttcrtaccccatacccagaagagccctggggctttgctcctgacccccacctcttggagcccccttcttgawgggcacaaaggaatgttgctgatggagaggggcctatgtcccctcctccccatccctgctgaatccagcaaggggtggcctgtgtctgggcaggaggcagagagctgagttaggcatgggccctgccatggccagtaggggagaccaagtggatgcactttgacgccaaacactcacactgcaggcaggctaggctgtgcttttgcgcattgaagggtaggcaggggccgttactttttacagataccctgtataaaaatttagggtatctttgggggagttcgtggacagatcattttcttatttagtcgtgctttctgtgttttcaaaattgtcggcaatgaggaagaaaagcaaaactttattccctttgtgtttgctctggtaaattttcaagagcagttctgctgcatctgaatcttagaattgggtttgcaagatgaggtctggaggctgatgccagtttctgaatttgacaggatatcacgtggtgaggttccaggattttgaggtatttcagtacacaatagcctcacagcctaacagaacggcctgggactcaggtggacgatacccttttggtcggtggcagagcttcatgtcacctcttccgctgtgtgtctgctgggatctgtggctcatggcggttgggaagctatctgggtcctgcctcctcttcccagatactgcagactgtgtgtggcccccttgagtgctttctgctctctgcgtaagagcctgcaccactcccacctcccaggccttgccctttgctgtgccttcttcctgtaagccttccagcatggtcctattgtgtgtcttagcaagtactcaggctctggcctggcgcagcggctcacacctgtaattctagctctttaggaggctgaggcaggcagattgcttgaagtcaggagtttgagaccagcctggccaacatgatgaaaccccgtctctactaaaaatacaaaaattagccaggcatggtggtgtgtgcctgtagtcccagctacttgggaggctgaggcatgagaattgcttgaactcaggaggcagaagttgcagtgagccgagttagcgccactgcactccagcttgctctgggcgacagagcaagactccgtctaaaacaacaacaacaacaacaacaacaacaacaaaaccaaagtactcaggcccctcttagacagttgacctcatgggttccccctgagccctggtctgtgggttagggatgtggcctgcaggtgattatgacttcaggctctgccttttggacctggacatttgggcctcgactatactgtaaggggagaacatggcaggcactcctggccccagccctctaaggccctcgttatcgcccagtttgccaggaggtggggaggctcctctgcaggtaagcacattctttctctggaaatggctatgtggggccctgctgggggaggtggtgggcatctggccagggccattgccaggtgtggggagcgggcagcctgcggcccagcccatgtgtgcacaggagggtgctccttcaattaatgaccacctgctgagtgaggtgccttgagcagctgtttgcagagggagcccctgttcagttaacaacaaaggtctttctttggaagctcttgggcctggaggacaagagcagcacaagctctaaagagagtcccctgggcttgagtcccagctcaatgtttggtagctgtgtgactttgggcaagtgcttcaacccctctgagccttcagtttctcacttatacaatgcggacagtaagagtgcttatctcaaaggccaaggatttaacctccaggttaaaggacactgaagagaggtgacaacaaaatgaattggccgggtggggtggctcacgcctgtaattccagcacactgggaggccgaggcgggcggatcacttgagctcaggagttcgtgaccagcctggccaacatgttgaaacaccatctttcctaaaaatacaaaaaattagctgggcatggtggcttgtgcctgtagtcccagctacttgggaggctgaggcaggagaatcgcttgaacccgggaggcggaggttgcagtgagccgagatcacgacactgcactccagcctgggggacaaagcaagactctatctcaaaaaaaaaaaaaaaaaaaaaaacctaaaatgcagtatgtggccaggtgcagtagctcacatatttaatcctagcactttgggaggttgaggtgggtggatcaggagtgtgagaccagcttggacaatgtggtgaaactctgtctctatttttaaaaataaacaattttaaaacaaataaattttaaaaatgcagtatgtgagcatatggtgggaaaaaaggtataaagcacatcagtgggatggttgataaaattgggtatgggctgtagattaaagtattgtatcaacattaaatgatctgataactgtttatatgagcccttgatctttggaaatttgcaaggctaaagaggcacagggtaaatgtatagatatagaatgaggcaaaattgtacaaataggcaaatctggattaaaaagtatagaattctttgtacttatcacttctgaaagttttttgaaagtatttcaaaatacagctttaaaaaatgcctgtcttgccaggtgaggtggcttacacctgtaatcccagcactttgggaggccaaggtaggaggaacgctttatgccaggagtctgagactagcttgagcaacatagcaagattctgtttcttcccaaaaaaagaaaaaaaaaattgccaggtgtggtggcacacgcctgtggtcccagctactccagaggctgaggcaggaggatcacttgagcccaggaatttgaggctgcaatgagctatgatcactctactgcccactagtttgggtgatagagcgagaccctgatttaaaaaaaaaaagaaagaaaaagaaaaaaaagcctgtcttatgagattgtggtgtgatgaaatgacattacttcccggtacttaaaacagcctctggcactcatcgagcattagctgttattgttgctgccgctttttgttatctttagtatgggcaacgtgtgtcccatctcctgttgccatgatcctgaggggcaggccttgtttctccactttacagatgacacagttgaagcccagagagrtgaagtggcttgctcaggacaccgcagaggccagggccgtgggaggaggactgcagaagtgcttaaagtttattttgaattaatcatcaacatttgaaaaccacaagatttttacataaagcctagatttctagtttcttttgccaacttagaaggcctgtacccctggccacgttgctgcatggcagctaccggtggaagctcggcagggtggcgcctcacccagagctcgggcctccagtgtgccccagtccccacctagccagccagccttgcctgtcattgtccccgcctsgcctccgggggctcccagttcactgtcctaggaagtgatcgcagggtgctgggccacaaagcttgggttctccccttccccggcctgctcccccacgcagagggcatagcattgcactgccttgactcagccagtatttgagcacctggtgtgtgtgggcaatggctgggggcttcaggcgaggaggaagaggagctgaagctttggggctccagcctgctctcctgtcacagtcccaggcctctgtccatccctcctgcagcctcaaatgtgtgcctggccctgaagaaggggtgcggggtggctcgctgaccacgccttgaggacggtgcaggaggagcccccgggctgctgttttttttcctttttgggtgtatgtaggcaggcagtcctttctctgtgccgagcctctggttcttcctatgtgagatggggctagaccaccttcctggagggtgggtggaagcaggaggaatgggacttgtcagtgttgagcagggctgagctctgcacacatgattgacatgatggtttcattccagtgcttggcttctaatgccactggtcccccgccagcctggcttcggggccagcaggaatgggttgagcaaaggctggcaataggcatgacccagggtgtggggtggaggcagccactgggcaggcattgtttrtgtgcctgggcaggcattgtttgtgtgcctgggtaggcattgtttgtgtgcctgggtaggcattgtttgtgtgccttcgtagctgtgccttaaggtcatcatctcacagaggaggggacaggctcagtgacgatggcaggagctcaccttggtgagtttggtgttcaacagatggggaaactgaggctcagagaggtgaagtgaccctcagaggtcccatgaccaagcaatagcaatgctgggactagaagccagagtttctgcctcctgggctaaggctctgggctccattcccaggaggaggaaaaagctcgtttcttatttttaaatggttttcattttttaaagtacagaaacaattcacatttaggtaatgaaaaatcagaaaatataagtaataaggtggggaaaaaacttcttaatagaattggaactcgaagtaacccattaacatattggtgtatattcttccagacttcttttcttttttcaacatattacaagaaaaaaagttgagcattacaactttctttattgtcctctaaggggagttctgtctgccccaggctttgggtgtggagttgggggtcagggaggttaaagtgttacagacatcagcagcccagcctttgacacaggaggtgccctgcgcgattttctctgtcccctgttgcagacatttcggttgtttccagcattttcgcagttagagagcygcactaaacagcccgtagctaagtccttgcatgtagtgggactgtttctttagggtaaattaaaacgagtccatttctttttcttttctttcttttttctgagagggagtcttgctctgtcgtccaggctggagtgctgtggcgcaatctcgtctcactgcagcctccgcctcctgggttcagatgattctcctgtctcagcttcctgagtagctgggatttacagatgtgtgccaccatgcccgactaatttttgtgtttttagtagagacatggtttcaccatgttgcccaggctggtctcaaactcctggcctcaaatgatccacccctgccgtggcctcccaaaatgctggaattataggtgtgagccaccgcacccagccaaaaatgggtccgtttcttacctttgtggtgccctcaggctggacccaggtttgtggtgggaccacgtctgggagtgtggaggtcttgggcactgagcgctttccactgcccactcttttgtggtcagaggatgagacagggaggggctccggggggagggctttgccaggagtgtgttctaatgacgccgcccaggctggcactggaagcctttaagctcctgtggtgaggtgggttgaggtgggggtggaggcggtggtgtctgctgctacatgctggtggggactggaggccagagcctggagcctcctttgcttccagcaggaggggacctcaggaagaacttgtgtgtgtctctgtctttgtccttgtctgtctctaactgcctttctctgtgtgtctgtctatctgtctgtctctgtctctctctgtctgtctctctccagtcaggagcagggttgaggctgggtctgtgtttctgaccctgagacctcgggggagttaccttccctctcaagaccacatgatcctcatctgtaggaaggggctaaaaacgaccccttcgctgtgtgagacatggaggagatggcagatcccagagtgctttcagtgacaaggttttgacgtttcattatgaacaagccaacagacacagcagcagacagggcagcccaccagcacgccactccacgcacccctgcctccgcttccgcaggctccagcccatggcctctgggagctgcctctcctcccacacacagtcccctccaggcaccctgtcacttcatctgtgagaatggtagtctatgttactaaaagataagatgcttaaaaaacacacaatcaccaaataactgttagaactaataaactaacacagtgaagctgtaaagtcaacacacaaaaatcagtcatgtttctgtatgttagctaactatctgaaaaagaaatcaagaagataatcccattcacaatagccacgcgaaaaaatacttaggaataaattcaacggagaaggtgaaagagctgtatgctgaaatctataaaacaatgaaccaagaaatggaacaagatacaaatagatgggattttatccatgttcatggattggaagaattaatatcgtgcaaatgtccatactacccaaagctattcaatgcagcctttgtcaacattccagtgacttctcacagaaaaagaaaaaacagggaacacacctttggtttataccaaaagctgtgtctccctgcccccccacccccaccccctgccaaaacaaaagaaaaaacaattctaaaattcaggtgaaaccacaaaagaccccaaatagctaaagtgatcttgagcaagaagatcaaagctgaaggcatcacactacctaatttcaaaatatattacaagctacagtaattaaaatagcattgtactggcataaaaatagacacattgggctaggcatggtggctcatgcctgtaattctagcattttgggaggctgaggtgggaggattgcttgaggccagaagtttgaagctagcctgggcaacatagcaagaccttgtctctacaaaaaaaaaaaaaaaaaaattaaaaatttgccgagtgtggtggcaggagcctgtcgtcccagctacttgggaggctgaggtgggaggattgcgtgagcctaggagcttgaggttgcagtgagctatgattgtgccactgtacaccagcctaggtgacagagtgagccaattaaaatatatatatatatttataatttcttttttatagagatagggccatctaaagtgctgggattacaggcatgagctaccatgcctggcccataagactctgtttctggaaaaaaaaaaaaaaaaaaaaagacgtatcaaccaatggaacaggatagagagctcagaaatgaacccatgaatatatttacagcccaatgatttgtttgtttgtttgttgttcagatagtgtctcactctgtcacctagcctggagtgcagtggtgggatcttggctcactgcaaactctgcctcccatgctcaagccatgcccctacttcagcctcctgagtcactgggacaacaggtgcatgccacctttggctaatttttgtattttttgtagagatggggtttcaacatgctgcccaggctggtctcgaactcctgagctcaagggctctgcctgcctcggcctcccaaaatgctgggatcacaggcatgggccactgtgcctgcccagtccattgatttttttgacaaagatgccaaggacccactatgggaaaaggatagcctcttcaataaatggtgttgagaagactgggttttcacaggcaggaggatgaaattagatccttacatataaaaaccaactcaaaatggactgaagacttaaacataagacctgaaactatagaactactagaagaaaatatagggaaaaagctatgtgatactggtctgggcaattattattattattatttttgactccaaaatctcatgcaacaaaagcaaaaatagacaaatgggatgatgtcaaacttaaaagcctctgcatggcaaagaaaacaggtaacagaagagacaaccgatagactgggagaaaatatttgcaagccaaacatctgaaaagaagttaatatccaaaatagataaggaactcaataacagcaacaacaacaacaaacccaattaaaaaatgggcaaagaacctgaataggcatttttcaaaagaacccatgcaaatgaccaacaggtatacaaaaaaatgttcaacattactaatcattagggaaatgcatattaaaaccacagtgaggtatcatctcacacctgttagaatggctattattaaaaagacaagagaagccaggcgtggtggctcacgcctgtaattccagcactttgggaggctaaggcaggaggattgcttgagcctgggagtttgagaccagcctgggcaacatagggagaacccatctctacaaaaaataaaaaaacaaggcaggtgtggcagcgtgcacctgtagttctacctagtcaggaggctgaggtgggaggatcacttgagcccagaattcagaggctgcagtgagctatgatcacatcactgcactccagcttgggcaagaccctgtctcaaaaaaaaaagagacaggtgttggagataatgtggagaaaaggaaacccttgagcactgttggtgggaatgcaaattagcacagccattatggaaaatagtaggaacctcccttccttccgcttgtgggtacatatccaaaggatttgaaagcagcatgtcaaagagatatctgcactcccataatcattgcagcattattcataatagccaagatctagaaacaagtgtccattaatggatgaagaaaatgtgacatatatacacaatgagatactatttagccttaagaaagaaggaacaacatgggtgaacctaatggacattacactaagtaaaataagctaggcacagaaggacaaatactgcacgatctcacttatgtgtggaatccaagaaatctaggctgtgtgcggtggctcatgcctgtcatctcagctctttgggaggctaaggtgggagaattgcttgaggctaggagttcaaaacgcatgggcaacatagcacyccatctgtacaaaacaaaacaaatgcaaaagaccaccaccaacaaaaaaatccaattgaactcagaagcagcaagtggaagggtggttaccagaggctgtgtgtaggtaagsggggcaggggtgggatggggagagatagagagaggtcagtcaaaggatacaaagtttcagtggaggaataagttttttgagacctattgcacagcatggtgactatagttaatgtacatttcaaaattactaagagggtaatttcaaatgttttcaccacaaacagtgctaaatacttgaggtgatatgttaattagcttcatttcatcattctccattgtatatatgtaacgtcaccttgtatcccataaatatatacaattataactgatcaatttacaataaaattaaaaaaacaaacattttaccacacatattgctaaacattagcaataattctttaagatcgtaactatccattcggtgttcaaacttccaattgttttgtaaatgtcatatatatatatatttatattttatatattagatttatctttttttttctttttttgagacagggtgtctgttgcccaggctagagtgcagtgatgcgatttcggtccactgcaacctctacctcccaggctcaggtgatcctcccacctcagcctccctaatagctgggaccacaggcatgcaccaccacaccaggctaatttttttgtattttttgtagagacaggatttcaccacgttgcccaggctggtctcgaacttctggactcaagtgatacgcttgcctcggcctcccaaggtgctgggattagggacgtgagccaccgtgcccggcctatatgttaatattagctttttaaaatccggatccagagccaggcatggtggcatgcacttgtaatgtaacctccaagctactcgagaggctgaggcaggaggattacttgaggttgggagctggaggctgcagtgagctatgactgcgccactgcactccagcctgggtgacagagagagcccctgtctctttaaaaaataataataatcaggatccgaatgaggtctgcatgatgagactgtgatatgtttcttcagtttttcatctgtaggactggtactcattctctctgtcttccatgtggtgtttttgttgaagctgggtccctttacctgtaggagagcttcctataatgtgtagcatgctccttgtcccctgaatcctayaaattcatagttgtatccagaggcttgatctaattcarttttgatttttttcacacaacagcacattggagatgctattggaaatttctgggaggcacatgtggtctggtgaatttccttttgtaatactggcagtcattgatattcaatgactttaaggtagtattttttttttttttttgaaacatggtccctctctgtctcccaggctagagtgcagtggctcaattatagctcactgcagccttgacctccaggctcaagcaatcctcctatctcagcctcccaagtagctgggaccacaggtgcccaccaccagctcaggctaattttttttgtagagatgaggtttcactctgttgcgccggctggtcttgaactcctgggctcaagcgatcctcctgatctccctgtcttggtctcccaaagtgctggaattacaagcatgagccaccacgcccaacccttaaggtagtatttttagttacagtaaaaaccttccgtattcaccctgttacaagtggtgcctagtttggtgttgggtggaaaactacccgtctcagggcattgtttttcctttttcttgctttttcttgattgtagctggttttcctcctctgttaattatttgggtagtatattttcattagagaaaaattgaaaagcagatctaaacaaaaagataaatattaaaataaaactgtgccaaattctatcacctagtgataactcctaagatttgggacattttcttcccgattttcttgtatgcaaaaaaatacaggcatccctgtgacatcgttaaaaaagaaaggggtcacacttcacatgcagttctaggagctgctattttcaatttgtggtatgtctgaagccccctttgaggatctggtgggagggacatggccttcctccctgcctgtccatgggtcacactgggccgggtgcagggaaggacaggcggcctctggtgcggcccagctgccaagtttttcaaaggaaataagggcttttggttggcagggcggttgctttcacatctgttcttttaggattctctgctgttactcaacacaccatgaccccagctgcccctttccttctccaaagccccgtctcccaggcgtggcagagatcggggccctggggatcatgggagtcaggcccctgcccttgagtgggctttgtcgcttacatgaagtcgggctgttcatctttccttgttgtggcattggaactcagccaagcagcagcgatttaggaggggcagtagccgcagggtgccgggtttaatgggaaagatgctgtttacttagaatatgtgttcatttggagtggctttggggcttaccccaggccaccccttaggaccaccactgattaggggtcagaaggcgctagtggacccgggcattttcttatgttcctagcctgcacaggaacagatccctgcacatccctgagcccacagctgagaagagatgtgggcagaggcctggaggaggtgggtggatgcactggaatgttcyccgcctcccagcgtgaaagatgcatctgggaggagggggagtgtctccatcgagctgtgctgcctctgcgagtccctctccctggggagctcacctcagtcccaagtgtggaagagctggggggcgtgaaaccacacggagtcagccctgctctgtcctcccacgtagggtgagcaggaggggacgctcacacggctggctgcactgtgttattgttgggagtatctgggtacaggtcaatctggcagaaatgtcgtgaggtcctgtggtgctggggagaggtggtccttgccctcagccagatgggtctgatggaggagaagacaggaccttcagtcactcctgagcagggagggtgctgcatgaataagttcaggttctttgagctgcaagtaccagaaacccactgtaaccaaagggaaagggagaaagagaggacttgagactttgtggggattcaggcatggctggatccaggggctcaaatggtatcatgaagactctgcttctctctccatttctctgtcttggcttccttttcaggccagttcttccacagagaggttgtatttgtaatctattgctgtgtaacaaattattccaattacctcataatttctgtaggtcaggagttcaggctgagctgggtgcttctggctggggttctctgatgaggttgcaatcaagctgcctgtcaagctgcagtcatctgaaggcttgactggggctggagggtctgcctccaaggcagctttgtcacatgcagggtgggttggtgctggctgctggcgggaggcctccgttcctcgaacacagatccctccttggggctgcttgagtgtcctcgagccatggtgtctggcttcccctagagggagagatccaaaggaaagctgagtggaagcttctgagatctttcatgatctcagaagccgcatattgtggtttccacgatattttattggtcacacaggtggtgtgggaggggaccattcacagacatgagtgccaggggacaagggtcactggaggctgactgccactgtggcaaagatggccccagtggctcgtagctcacacctactgccaagtgaatgagaacactttcccacagtcccaacaaaagtcctggaagtgaatttcacaggaccacctgagtctcacacccattcctccatatacgctagttgtgagtccacccctgcagggctggttccccataggaacagggagctgttaccaaaagtggacatgacatcctctgtggagaggtctatggcattgtggcctagaggaggtgatggtggggcactggggaaggcttcctggtagaggcggcaccagtacctggcgggatgggtagcattttgagcattccagggacactaaggcctgagcaaagaaatggaagagtcaggcagctgggtagcaggtggaggcagataaggatggaaaagtgagttgggccaggtgggggtccccgagaggcaggaggaggaggcaggacttgcctctggaggcacaggcaagccatggaagttgtttgaaggaggggcaggcacgtcgcagagcctagggatttagggtttagagcggggagaacgcctggctggcctcctccctgctggcttgcacccagcacccaccatgtgccttgtcggcatttctcacagcccctcatgggctcccagcagagtgggccacatctcctgactttacagagggactccctgagccaccagggtcccctagctccgccaaagtctctccctggagcccctgactccagagctctcagacaggaataatagcaggaccttcctgaaggctcctcttcatcctgccaggacgataggcgaggttggcgacaagtggccagcccaattgctcagaccctcccagggctcctcccggtgccgtgaacccccgaccttaggggaaggaagaggtgactgtggcatggacggtggtttttgttctcatatcccctggcccctacagagacgtgcccagagttccaagcccactgggtgctggggctttccttcccccagtaagggctcgacatctaggtttgtgtggcagggccaagctgtttgctcagcactcagtgttatttgtccsttggctgactgacagcttgactgtctgcttcgttttggctgcagtttgagtctctcctactgactgtttcatggcctcatcttgagcccccattgttgcccagggtaggaagtccttctcccctaaactctgggccacatatgcctggaccctgctgggtacttctcctcagatctctttttttttttttttgagacagggtctcactttgtcacccaggctggagtgcagtggtgtgatctcagcttactgcaacctttgcttcctaggctcaagcgatcctcccacctcagcctcccgagtagctgggattcaggtgcccgccacaatgcctggctaatttttgtattcctcccacctcagcctcctgcgtagctgggattcaggcgcctgccctcaagcccggctaatttttgtatttttattagagacggggtttcaccatgttggccaggctggtctcgaactcctggcctcaagtgatccaccctcctcagcctcccaaagtactgggattacaggtgtgagccaccatgccctgccggcttctccccagagctttatgccatgcctttgatgggcacctcttacctcctcccagcctaggaacttgcatgaaagggaactatgtccaagtcagttttgtgtccctagcaccagggaagaggatgggggttgctgagagggacagraaaggattggggttgtgctgtgtgccctggcgcctctaccaagcagaaaccagccttccctgtctgctactgtgaaagcccaaggttgcccttctttgggggagttgaaagaaagcgggtgtttgttcagcacacttgggagcactgtgtgccagggctgggagatcttgggtgagggtactcaccatgctcattaccttgtaatggggttaggggtagcctgtccctatggaagcttgtccttgttcccagggagggtcaggagcatgggttgtgaagtcaggtagatctgagcttgaatcctggctctgccttttcatagctgtgtgtgcttgggccagcaatgtggtgtctctgagccttggtgccttmttctacagagggatgatagcagggccttcctcagtggggctgccagggagtgccatgaggctgtgtgtgtaaagtcctgggtgatgcctgtgtggatcccagggagcattgacctgtgtgtgctcagatcctgcctgccgggacctcctagacagcgtgaggggtggggtgtcaagtggtggctggtggctgcggctgcggggagcagctggtttgaggcagtgctgaggctgcagcagggaagagactcaccgccacatcttccaaggagaaagctgggcgggcagcctgggagggcaggaggtattgctcagtgggacaggaaccttgattatcaaacggcagggtttactgtgcccctctcattatcaaactgcagggtttgttatcatacagcctctgctgtatggccagtttatcttcacacactccctgctctatggccggtgctggaaagcccagggccccataagctcccagcaggcagtggggaacccccctcctgtgtccaggcatctacatgtgtcctctccaagctgccccttttctcaagccgagatcatcttgcagaaatgttggtcagggtgggtcgctccccacctgccattcccctggacttgccctgcctcctatgccccttccccttggcccccgatatctcccccagcggctccatctccacgccgcgctttcctcagggtttgagcatgtgtctcatcagcctctcgcccactgggccaggtcagatctgttctttttcctgaatctactgagcatccagcaccatgccctcctgcatacgcaaacgggtatccctcaatacccatttaaaaatggacgggtaatttacatacaggcaagtgcacaaaccttcaatgtacagggtaatgagtgtacttaggcactcgcctgtataaccagcacccacagggagatttagaacctcctcagcccccagaagtttcctgtgtgcccctttccaatcagcggcctccctagaggcaaccgctgtcttgctgtctgtcactgtagattagtttcatcatttctgaagtttcatataaatggaaacgtgctgaatgtgtcttttgtgggtgggtctttcactgtccttgccatcttggatattcattcatgttgtgtgttagcagtgatctgttcctttttactgctgagtaattttctgttgtgtgaatatatgaaaatttgtttatccatttactcattgcaggatgtttgggtttgcagtttgactgttaggatgaaagcttctctgaacacttggatagaagtcatttgtggacacatgtactcatttcttttgggtaaatacctgagattgaattgctgagtcattggggaagcatatggtttgcttttgtccacactgccaggcagttttcatcatggtggctccattttacattcccactagcagtacatgagagtgaagagctgcttctcctccttgtcaacacttggtattttcattttaattttagccattctagtggtacagtggaatctctatatggttttaatttgctggtggctaatgatgttgagtatctttttcatgtgcttattggtcattttggcatcctctttgttgaagtacctgtgtaagtctcttgttcatcttttaattgggccatttgtctttttcttattggtttgtgggaggtctttttttttttttttttttctgagacagagtctcactctgttgcccaggctggagtgcagtggtgtgatctcggctcactgcaacctctgcctcccaggttcaagcgattctcctgcctcagcctcccaagtagctgggattacaggctcatgccaccacgcctggctaatttttgtgcttttagtagaaacgggattttgccatgttagccaggctggtttcaaactcctgacatcaggtgatccgcccaccttagcctcccaaagtgctgggattacaggcatgagccaccatgccaagcctgggagatctttatatatgctagggaggagtcttttgtcagtcatataggatgtgactttctcctagtcagtggcttgtctttcccctcttttgatgatgatgatgtctgttccttctctgctctgggacatttgctagggagacatttgctgataggagggcgaccctgatggggaggatcccctgaggtctcccactccctccagtggcctctggagcagcctggaaccagtgagtcctatgcctgtctccaccagatggcagaccttagatcacctgctagttccctgcatggggcctggcacagagacagcacctaacatgttcagttcctcctgatcagtatgtgtgggatgtctactctgtgaccagctggggctggacgctggggacacagctgttgatattacagctgccctcccatctctgccctcctcaaggatataacctaggaaagacagaccagcaaccagtggtcacagcacagaggtgctgtgatggaggaaggtgcaggggytagaagaccagaagaggggtgtctgaccctggatgtgggaggtggaggaggtacaccattgctttgaggagctcgtaatcccaggatgccagtcayatgctcagaagggctccctgaggaccaggtgctgctgtggccagcgggctggaggcctccccctctgttttgggagtctccactctctcctcttagcctctcctgatctgctccctcgccactgagcgccccatgatcccagtggggaaactgaggcctggcatagcagaaggggtgctggggtttgattcccagcctcatggtgcccagggatgttgggggctctccagggactctgattttggaataggagccccaaggatgggcctgcccytgccctgctcccagcatgggagcgtaggtgagatggagaggcagtgggctgggctggaagatctttgacctctcctgggcccctctcagaggtggacggggccaccttactacatagatagggaaattgagtcccaggaaggcgcggggggcctgtctgtgagcgtcagagcccacaggaggctcaggccaggccgctaattgctaattgctcactaaggatgcatttgctccccactttgaacagttgtcttggggcttctaatggaggtttttggtgcttgttttattattattttttcaaaattgttccagcttcaagcttcaaatttccatgaagtcattggagcccgacagctcccaggcctggcagctcccaggctgcggagagcagcactgtggctgggggagggggccctgcacaccccgagaggctgggctgtgggctgtgccttagccttgctgccgccgccgccgctgctgccgctgccggagcaggaagtggtgggtcccagatgtgactcactctcattaggtagcgtggaaggagccttcggatgggtgagcctgggcgcgtctgaggaagggcaggcgggggccgggccacctccctgcagaccctggccggctgctggggccggggaggagagccaggtaaaagtggggtgtggggatggagtgtcaccagtcctagtggcttgagccccaggggacggggctggacagtgggtgggaagcagctcacccggcagcctggcctgggagtgcactgggcagggtctgggctgggggagtaggaggctccrtgagcctactgggcagatggctgggagaggcggcccttcaacaggggaccagaggcgacttgtcactggcttttcccagcctgacaagaaagtgcggttgtgaccacaatgttgtacatgtggcccgttccatctggaattctaggaaccacagactctcaaatgtccacactccttctcgagggtgtaattttacatttacaagcacacatgacttttctcaatgaaaggaaacattggcaagggaaggccaattcaactaattttatgaaattataaaacaaaaaacaaacaaaacctctgaaaggagtgcatgcctgagggtcaggaaaccaagatgcctccaaaaagcagactggtttccctttccctgcaatgcctctcctctatcccccagggaccgcatgggccatctggagtgggtctttctggagcgggtctttctggagctttctatgcattcatctaaacatgtatgtacagagggtgaggcagttgcctcttctctgtgtcatcacatcagggtcaagggcagggacatctgtggctgggggcttcctccctggacagccattgctggagaggagaagggagggccgggagggggaagccaagggcctggaggtaggggccaggccgagccacctacgacaggggccctgggtccaaggcctggacgggcagccagtgtgggctggatgtgtctggaagggctatgtgaccgtgggccttcactagcatcaccatcttgcagatggaggctgtgaggggtggactcaacaccagtgtttctcggagtgaggaccgggctgcccagggaatcacagggggttctagcctgtgtgtggaaggacatgtttaaaatctaagtatttgtcttggggaaaaaaaaatctgtaaataggacattgccattgtgacatcatgactgtattattgtcttagacgaggccaaaggagacataaaagtgacaagccagccaatttgagaggaagtgccaagtgccagccctgcaggaagtgcaggaggctgagggggctgcagctcaggaaggcgtttgctgcacagccttcgcttcccacccggttgtctgtcttcccacctccagaggccctgggttcccaaggtttacctgcagctcctggtgcagagtgtgggggaggggaggctctcagattgttccagattctgtggccctcagaagggcaggtgtragctttgtggaggtagcgtctccggtggtattttctttctttcttatttttatttattattattttttgagatggagtctctgtctgttgcccaggctggagtgcagtagtgaccctcttgggtcactgtaacctttgcctcctgggcttaagccgtcctcctccctcagcctcctgagtagctgggactacagttaccrcaccactacacctggctaatttttgtatttttagtaaagtaaagacggggtttcaccatggtggccaggctggtctcaaactcctgacctcaaatgatccatccacctcgacctcccaaagtgctgggattataggtgtgagccaccacccccagcctcttttctttttttaagacaggatctcactctgtcacccatgctggagtgcagtggagtggtcatagctcactgcaaccttgaactcatgagctcaggcaatcttaccgcctcagccttctaaagtgctgggattacaagcatgagcccgacgcccagccttctagtgctgttttcatgaaagaagcagctgtttactagcagctgttttccgggtgatgagggtgaaggtggtattgcagaacmtctttgccaggagtaggtctgggaggtttgcttgagggcatggaggttggtgtagggagagctcaggaagtagaaattgggctggagtgtggcctctggacaggccacaggagagtctcaaaaggagaaaagatcccagcactttgggaggccaaggtgggcggatcacttgagcccaggggttcgagaccagcctgggcaacatggcgaaaccccgtctctacaaaaaatacaaaaattagctgggtgtggtggcgtgtgcctgtagtcccagctacttgggaggctaaggcaggaggatcctttgagcccaggagttggaggctgtagtgagccatgactgtgccactgcactccatccagcctgggtgacggaatgagaccctgtctcaaaataaataaatttttcaaaagagacaaaagtccgactcgatggttgcactggggacatgcaccccactctacaatttatagctactgatttgacccattccccacctcctccaccgctccatatggtaggtgccgttcacctccagtttacagaggagacagggcccagaggggctgtctatcctgaatmacccagcagatcggtccycaggcatccagttgtgcccaccacagtgtggtctgctgccacatttgagcctggagtcagggccagcacactgtgtctttggcgagatcagatggggcaaagctgagaacaggggctctggttggtgctgagggattcgtgggggtggtccttactgggaagatgaggaattgggctcctgtgagggcctcccctaccctgccctgtgcctggacttcgctgggcccactgcgggagagaagaggtaggacgaggccttctgcgtggctgggccagggtgggctgtctcacgtgctttcctggatgtgtggttgggtcatgccttagccaggaggtaggtggtttgtccactccctgtcattgcaagggtcacagaggtggctgggtggcctgaccctcagcaccgctccttgcctccctcctgctgtcctggaggaagaggatgtggacttgttcatactgaggtgacacagcatcctctctcctacctctcccactgcccagggagagagcagcgcttaactccgctggagaaagttccaggcctttgagggagcatgcagagtgggtcacagtggatgcctgtatcagagcagcccattctagcctttcatggggtgggagggaggcatttactacttttaaaagacacgtgtggccaggcaccgtggttcacacctgcagtcccagcgctttgggaggctgaagtgggcggatcacttgagctcaagagtttgagaccagcctaggcaacatggcacaaccccaactctaggaaaaaattacaaatattagccagcatggtggtgcatgcctgtagtcccagctacgcaggaggattgcttgagcccaggaggtggaggctgcagtgagctgagatcatgccactgtactccactctgggtaatagagcaagaccctgtctcagatagatagatagatagatagatagatagatagatagatagatagatagataaacagatagatagacacatgtagccaagagctggaagttagttggaactggagaatgagaccacatctgaacaccagccagagaagcaggggtcttccagaggttatccggtccagcatcccgcctccaggcagaactggactgtgctctggtccggcggcacgggttccagctctgttctgcctcctcccaacagcgtgtgagatgagcaagggatggagcctgtttcttgcacctgtgaaatggggttggtaaaggtaccccctgcatcaggtggttgtaaagattaaatgagctgatgcacactctgctcctggcacagcggaggcgctacctaagtggaagtgtgcgtcactgtcggtgtcgtgaggctctcgtctgccttgtcctgccttgggtgggagattggacctccctgggggagcctgggtggygcaggcaggcagggctgagctgagcagcctccctgtcacctacatccctcggactaatcattttctttctgttcctcagtttccttatctgtaaaatggggctgatggcagtgctcaggtaggttaatgggagggctagctgggtgaaaacccttcccaggcacctgacactggtgtgcccaggctgagaggttgccacacagtggctggagcccctccagctgtgtgtgccggggatcccgccagccccctcatctgtgcagtggccccctccccaccaaggacagtagcatggtgtcacccggcttgccataggcatctggcctgacctgctgctgcacacggatttctcaactggccacatcatggctagggcattgcccaaccctgagtgcagacctgcttggccgaagcaccctccgttccctgctctcccctggaagcctggaagcctttctagaagggaccagtgttggggtggagaagggttgggyggtgagtctgggaccagagytccgttcctctttggtggcctttttccttggaatacctaggaccgtgctttcctgccgccaccagctctctcattttttattttgacagggtctggctctgttgcccaggctggggtacagtggcctggtcatagctcacagcagcctcgacctcctgggctcaagagakcctcccaccttcacctcccaaagtgctggggttacaggcatgagccaccacacccagcctgtcctctttgatgggccaatttcacaggcattttctgagcacagcacagcccagtgctgccgagatgaacctgagcagactctgtgttaggatggggtggggacggctgaccttgggcctgggagaaggtcctccctgttctagagcacagccatctggtcagtttctcctggcttgtgaggccctcccagaccgggcctgacttccctccccactcccgccacttgtcaccgttatccactctgggccagcccccctgacattttcactcccagcttggctatctcctgcccctttcctgcccttggcccccacagttcccactgcctggggtgttctccccaactgctgcttggctgtgtcctccaggtgagggcctccttcaggggtcctccagcatggggagaagaggggacccagccggctctgctcttgagctgttcactcagccgcctcccccacccccttggccttgctttgagcccctgtcttgctgtggctggggcccaagggacgccgggataccctcttctcaccatcctccctttatgtccctgtttcccccaccaccgctgaccactggaagggtgaacccacgactgggcctgagggaaagggaagccaagggaggtctttggtgcaggtacccccgtttccagttgtgtttcctggccccaggctctgcccattcttgcctcctcccagggtatcaggacatgctggaggtgacagggcagaaggaatggccatgaccctcagacacaggcctgtaccctggggaggagctcatgtccctggaaggcagaaggtacctgcagtgggtgatgccaccacccgccttctagggcccggatccctggaggccgctggacccagggcaccctgatcggggtgctttgtcttccaggccccaggctcttcctgccctccagggtgcccttcctgcccctgtaactggccagctttcctcatgctggcctctgaaacaacctagtcacactgcctcgggcgcagctgactgagatcattgcttcctgkagtcaccgactggctgggcagggagaagcctagcaccctgggatgcagctgctctgcacagatggggaaactgaggccctgggagctctgcagccttggggctggtgtgtcttcctggtgggagctatgttggagttgcaggccctgccccattcacaagcacatcccttggcctcactcatgggagggatgtggactgggggccagtcttgtgggcttgtcttggtcctgctgctgttcttgggagtctgggtctccctcctcctgggcatctccttgctggagcaggggtccagggtgctggtgtaggctgggatgagacctccttctgygtgtgtgcgcatctggctcctgggcccccaggcctgtctccggtaccccctctggctgggaggaggagcccttttaagctgtctgaaggagctattttaaggggggcctgggctaatgggaagtggcctcttttgatatacccagactccctggagacactgctccatcccctgggggcagggaccagcacttctgtatccctttgtcaggctcagctctcctggkcatgggtacaagagcagagctgccctttgggggcaggcaggaagtgaggctgagaccctggtactgaagtgtgtccccagtgcctgtttatgtcacgatttctcaggctgctcaccctggtgtctggagctgactggggtggccctgggtgatggtacttgctgtgtgcccacatctacgtgaagcccctgagaactggtattgttaccagtccattctgtgggttaggaaactgaggcccagagaggttcaggaacatgcccaaggtcacacagctcctccaaggtggagctgagattcacggcctgctgttggatctcagagcttgtgctcccaaccaccatgctttcctgccttccccttctgccctgccctggcatttcttttcctcacttggctcatttatgacaatctgccctcctcctggcatgagctcctcaggggacccatgcctgtcctgtgtgttgtagcagcagcagtgcctgcacctgctgcaggcaggagctcagtggcacttggcagatgggggtctggtggcaccaacatgtggcctctttcctggtggcaggatgggcccctttccatgtgcaatgggggtttatgaggttttatagctatgaggtcacgtcactgctagaataggccatggagcgaagagaagggtttcatccccattgctcaggtgagaaactgagtcctgagaggcaggtcacctgccagagctcatgcagttgggactggggattccagggttggggcccagtccttagctgccagttcagtgctggctgtaccccccagtctgtggagtatggggtttgatgtccctgtgtaccaggcagggttagatcctgggagctgggtagtgcatggctggacgtgcagccaggtagtgacaggtcagggtagcctgtgcttctgtgggaggtgcaggccctggggaagctaaggaacaaggccagactgggaggggaccaggcagccttcctggaagaggtggcagctcaggttggccctgaagggcgggcaggagttcgccaggcagaaggcatttggaggtgaggaggtgggcgtgtttttagattgccggagctggagatgaaagggtggggcttgtttggggaaccgaaatcagccaaatcacgcagccacagaggaggccagggaagctctagaggcgttttttggccaaggggtgagcagagatcgggcttggtgttttggggggtcctgggtaggtgtgggaggcctcgtttcgggggccayggggctcctgtggcgtgagactccatcacagtgacctcctgtgcccaatagctccgtaagggcagggtttgtggaaggaaggagtgagtgaccgggaatggggtcttgggctccagggacagccatggcgagggctcttctgtgtgggtgcaggtccggaagctggggctgtggttggtgggggaggctgggtggggctgcttcccctgcagaagggctcttccgggctcttggcgcggtttcacgaggcagtcccctctgtgtctctcgtgccccctaggcctggatcgggttctcaggaagcctcggggaagtgagggtcttagcgccttggtttggggctgggcactttgcgagctggtgtcatggaggccaaactgggggcctccgggccaggtggtggcttcaggcttgcygttgggacaggaggccaggctaggcagtgacgcctcactgagctccatgggtggcacgctgagctctgggtgggagaggcctctcccactgacctctctgtgactggcttctctgctggtctgagtgggaagggccctcagagaccctggaggcctttcctgccctggaggagtcaggcccagagagggtgaagaattgcccgagtcacacagctggtgacagggagagctgggactgtaccttacatcacctgacattcagcccagggctctattccctgcactgtggcagatggggaaactgaggcaggtgggccactcctctgcattccatgggagaggcaggaaattcgacaggagccctttgccgggttggcacttggagctgttttcctgcttgcttttccccagggcaaggtgcttcccagctgaaaactgcctagggagggtgctgttgagaccgtgagcacctgagagccctggtctttcactcaggcctctcctctcacctccacctgggaggctaagctcagggtaggtgtcctggcccacaggcaggtgcatgggctggtcccgccagcacctgcaaccttcttgtgcgcagctagcccaacctggggtcaggtggaggtgggtaagtggggcccccagcattaaagagcttcataggctgtcaattaaggggaggctagtgggctctacaggccacagctacccagggagccttcttaggggaggagttcctaggtgggtctcagagactccaaagtcagcatttcccaaaggaggttcattagggattcagtgcaaaaagagtctcattaacaaaaggatggggaaatgttcagctgtgtttaattcagcaggcttctttcctgcaggacttgtcagagcctttaatttgctaatgtgtatgggggatctttaaatggggaagaggagaatgttgagctcagcaccacctgtgaccagaaatggctgtggatgtgtgtggctgcgcatatgtagcttttcatgttcctgcttttgggcagaatgcacctcaggaaatgcagatagagagttaatctgcactgggccttggagaggggcaggcctgggttcgaatcctagctccactgtttcctagcaggtgggctttgggcttggaggttaaggtcccagagtcagttgccctggctagraatggagcgagagcacccccrcccaccacccttgggtagcccagcccattcatggttctctgcaggttctcagaggagacagccagccaggtggtttttggcccagtttgtctcccggctgggctcagaggtcgcagagcttgtcttgaggcctgggtactgtgccgtctcctgccagcaagcctggaaggcttgggccgaggacccgactctgcctgggatgtcacctgtgagctccctccagctcagaccaatatcaccacctccctctgacctgggttgggtgggacggctgctcccttgaggcccaactaggccctacatggaggggtcagcccacactgccactcatggccctggaaagccggcctgagttgctgaccaatgttctctctacctcccagaggctgggcactcacaggccagagtaggggccgggcctcctcacccccagtgctgctggctcatggcagggttgaggggtggggacaggtgccgggccctctcacttctgcaccccatggccctttctgacatcttggtgatgcatgccatctagactggggcattttgcgccaggggtggctcagtacactgcttgcatcacccccaactgaatcctttcaaaatcctgtggggtaggactgttattctccttttgttaaaatgaggaaactgaggcacagagagtctgttgggtcatgtaatgtattatttgttttaatatttaatttatgaatgagtgagatggagtcttgctctgtttctcaggctggaatgtggtggcacaatcatcacttgctgcagccttaacctgaactcaggaggtcctcctgcctcagcctcccaagtttgctggctctacaggcatgtaccactgtgcctggcttagttttaaaatttttttagagatagcatctcactacgttgcccargctgatcttgaacttttggtcttaagcagtcctcctgcctcggcctcctgaatagctgacatcacaggcatgagccaatgtacctggctaggtcatgcaatttaggtgtgatgggcctgggattcatttttcctattacacatttttttttttttagtcacataagcaacacactgacaataggaatagaaactgaaaatgagaagtgggatttatccactctgtgaaatcaagagttttggtttttctgtgtcctggttccatccttatttgttccaggcattgccatgtggatttttcacaggataccctgtgacgttagtttcaagtggcctcaggctttttgacagctgcatagtattccattgtaaggttgtatcataatttatttcaccagttcgtgactgataggtatattattttcaatcttttgttattacaaataatgcttcaatgactaatcttgtacttatgtcatttcatacttgtgacaatgtttgtacgatacattactcaaagtggatttggtaggtcaaaaagcaaatatgtccttcagtgactttgttaggtattattaaactaccttcactgggggttgtactgactcacattcctgcccaggagggaatgtgagtgactgtttccaacacagacttatgagacttatgaaatgctttgatctttgcccatcagataggtaaaaatggttttccatggtagttttgtttttgttttaaagatggggattttgctatgttacccaggctagactcaaacttctgggctcaagtgatccgcctgcctcagcctcccaagtagctgggactataggtgcatcccattgtgcctggctaccatggtaggttttttttttttttttttttgaggcggagtcttgctctgtcacccaggctggagtgcagtggcacaatttcagctcactgcaagctctgcctcccagtttcacgccattatcctgcctcagcctcctgagtagctgggactacaggcacccgccaccacgcccagctaattttttgtatttttagtagagatggggtttcaccgtgttagccaggatggtctcgatctcctgacctcatgatccgcccacctcggcctcccaaagtgctgggattacaggcttgagccactgcgcccggcctaccatggtagttttaatttgtgtttcattacgagtgtggttagcttccttccaaatgctgtgggttggttgtgggttgcttttttttttgagacagagcttcactctgtcaccgagkctggtttacaggcatgatcttggctcactgcaatctctgcctcctgagttcaagcgattctcgtgccccagcctcccaagtagctgggattataagcatgcacctccacacctggctagtttttgtattttttaatagaaatggggtttcaccatgttgctcaggctggtctcgaactcctggcctcatgtgatctgcctgactcagcctacctaagtgccaagattacaggygtgagccaccatgcctggcccttccaaatgtttaacagtcatttagattgccttttctatgaactttctcttcctagtcttctcccatttttctattgggctattggtcttcttttttatttgtgggagctctttacatatgaaggagattagctccttgtgatatgaatcacaaatgttcccctaatctgtcacgtgtcttttgattgtgcttttggtaatttttaccatgtatattttgttttttcatgtaactgaacttatcagtctyttctttatggcttttgggttttgtgtcaggataaaaaggccatattcactacagcatcatatgagaattctcccatagtttcttgctctctttggaaataatcctggtataagttgtgaatccagcttgcttgctgtcttgtggatgctgcctttctaaacagaatactagcagcctaagagttaagactcaaatgcacatctttcctgtccccttcaggacagtggttactctgggttgcatctgtccatgggcccgtgaaatggatctctctctctctytcttttttttttttttggcagagcctcactctgttgcccaggctggagtacagtggtgcaatcccatctcactgcaacctctgcctcccgagttcaagtgattctcatgcctcagcctcgcgagtagctgggactataggcacgcaccaccaccttgggctcatttttctatttttagtggagacagggtttcaccatgttggccaggctggtctcgaactcctggcctcaagctatccacctgccttggcctcccaaagtgctgggattacaggtgtgagccaccgtgccaggtctrtggagctcttcttgtacctcccagccccattcatgtcttgctgtcactgctggacccactgtcagggtggggccctaggcaatgtgggaagtcagccagcaccctcttgtcctgggcaggacgagaaccacgtgaggtcccccatggccagctggacttcccctttctgttcttccttatcaagggaaaagggatcagaaatctgttaaatgtgggcgtgaaagtgtttcccttctgaagggggaagctagtgagggcagtgcttaaagaaatgaatcactaattgaatttcaagcaagagtgaggaaaaagtagggctatttctccaacaggggagcctggttgattgcttagttgataaacactgttgcctgaacacccgctgtgtgcagagacctagcagataccctggttggggcagtgctaaggattctgccttctgggagctcatttcctgagcagaattccctcttggtacctggcctggcacctggtgcacagaaggcatgagtgcacatctgctgaaggtatgcatggacgaactctccctgggcagtcactaactagcattagaatgggcatgagacatagtggacctggattcattatcattggcagctggagccttgggggtgcattttaaaggggagattgatcagggtaatgcttaaccaaatgaatgaagtggaggggaggatttcaggaacaaagaacactttttttttcctttttttgttgtgtctctggcagtttttggtaacaagatgatgctggcctcatagaatgagttagggaggagtccctcttcctcaatttttttgaatagtttctgtgggaatggtactagctcttcttcgtatatctggtagaattcagctgtgaatccatcaggtcctggccttttattggtaggctatttattactaattcaatttaggagctcattattgatctgttcagggaatcagtttcttcctggctcagtcatgggaggattgtgtgtccaggaatttatccatctcttaggttttctagtttttgtgtgtagaggtgtttgtagtagtttctgatggttgttttttatttctgtggggtcattagtaacattcctgtagtcatttctaattgtgtttatctggatcttttctcttttcttctttattagtttagctagtggcctattttattaattttttcaaaaaaaaaaaaaacaactcctggattcgttgatcttttgaatggttttttgtgtcttgattttcttcagttcagctctgatttttgtcatttcttgtcttctgctaggcttggggttgatttgtttttgcttctctagttctttcagttgtgaagttaggttgttaatttgagatctttctaagtttttgattcggacatttagtgctatgaatttccctcttaacactaccctagctgtgtcccaaagaatcaaagaacaactttctacccatcmctagaagtagctctctggggccaggtgagaacatcagccttttccctcagtttttctccagttgcctatccttttcattaactgattcagcctccacccccagcccagtcccaactaggccagagctggcctcagaggtctgacacagcccctcctttgcaagaggggaaactaaggcacaggtcaggcaagagacttgtttagggtcacagagcaggttggtggctaagctgggactggaatgcaggtttctggtccccaagactgatcagcagcctgtgccctgggagtgggaacaaagtcagcctgggggtgcttgggggctatggagggggagcagggttggctgggggctcatgccgttggggaatttcagtctttgcccctgctcggcaactttgcaggctgttaggagatgcggtggggggcctgcccactctgcacctgcctctccctggaccccatggttgggctctgaccctgcagggcttcctctgacactaagcgtgccttcttggccatttgccaatttgtcttgcaagcttggcctgttggacatcatgacctgtgcagacaacctggttatcagcacccccagtttactgatgaggaaactgaggccagagtgtgcaggcgactgctattcacaggccattggtagcagagctgggattgggtgcaggcatcctcccagaggccaagcgtagctgggagaggtgtgctgtggcaggtaaggcaggtgcggcaggtgcagcaggtgcttcccgatcttgagggaggccctttcttcatctgccctcatcctttggctgtggcgccctcctccctcacccatgccactctgcgtgcttccccaccctgggcctggtgcaggattctggctggctaccctgctcggccattcacgtcacaggtgtttgccaggaccagctgcgggacacacacacacagatcccaccacgacagtttggcaagtcaggggccgggatattggacccacactgggaaggcctcttggtacgggaggtgcctgggagagcagggcatgggggccacagggctctggggacagagagggctgggcttggggggatgggaccttgaataccagcaacattgaatccctgggtcccacgaggtttactgggggcctcttaggtcaggcttgcactgggcagagcagctgctggcttcatggagctcagggtctcttgagagagttcgcgttaatatgagattcccttggcaaatgaaaaatctgcctgagacccagcctaccaggggagccgagagccggcaggaccgggggcgcgagacggagcatgcaggttttttgtctggagctgcgtggcgtcccaggcagggtgtgggcccaggggcctgagcggggcctcttccctggaggcttccatgcccccctcactccaaggtccccacttcccctttttgaggccaacagggccccaaagcagccctgagcctgctgaggctcggccggaggaagccaggctgtggtttctgccaacagtggccgggtgaggaagtgggtgtcctgtctgcatctgtgaaagctgggggtttctagaacatactccctgcaagggctgtggttgtgctggggacgctgccagatcagctggactggggaaggattttccgagcacccagggacctggccctgcagttgcagtatggagtcccagcctcttgcttccagcaggtcttctggctggagaacctggacccagccagccagtatttgataaggagaccacagtcctgccttagttgcagggaagggataagggggtgtgtgtggggttgctcagcaggcttcctggaggaggaggccctcctggagttcgctggcctgaacttgctcctgcaaggcagagggaagtaattcgatggggtcccctgagctccccacctcttggtcatagctctgtcctgggccttgtttgtagggaagaggttggtgttttgggatattatgggatttctggatgccagccccatgagggtgatagggaccccggatatcctgtgtttaaatcccagctttttttttttttccagacaggattctgctctatcacccaggcaggagtgcagtggcatgatcatagttcagtgaatgtagccttgacctcctgggttcaagcaattctcctgcctcagcctctcaagtagcttggactacaagtgtatgccaccaagcctggctaattaaaaaaaaaataaacaactttttatagmgatggggtctcattatattgcccaggctggtcttaaactcctgaactcctggctggggctgggctgtggagcctggaaagtgtgatggagggatgagcggggctgtcccctccaagacccagctcctttctggaggactggctgtgtctgcaggggcacactcttacctctgtgctgactgagacccttccagttgactctgaacccactgaggggccacrggtgcttgttagacgcaacaaactgggtccagaagccygatgtggactttgagactcttggttgcgagtgacagaagctcaaactggctgaagctgaaaggggcattgcttgtcccatgtggttaaatatctagaggttgcgtaagcttcaggcacagctggctcctgtgaccccaggaggtgttgccaggcccctgtcttgtgccagttctccatgttggtgtcagtttcaggtgggctctctccttgtggtggctcgggtgtctgctgacagtgtcaggtcaccgacaaaagagaacgcctctttccctgggtcagcagaagtccaaagagagccttcacttcccaggcctgtggcattagggcttgagagggactttgctgattggccacactggggtcatgtggcccatgaaccagggtactgagggtcgggagaagggacattgcacagcagaagcatgaaataccctcctcccatgtggacaccttccccacaggggagtcccctcttctttaaaatggggctgctcaccctgctctaccactggggtggtcgtgaggtgagagtaagtaagggaccccctgggactgcagtctcctcaggaagaggggacgtgatacctctgctcttggtggctttggagttcagacaggacccatgcggtgtgggtgagggagtgacagggaggcagggcttgccttgagctaagggaggactcagggccagaaaaagtgcccagtgatggaggagactgccctgagaggtggtgagcmcccccgtcatggaggtgtgcaagctaacagcagggtcattcaatccgggagccctggattggatgtgtctcagacatggcagaaggattcctttatccagggccttgtggggaggccctccctgttgccaactgagtcgagggctggtggaagaactggtgattggacaggaggccttgaaaacttcccgggcagggggtgcctctgggtctggctttggcggkgtggctcctagggaggagctggcctggggacatgccactggtggtgggttcctgggccccctctggagatgtgatcagtgagttcattccccccaggcctcacggtgcccggcttgttccaggagctggccaaggtccctggatgggctgaagtccttgtgcccatgttgtccactgtccacctgcgcctgcctgccgttgcccagaaagtggcctaatgagttccttgagaggcgtgtttaccaggcctgtgttcccacgggcccttgggactctctcagctggttcctccctttcctcgtggtggcccagcctggctttgtgtgcctggagcgggtgtgtccacacactctcacacttgcactttcatgcacgtgtctggccgcctcagctctggtctgggggctttgcctgggagatggagcagttgtggggagtggcctcagccctctggtgtttggagcttctcagcctggctgtcctggtgcactggtgtttggcagcaggccaggggtcaggtgggtttgctgtttgtgtgctgtggcatctggctcagtcccccgggatgtcagtgggcaagcctgggctgaggagccctggtttgggagctggcagacctgggtttgcatcccagcctatctgtccaccagctccagcagtgtgatcttaggcaaccactctgcctctctgggctcagttctgcatctgtgagacggtggtgccaccttggcctttgccggttgtgaagatgagagtgaatgtgtgtgcaggtgccgggggtgacaggaactgctgctgttattactgcaaagggctattttggggtggggggtgctgaattgaatgtatctcaggcagggaccttatcttgtttggcaacccccacagcacagggttggatgtatatggttagcacacagtaaatgcctcttgtggaatacagactgattagtttagatttagaggttgtaaactagtgggctgcaawyattgaaaaatttgaaatcagctgccaacatttaaaaatcatcatttcacgtagaaatcagatttgtagcctgtctgagcactttgggcactttgacagctcttggccacatccctgaagggttgcccctcgttgaacaggtgccaaggcctgtagacacctgcccaggcactgaaggggatggggcccccagcaaatgaccccttcctccttccccaaatatgtggttttaccattttgttcctggtgtgtggtgatggaataggaacttccagaggaaatagagcctgaggtggctcctggaattgaggtggccccagggatctcatactagcaggtgctggttggggacttggggaccctggatatcctgctttttgcctttgggggctgggggctcacctggccatcttccctccgctggaccagctgtcctttgaagcttctgctggcggctggccatttgtgccctgtgactgctctgagctgtcccgtgtctcacagcctccctgccctctgcctctggccctgtcctggttccaatctgaggcaggcctggaggacactgggggcstggactcttggtccagggttgcccccttcatgcaaggttcctgctgggaatatggcagctgtccccaagtccccattgctgtgtgagggattgcacaattttggtaattttcctwcctttggagactgatggggatccctggggagagagagcccagactagcacacaggagatataagggctggcaggcgtaggtgtgattcacaagcctttttggaatcaatgaatatgctaaggaatgaatggtgctggggaaagaaggaacccatatgggctgagcatggcaagygtggggtcagctcacagtgttgtcacaaaggggccactgtgtccctctctgagactcagctcccttttctgtgaagcacggcttgcagacatctgaaatttgtrtcagtgggctatttaaaaaaataaacaagatttttgctgggtacagtgcctgaaagcttaacacttcggaggctgaggagggtagattgcttgagcttaggagttcaagactagcctgggcaacatggcaaaaccccatctctacaaaaaatacatggcctactgcagcctaagtctccccaggctcaggtaattctcccacctyagcctcctgcatagctgaggtcccagctacgcaggagtctgaggtgggaggattgcctgagccctgggaggttgaggctgcagcgggctatgatcacaccacttcactccagcctgggtgacagagtgagaccccatctcaaaaaaaaaaaaaaaaagagagaaagaaaatgcagttttatgtggagcttactgtaacacagatgcagggggctaccctggctgaagcaggcatgggggcctgagcctatgcccccccaccttcccttcccattgggggcctgatgcatgtccccaaatctcagggctcctaggatcacagcttggaaccctctgtgcctggaggcatgagactcactggaaaatgaagtgaatgtggtgattgcaccaggaccatggggacagagcagagcctggaaacagacaccatctgtgtgtgatcacctgacttatgacagaggtggctccactgaaattcagagagaggatggccggttcactgaacactgctgggataattcaatatccatatggaaaaaagaagtgaaccttgatccctacctcacaccatacccagagtgaatcgaaatggatcagagacctttgtgtgaaagcaaaacagtgaaacatgcagagcagagctggcctgtagaagcttctgtgatgatagacattctctgtttatctgtgctgtccagtacagcagctgcatgtagccattgggtatttgatttttttttttttttgagatggagtctcactctgttgcccaggctggatgcaatggcacgatctcagcttactgcaaaatttgcctcccaggttcaagccattctcctgcctcagcttcccgagtagctgggattacaggcacacgtcaccatgtccggctaatttttgtatttttagtggaggggggttttaccacgtgggccaggctggtctcgaactcctgacctcaggtgatctgcctgcctygacctctcaaagtgctgggattacaggcatgagccaccatgcctggctggctgttgagtatttgaaatgtggctagtgtgactgagggactgaatttctaattttattttaaattaatttaaatttaatttaaaatagtggctgggcatggtggctcatgcctgtaatcccagcactttgggaggctgaggcaggaggattgcttgagcccacgagttcaaaaccaccctgggcagcagggggagacgcccatctctacaaaagagaatttaaaaattagctgcacacctgtagtcccagctacgtaggaggctgaggtgggagaatcacttgagcccgggagtttgaggctgcagtgagctatgatcgtgccactgcactccagcctgggcaacagagtgaggccctgtcttgaaaaaaaaaaaaaaaagcagccacatgtggctagtggctactatcttggacagtgcagtcctagaagacacaggggactagctttacgacaacaggacataaaagttaggttagggttaagatggataaatcagacttggtgctgtgaggcctgggccccgctctccctgatgctagccctcccctgacttggaccattaggtcaagttcctgtctgcttcgtctccgcagagctgaggaactgcgtgtggagtyagcccagtctggatgcacaggaggatgctggyggcacagtgagtgaggcctggtgccagagctgtgcggaccccttgttggccatggagcagcaggcccagaggccctctccccagccctgcttgcctgcctcggagaggacagaggcctaggcccacgggggagggtgttggcagacagatgccctccaggccctggggcctccttaacggccccttaacgacacgcgtgccaagggtggaggatgccagccaaggggcgctacttcctcaacgagggcgaggagggccctgaccaagatgcgctctacgagaagtaccagytcaccagccagcatgggccgctgctgctcacgctcctgctggtggccgccactgcctgcgtggccctcatcatcattgccttcagccagggggtgagtgagggcagcccctgggcttcacgtctcggccccaaccttggccaagctgctatcttctcttagcctcttctgtaaaatgcttatcttctgtaaaatgctatgcttttttgtttgttttgttttgtttttgggtttttttgagacagagtctcactctgtcacccaggctggagtacagtggcatgatctcggctcactgcaacctccatctcctgggctcaagcaattctcctgcctcagccttccgagtagctaggatgacaggtgcatgccaccatgcccagctaatttttgtatttttagtagagatgggctttcaccatgttggccaggctggtctcgaactcccaacctcaggtgatccacctgcttcggccccccaaagtgctgggattatagacgtgagccaccatgcccggccaatgctctgtcttttacagcacatttagactggtagaagacaagtttctaatttaaaaaaattttttttgagactgggccttgttttgttgcccaggttggccttgaactcctgggttcaagtaatcatcctggcttatcctcctgagtagctgggagtacaagcatgcacgaccatgcccagcctctctaactttaattcagttttgaagtctggagtggtttcagacattacattaacttgtccagataaactactctcatttttctccatgatgaaattcgattctactgaagacctgggtcagggatggcctgtgtatcactgccctcacttcctgtacccatgcagacatcattaatcaatccctacattccacactgagcctgtctacattctcagaatcctccttttgttttttktttgtttgtttgtttttgtagagacatggcctcgctatgttgcccaggctggtcttgaactcctggcctcaagtaatcctcctgccttggcctcccaaagtgttgggattacaggtgtgaaccactgtgcccggcctcagaatcctttttaacacagctctccaggctggcaccacctatgtcatttccggcccaggcacttgccttggtacagccactagctgtgtttagctattgagcatttaaaaagtgggtaatgtgactgaggaactgcatttttcaaaaaaaagagttttgctcttattgcccaggctggagtgcaatggcaccaacttggctcgctgcagcctccacctcctaggttcaagtgattctcctgcctcagcctcccgagtagctgggattacaggcccatgccaccacgcctggctaatttttgtatttttagtaaagacagggtttcaccatgttggccaggctggtctcaaattcctgacctcagctgatccacctgcctcggcctcccaaagtgctgggattataggcgtgagccaccatgcccagcccattttctttttagtgaatgtaaatttgattagctgagttctagaagaacactcagaaactccagggtgtttatgtgagtgaagtggccaggacctagcagctgccagtgcagcctggatccatgtggctaccaaccacaggatgcttgctactgtgtgccagcccccagatcaggcctctgcccccacggacctcccggatgctgtgcccgtcctgtcccacctctgtgccattgccycagctcctcccctgtgggatgacttttcctggtatccctcaccagcctctgctcactcactgagggccaggcgcagtgtcctctttgggcggctttacaaggctctgcctgtgaatgagtcctgccctgtgcttgtggtatcacctgcggctgtgcacagagcaccgtgggaacccagagaggaggcagaggcagatggagagtgatggcatcatgggcggggctgtgggtgatgctctggttcccgagatgatgggaagggggtggttgaggcagccttggcagaggtgacaaaggccagaaggtgagtgggaaccaggtgtgggagggtgcatccacacccttcacgtggaggaagctgtaagtgaggcagccggcccggcaggctttctggaggaggtggctctgcactggggaaagccgaggcattcctgtctgtttgctccacccaggacccctccagacaccaggccattctgggcatggcgttcctggtgctggcggtgtttgcggccctctctgtgctgatgtacgtcgagtgtctcctgcggcgctggctcagggccttggcgctgctcacctgggcctgcttggtggcgctgggctatgtgctggtgttcgacgcatggacaaaggcggcctgtgcgtgggagcaggtaacaggaactctggactccctgccagctgcgccttcagcagctcccatccccgtggttggtgggcatgccacaggcccttcgtgccccacgcttggctgtgtgtctaggatggccccaggctggttttgtccctgtgagttctctgcattgacagggctgaggtggggagagcatccactcggacgctgggctgcagcacttttgggtggctccagtttggttggagatgacagaacttcagctcaaagaggcaaaaaggcacaaactggttcctgtgtcaggaaaggccaaggggtcagtgctgggctccagtgggtaactggaactggggcctctggacagcttcggccccgggcacgctgtccccaggtgggggcagagaagttcacagcggctccaggctgcccaccccagttgagagagagggccctttctcaaccagctcgacctgcaggcttgagccacactggcctggctgtggtcatgggcccagtcccagagaggctgtcaccaagcggtagcacactctgaccagtgggcctgggtcctatgacagctcctgtggctggggcagggtggggtgaggcccaaggaaaccatgtggactgaaggggagggagagggcagcactcccagaggggtggacgcaggaccagccggtggggatggtggggcagctctgggggtggagggagggcgggtggggccgcattgctggaggcagctggtgagagggtgcctcagcctcccggtaatcatttctgctgagcgagaaccacgtggcaggggcaccaggtgggggctccctggatcacgcggggcatggagcctcccacctagggtggccacaggcagtggatcagcacaggaaaccatgaaccttgtggccgggcccaccctagaaacacattatggcttttcttgttcccttgtatgtctgcccacgcagggggtggcgagggagccaacctaaggatacgcactgggtgggctgctgtggtgcagggttccgggggctgtacggcctggggcagcatcttggggcaccgggctcaccaggctgcatccacaggtgcccttcttcctgttcattgtcttcgtggtgtacacactactgcccttcagcatgcggggcgctgtcgccgttggggccgtctccactgcctcccacctcctggtgctcggttctttgatgggaggcttcacgacacccagtgtccgggtggggctgcaggtgagggatgggctaaggcctctgggggaggttttgtggtctgggtctaagggcagatgggggggccccctctgggtgaatcagacccgaaggccccggagccgtgtttgcagacagcccgctccaaggccgggccctctccacgtctgctcggaagctgggctccaggcgtggccctgccctctggcctttgctttgctggcctagggctcccctgtggctcagccctcagggtcgtgacctcaggccttgcctcccggttcagggacactgtcgtggggtgagtcccattgccgaagtttcccctcgaaggccctgtcctggcggggcttgggggagtaccccagggcactgccttgtgtctttgtgttgaatgagtgaatcttctgttcataattattgggkgtttagagaagtgttttccctctgaccaggcctggtgtcctctccaggcagaggctggccctccacacagccagctgggcgctgtgccctctrggactgcccttagcacgcatgcccctcgggccctgggctctgtgaggtggtctcttctgcctccctgggtgtcctggtcttgcagtcctagtgactcactaggagactagctcctgtctgggcctcagtttccctgtctgccccaggaagagtgccattctcagtgggttgaaggtcagggaatgggaagaggtgccatcactagtccgcctaggggtctggtgcctcgggagggcatgggccaggccacataatgagccaaacccctgtctacccgcagctgctggccaacgcagtcatcttcctgtgtgggaacctgacaggcgccttccacaagcaccaaatgcaggatgcgtcccgggacctcttcacctacactgtgaagtgcatccagatccgccggaagctgcgcatcgagaagcgccagcargtgggacccggcccccactcctcaccctgtacacccctgtcctcttcctctttctgttggacatgagacactcatgctgccatgtgcatgaggtgcatggccagacacccatgcaggtctcacctcggtgagtcctgggctccagcagggtaaccatagcctgctgacccttgactctgccttcctctgtgtggtttcagtcctgggcacgcagtccccaggtggcggcagagaaggccgtagtggctccaggctgctcacccatcagcttagcctccccagctgaaagagccctttctcagtcaccctgagtcccgggggctgctgggtacatgggaggtagatgctcagttgggttggtggaggacaagagcagagatggggacattgtgggcagggcaggcaggcagggaggatgggggccaaggaggccaggtctgggacctgatgctaccctgcctgtcccccgctggtccctccgccggtcgctttgctggtccctctgctggtctgcccacccacacccaggagaacctgctgctgtcagtgcttccggcccacatctccatgggcatgaagctggccatcatygaacggctcaaggagcatggtgaccgtcgctgcatgcctgacaacaacttccacagcctctacgtcaagaggcaccagaatgtcaggtgggcggtgagacgtgtgattagcrtatcccggggactgggyccaccrttccaccggcccccaggcggcctccccgccctatctggaggctcagacccctgcccatatagggattgggagagggccccatggttccaggtcaatctggggccctccctgggtctcagaacccccacttgygggcaggatcagatcagggctcttaaattagagaatttagattggtattgaaagatctagcacacccccaaaactgtaaaactgtgtgagcaaacatagcttttgtgaaggaaggggtcctttcagatggttctcaagggagcacaggacccccagaatgaggtaaagccccccggccttggtgcccaagagtgccccggttctgacacctgtctttggctgatttgcagggaaccacaaarttttacttgaatgcactgacctgagtttgtcaagtgtcgatgtgggtgctgggtgccgttgagtgtagatgtgggtcccaggagaccccctgggtcctctgcctgcagcgccagcattacatccaaggctggcccgctgccttttctctgggctgtggatggtccatgarcttaaggactttggagcagggagaactggtgcagatgccagctcttggcttcccagcaagtctcaatgtcctggagcctcagtttgtgcrtctgtagaacgggagttcggcaagggctgtgtgaggactcgatgcctgtaaagtgctgggtgtggaggttggcttgagggagcatggagctgcctctcaccagggagttctgaagtctgtgctgtggtgaacattggatgggaaaggggaaggctccgggctgcctgcaggagtgcccttcggctgtctgcagtgatagggcctggggtggggccgagggctcctgtaggctctgaattttgctcccttctgctttaacgkgaagcccctggaactttaatctgtctctrtggctgggcgcgactctcccatccctatggaggcygaggaaggacgggggtgaatgggctcaggcctgscaggctcctggggctccagacagtcctscgtgctcctgctgctgctgtctaggagcctggctctgacactycctcccaccctgccccatccccagcatcctctatgcggacatcgtgggcttcacgcagctggccagcgactgttctcccaaggagctggtggtggtgctgaatgagctctttggcaagttcgaccagatcgccaaggtgagcccgctggcctacaatgggcaaagccaggcccctcccctgcctattacaccccaggggtgtcctgtgttcagtgccctgctggaattgggatggggaggcgtggctgaattttagcatccagccagcaaacacaagcgccccatggtaaaggtgggggtgagtggtggccacggcagccaggatcctgtgcccccagagtgacaggccagtggggagactgacagtgcacactgggcgatatactggggctctggagctcagatgggggctcaggaggaggagatggctccatcctcactggcaaggctagcagcctccactcacctggtagctcaggaggactgtggaatgcccagcctcacccagaagctgcttttcacaggatctgaggtgaatcaygtgcacattaaacttttacgttttgtttgtttgtttttgtgagatggagtctcattctgtcatgaaggctggagtgcagtggtgccatcactgctcactgcagcctcgacctgccaggctcaagtgattctcatgcctcagcctcctgagtagctgggactacaggcatgcaccaccacgcctggctaattttttttttttttttttttttttttttttgtagcaatggggtttcgccatgtaggccaggctggtctcgaactcctgacctcaagtgatcatcccctcttggcctcccaagtgctgggattacagccgtgggccaccactcctggcccaccttaaagtctgagatacttgaaaaaatatctgaggaggaaagggaacagtgttcttagcagggggaacagcatagacaaagcctggagtagaaagaaagccccgtgtgtccatggggtgaacgtgctcagtgtgcgtgtgaggtgtgagggggacaagggcacaaggtctgacatgcaaggacatgagggctgaggcgaggaccaggatgctgaggagctcgacacgtgccaggcagggagggggtaaggcaagcaacatttccattaatggaccaaatggtcctgagagagggtaagtgccaggccctgagtctgggtggggccttgggcctacatggtatgtgctttgaagaagagaagtgtgggggccaggaagcctggggagcacctagcccagcctcaggtgatcagggcaggcttcctggaagtggtggccattaaatagagactgaagtgtaagatttaaggtggtggctccctatcctggctgtacatgcaaatcacatggaaagcttaaataaaacaccagtgcccatgtccacacccatcagagttctgttttgttttgtttttgagacagagtcttgctctgtcacctagcgtgaagtgcaatggcataatcatggctcacagcagcctcaacctgcctgggctcaggcgtcctcccacttcagcctcccgagcagctgtgactacaggtgtgcaccacaaccccaggctaatttttttgtattttgtggagatggggttttgctacattgtctaggctggtcttgaattcctacgctcaagtgatccacccacctcagcctcccaaagtgctaggattacaggcatgcaccatcatgccctgccccatcagaattttttttttttttttgagacggagtcttgctctgttgcccaggctggagtgcagtggtgtgatctctgctcactgcaagctccgcctcccgggttcacaccattctgcctcaccctcctgagtagctgggactacaggcgcctgccaccaygcctggctaattttttgtatttttagtagagacggggtttcaccatgttagccaggatggtcttgatttcctgaccttgtgatccgcctgcctcgacctctcaaagtgctgggattacaggtgtgagccactgcgcctggccagaatttgtaagagccccgcaggtgtctctgtgggcagagaatcaatggtctagaacttgatgsgaggcaagttatgacttcacactgggaagaatttttcatgatcagagctactcaatcccaggagggactggaagtgggctccctgttgcagggggtaaccaagcttctacaggattgcactggtcagggatgctctggaaaactgtcccatcctggggattgtggactgagtgactcagagggcctgtctagcctggaaccttccttcaggatctgcatggcttctgaaccagcagctgggagccccagaggttgggcctcatgtgaggcaggggccctgggctcgggccacagctggccctttccttaccataaagcccacacagagggtcccttgcccttggacacagtcttccctctccagcaggcccaggaggcgtggccctattgcacagatggggaaagggaggccatggcaggtgccagcttcccagtcagagcatctaatctctgggcagagttgggcagggctggtcccagccttttctcctatcaacaatcagattccagaagtgtaagctctttccaagagccagggcctcctctctcagaggcatacaagtcacacctccgcacaagacccagctccccaactccaagtgtcagagacacaggggactgtcagccggtggagcagccgggggaatgtggcctctcctacatccccgagagctgggctgggtccatgggcagtcctgtgcctggtccgagaggagatcagggtagctggagcctagtatccaggtctgccaagattgcctgctttctaggaaagccactgtcctcttgtccttgcagtcactcagaactcactcagcatgtgccagatggggcccagcaggaaacatctggcacacgctgaaactgagtaattggcggagggcacaggccagggatggttcccaggctgggcaggtgcaggggacctggaggcagggctggtgctgtgtctggggcctgggtctgtgatggctgatgggcacagagtagggacgaggacaggataggctcgagtcctggagacagatggtgttccaggagcaggcctagccctcgtgagcctgcaggacagagccctcttagctccctcctggccagaagccagagcacagggccacctgctggggcgtccagtccgagggtcagctgagtggggtagagggtggggaggggagagcagaggcagatggcgctccttcttcagctcccctaaagccccacccatgaggcctcggtgcatgtggccacccttgctgagggcttaaggagggtctggtgacgcagcagtgcctcagatgaacctcagagggctctcgggggtccccttctctccctgggccttttcctatgagtccccaccctcgccgctctcctactctgccctccccattccctctttcctctctgcattgatatctttcctccccacccctaagccctgtcagcacagccactgcttgggtgaccttgaaacctgctgatcccttggtgtgtacacctgtgacctctgtcctcaccccccactcctgcagcctcctggctacctcgcagtctcttccccagctttgtggccccagggctcctgtgagtccttgagtactcttcctgcagagactggcatggccggctctctcggttcctcggggtcttagctcaaatgtttctgattccaactctgagaggtcttcgctggcctcctgggaacatcacttccctcctgtgccttggttttctccttagcccccatcacagctgggcacactgttttgtttttgtctttctagtttagtgcccacccctcctgcctacgtgcaagctcygtggctgcagagatttgcatctattttgttcactgctgtgtccccttgcctggcctggggccgggtactcagtaggcactcaaacattacctgggcaaatgaaaccaaggcagacccctccccgaggcccttaggaacactcgtgttcacctctggtgcttgcctgggggtycctcctggggaggcccccatgtcgctaagccttttgccaggcccagaagtggctcctggtgactggaccccaggaggcaagcccccagccaggagagagccgggtgcaccctggagggtggggggaggcggctgtcgtgagaggtcccagccccacatcttccagtgaccaggcycttccctcaccctgcaggccaacgagtgcatgcgaatcaagatcctcggcgactgctactactgtgtatcgggcctgcccgtgtcgctgcctacccacgcccggaactgcgtgaagatggggctggacatgtgccaggccatcaagtaggtcctgggcgggcccaggccctgggtcctgccctgtggcggaccctcctgggcatggtaggggatgtgtcattctcatgtcacagatggggaaactgaggctcggggggttgggggtgaaagcagcttgcctggaccacccagcctgctggaggattcagacttcatctgtttgcgtccctccctgtggtgctgcctgtgactctgagtcccagaaagcatctccggagctcagagctgggtgatgtgaggtcagggcggtgggctccgctcccctcaaggatggggtcttagcaacagcaggaggcttcagggtaggcagccgggggacctttccgacccaggggtcgactccaaggctccatctgcttcctgctccccagtgaagatcctggagtcaggcttggtcctgaggctgcggggagacccccmgctcccctctaggtcccctgtggctctgagcagctggggtctgtgggaggaatttgccgagagggctgtatggggagagggccaggcaggcccagccaggctgaccagtgtggggcagagcagggcccggtggggctgcccgtcctggatatcaggccgtgttccagcctgtccttctcctgaagtcctgccataggtggctggtgttgccagaaagaagcctgggcagagctggaggggcctggcctgcaccactgcctgtgtgacctcaggctggcccctgccctgtaacaggcggaggttgtacaggccctcgtgcacctctggttccgaccctggaaggcttggtcagtgcccagccttgttggtggacacgtggtgccgcttgtcatggggactcaggctctgttcctgtcttgggcgtcccctgtgccccaaggaagctctcccgtggggctcygctcctgtgctcagtggtgctaacaactcccagggcccctgcttcccagggattgggggggcatagaaggtgcccatggtctgggcccctgtgttccttgtctatgctaggttttgggtggttcctggaccccctctgtagacgccagtaaactttatttatttatttatttatttgagatggagtctcgctgtgttgcccagagcgtatctcggttcaccacaacctctgcctcctgggttcaagcgattctcctgtctcagcctcccaagtagctgggactacaggcgcctgctaccatgcccggctaatttttatatttttagtagagtcagggttttgccatattggccagggtggtctcaaaactcctgacctcaggtgatctgcctgcctcagcctcccacagtgctgggattacaggcatgagccaccacgcccggcccccagtaaacttttaaaacccagccggtgctgctgggcagggaaaacacccagtgatggtattttaggtccatcaacatgggctgtagtgactagttggaattcctcctccctcctacctagtccttgaggtcagctgtggccacacctacttgtatgctcctggggatggggcactcagctcttcctgaagaggcagccccatcaggctgagaacattctctcccgtgggctgagcgcctgccctgttcccacatgctgccctgtacccaccccacacctgggagcttcagcctgtcccagggcttaggcagggctggggtgactgggccactctgccccaggcaggtgcgggaggccacgggcgtggacatcaacatgcgtgtgggcatacactcggggaatgtgctgtgcggggtcatcgggctgcgcaagtggcagtatgacgtgtggtcccacgacgtgtccctggccaaccggatggaggcagccggagtacccgggtgaggctgggctgggtagccgcagggacagaggcctggggctggctgtggatggagggttctgcggttgggggtgggggtcaggtgtggagggagagatgaatgtagaaaagctggcctggggcccaggcctgcctgctgtgcatccctgggtggatgccagccctctctgggccccaaggctctgcctgacttgggtctcccgtagccgggtgcacatcacggaggccacgctaaagcacctggacaaggcgtacgaggtggaggatgggcacgggcagcagcgggacccctacctcaaggagatgaacatccgcacctacctggtcatcgacccccgggtacgagggctcagaggccgcagctgggggggacccggagggactggaggggccctggagagcctggcccgcaccttggaggaaacccccatgtggagggagaggtggggaagggccctgcctgggcaggagtgagctccctgttcccaggcacattctaggcaccgagtagccactccctgggcctccattcttttctatgtgatgggaaaacagcgcctgcctcaccagaaggagctaatccgagcgaggccttcacagtgcgcctggcacgtcacagcattctatgtattctcgtcactcttggtttattttccatgaggtggttattaatctcccagatttccgagagacacactttcaaaacaagctttggatgaaactcaggaaagcagggagtggcctgggagccactgggcaggagcctctgagtgtcctgggtgctgactgcaggtcccctggtggctccaggaccccacggtggaggaggcagttccactgccctggccaggtggggcccgccttggcctgtctgctgcccgaccctggcctgcttcagggagtccggcacgtctggccacttctctgtgaatcatccatgaggcttgctcaagaatgtcggcccagccagcgagtggctcctttcactctggtcctcgctatgccttggggctggcccgactgccagaccctgggggaccaagggctggcctgtgagcctccctacacatctgctggcctcactctgcccccagcacccccagtgctgcaccatccatactgagccagcatctgggaaaacccctgccggtacctgtgtcccattccaccaccctcctagaatagggccctgatcctcgccctgtaccccggccctggccccgcccctccaagccccttcccctgctctcctgtccccctcaccccacctggtctcctcctgcccttccactaccagggtggtggcacccgcaggtccctgcactcaaaacactcctccctccgtccctaatgcccttgcttgtttatccattttccttgtctgttgtcagcatgagtgccatgccggggggctcctcctctccaggctgcagccccccaccccgtgctgagatggatgcccggctcgaagctagtgctcagatagcccttgaatgagtgaagcagagctcctcacccaggaggctccaaaatccacccccgcaggctgccaggttgagcagggaaaactgcaggctgcctgggccgacttgaatttcagataactgtaaatcatgtttcgcataagtgttgcacgcagtactcaactggacagttgtatttatttggcggccccaccttccccccaccccaccctaccccaccctcttttttgtttaacttcatttatccacgcagttgaaagttcaaaaggtgtgaagggcgtgttgtagaaagactccttgtccccagccggcacatctcagaggggacctgtgcagtgagtttcttgtattccctccacagggattttcacggacaccgagtgaactgcgagtccccccacccttcttgctaaggtggcagtggcgggccccatggtcgcgcaccctgcatttttcctaccttggggacatccctcctgtgtgcagggtgctcgtctgtagctcctgtttttgacatggaggtggattttctgcactggcttctatgggctctgccttacgccattgctgtgtggcctggctggggcaaggtgggctcctgtggactggatggtggctgcagctgcccccgtggggctcataccaatgccatgcccattccgagtaggcatgtgtttgctcagaactgaggaatctgatttttgtttctgctttttatttgtttctcagggggctggggtgtctggattctctgctaagtgccagtgaccttgaacttgagtggctaggtgctgtgtaggcagagttgtcacaatggaggaggggacagagaaacgcatccacccccaccaggttgctcaccacagggccagcgcgctcttcctgctctgggacactcaccgaggctgaattccacgtggctcccgtggctaggcagatagatgcagctaagggcttaaaaatgtttctatcccaaaaggaggtgagaggtttccaggaaagttgcgctgtggcttatcgagtgcttgtagctgtggaggcttgtccatggggtgtttgtggggccctaggagacaggacttccggaggcagaggaatgtttcaggggctaaggagagactcagcagacctggagcccgcttaagctcatctctggtggccttgtgggtctttctcttccctgtcccttttccagtcctgtctggccaccccaactggcgaaggcctcaggcatgtgttcttggatcggggtgggggtctcaggtctgtggcatgagtgggggcgggtagggctggccgtgcattcagggcctggctgaactactgagtgtccagcatgaggctgggtctcgcaggcacgtggcaggtcatggccctgtgccatctgcggttgggggccacacaagtggaactccctggatcgctgccctgggggttggctggcctctggcttggccatttctcggggcggctagcacccctcttcctcctggctgcttctcacaggaaggagcgaatgcgtgccggccacacgtgggagggcagggtaggatgcctgtggctttcccaggcgcctcctggggaggagctgatgggtgctcaggccccagggactctctggttccaaggagcctcaagggcagtggggcctcgggcttgggacccaagccctgcctctctccctggggaggcagagcagggtatggggttgggtacagtggtgggtacttgctagcctcttctcggcctggggaaaggccagggcaccgagctgggaccccatatggcctggcctcagagtgcaccaggctttggctggctagtccccaagggcagccgctctccaaggggactgcgggttgagcaacttctttgctgtttattttttcacgggctcagggcggcgtcacacttcagggagagctggatggggatggcggccccttcctgggccgagaggggaggaggtggcacaggcccatgtccatgtctgcccgcagagccagcagccacccccgcccagccaacacctccccaggcccaagggggaygcggccctgaagatgcgggygtcagtgcgcatgacccggtacctcgagtcctggggggcggcacggccctttgcacatctcaaccaccgtgagagcgtgagcagtggtgagacccacgtccccaacgggcggaggcctaaggtaggtccccctcccacccagaaagccagggattggggccccaagccaggagcaggagagtgagtgctgaagatctcctgccctctcagcctcactgtccccatctgtaaaatggccacagcctctgccccacctcctggggctggagaggaagcaaagacatttggagaatactccgggatggccaggaacatccctgtcctccttgatgcctggaccacgctcagctatagtcaggatgtctgtggcttggacgacccygacaccttgtcctgtgtatcaagtgccggaggggctgaacctggcccagcagtggccttcagggcccagtgttctggggaatgactgtatcctttcctcccttccctttcagagcgttccccagcgccaccgccggaccccagacaggtgcgtgccctgccctcctggccaagtcctgctgcagccacctcctccaagcaggctgccctgagcagcctctgtccagtgggcagctccgcaaggcccagcccaggacctctgtgaagttggccagggcttgggtcaaagcatttctaggaaccagagtttcctggcccctggcccttctgcatggccacatgatggagcacctgttgtatggtgccctggcggggtcagtggagtcggtggaagggaaggagatgactgtgggtgtcctggtccccatgccaatcccgggggtgtagccgaagatgccttagactggggctcgggtctgccctctgcctctggcttggctgctggccagctgggccatgctgggccatgctgggtcctcactcgccctctctgggcctcagtgggayccacccattccttcaccatcccacctgaggttctgggaccccactggtgtctacgtccacaccctcctctgggagagttggaggtggtcgctgtgctgatgcagttgtgggtatctgattccagaagcatgtcccccaaggggcggtcggaggatgactcgtacgatgacgagatgctgtcagccattgagggrctcagctccacgaggtgaggtctgagacctctgtccaccccyctctcctctccccctcggataggggtcccctatatgggcaggcccatctcataccccatgcctggtggcccagccttgttccttccccctgcctgctgccacctcctgagggaatggaccccttcccagcccccatctcaccgcagctgcccccgcccacaggccctgctgctccaagtccgatgacttctacacctttgggtccatcttcctggagaagggctttgagcgcgaggtgagggcccccagcagcctcctccgcagagggacggggtctccaggcctggggtagggtgggggacgcaggtcatggggcagcctgcgttcccaagaccggctaggggaggggcactgagaatccacagctgctcctgggcggggggcaggggcggggccagtgcagcaccagcctggctctctcctgtcggcttcattccatgacccaaatgcaccatcagagatttgcctccatgggtctgcaagacttttgctccgtccagtgccaaagccttagcagatcctggcatggatgcctcaggctgatggcaccggccttgcaatgagacgagaacccaaagctcagttatcagtgtcctgtcttgctgctatgagctttttgtactgataaygaccatttctttactgagcgccttctgggttctggcagcatcctcggcacccacattatatamtttaaccgtcacaacggccagcccaggggtgctgctataccacttcacagagaggaaactggctctcagaggcttcagagcctgtccccagcttcaggtgtggctccctgagttgggggcttcctaggtgaggtcacgaggaaacctgctggccaagtgacctggcagggtgtggccagtgtggccagggccgccgagcctgctttccttccctgcagcaggaacccttctggggctgtgatcctgcgatggtgcctgggtgggagtgggggtggggggcgggatggtctccctacctgccagcttcttggtttgaggtgaggacagccccggaagctcagacttggctcctgtccatgtacttggggccatgagctctgcagggaccttggaaagagagagacgggtggtgtagggcaggggaaggcattgtcttcaaacaggaaaaagctgagaatggaaacaggcgaaacttaccaagtgtaacatcacctggaactgaaggagggtgggaaggttttaattattttaaaaatagagatggggwctcactatgttgcccaggctggtctcaaactactgggctcaagtgaacctccttcctcggctcccaaagtgctgggattacaagcgtgagccactgtcccagcagggaggtgttttttttaaagctgattcactggaggcagggtgggcaagtggcactgctggtggccacccctcacagtccctgctgcccccagtaccgcctggcacccatcccccgggcccgccacgactttgcctgcgccagcctgatcttcgtctgcatcctgctcgtccatgtcctgctcatgcccaggtcagttgcagggaggggtgtgggggtccggcctgctgggatccaggctggaaggtgactatgaacctgcaaggagctgtgtgatttgggctggaaggggtcggctgctggggtcctagcaactggaccaggggctgtggcagcacaccttgagttaccaacacttctttttaatagaatgtgtgttttctgccacaggcctccctactccctaacgtctctctcctcagccacctgtcatatgtgtggcctgcatgcattttggttgacagcccttgccttaggtgtttggagtgctaggaggatagactctgaaaactgtaggcgccatcctttttctcttatatatagggaaattggggcacagaggattaatgatttatccaaaactcactgagattcatgcttctggctctagggccctgctggtggggtatagggatgrgggtgaagtcagagggaagggggatctaaggtcagctacttggtgctttctagaagagcagttaggccgaagcatcgaccaggattgtggttttggctatgcttactaaagacataatagggaggctgtgcgtggtgactcacgcctgtaatcccagcactttgggaggctgcggggcgaatcactcgaggtcaggggtttgagaccagcctggccaacatggtgaaaccccgtctctaccaaaaatacaaaaattagctgggcgtggtggctggcgcctgtaatcccagctactcgggaggctgaggcaggagaatggtgtgaacctgggaggcggaggttgcagtgagccgagatcatgccactgcactccagcctgggtgacagagtgagactccatctcaaaaaaaaaaaaaaaaaaaaacgaagaaagatgtaatagggaatgcgtttttacagttttttctgagtctaaaggctgcagagacattgctcatttcttatacacttggaccaaaaagagtgatatggtcttgacctcaatcttcataatctagctgggccctgtgtattgcccatggggcagctgggccacagttttcacaggtcccctttgctgtgrgcagaataccaggtagggtggggacaggtggctgtgagccagaggattggtgggggcggtggtcctggrcagaaggccctaggcagaactgaggttcttccctcctstccaggacggcggcactgggtgtgtccttcgggctggtggcctgtgtactggggctggtgctgggcctgtgctttgccaccaagttctcggtaagtggggagctctggccccgcgggccctccctccctgcctcaggacacctgcctagragccctccctggtgagcttggctgggctgagcccctgctctggtcaaggttgggtgcccatctctcctgcctcggggacaatttcctgagtgccctggaggcttctcccgaggatacccytccccargctgccagcgaccagccctccttgcccaggctgttggctctgggtgacttgaccctgttaccccacagaggtgctgcccagctcgggggacgctctgcactatctctgagagggtggagacacagcccctgctgaggctgaccctggcygtcctgaccatcggcagcctgctcactgtggccatcatcaacctggtgggtccygtggtggggaggcaggcctccggggtagagggagacctccagatttgggacgcctacaatgtggccttaaaagctgcctctggttgtcctctcccccgagctcagcaggtggatgtggggggttcccctttgtasactcagggctcctcacctttgggttctcaaatgcggactttgggggcccagagagcttgtgtggccagctccaggaggatgtgatgccttgagccaccacatcctgacatcccattcattcttcacggcccttctgagactcagtttcccctctcagggatgaacccttgctcctctgctggggctcagaggctcagtgctgcagaaagcagcctgcgggacacttgtccacctctctcccagaccccgcatcctgggctagggcctctccctcacctctctgccccggaccctgggtttttggaatgtgttcctgtgaccacctccctcagggtcacctggggargctgaaaatgttggtcccggcccctccccctggctgctgccgctctgggggtgtctgcaccctcatctcctagcccctctgccctctgaacctgacggctgctgtggggagtcggcacggcggcttgagccgtgctcagagctgatcccaacgtgaaacctcaggctgctgtgatactcatggttgcctggggcccaccttgcatggcttgggcaggttccagcgttcttgtccctggactgatggggacctgtctcctctacagcccctgatgcctttccaagttccagagctgcctgttggcaatgagacaggcctactggccgcgagcagcaagacaagagccctgtgtgagcccctcccggtgagtgcgccgggcccggctccgtggcctcattcagagtggggctgctgctgccagaggtgtagtttggaccctcaaagcatgggtgctgacccctgagagcacagcatgtggaggctgagaacagcctctcctgcagagctgggaaagcagggtcccatgggcccagctggcctctggcccaagggagtgaggagtcctggccttggcaggcttggtctaggctgtgtgggtaggcagggagtgaggggagcatctggccttgtgcgggtctctggtcagggcacttcctctctgacaggcctgtcactattttatacacgagtatgcacagctcagggaggggcttcattaggtgatggcgccagggcaggcccagacaggctgatggcagaggtcaaggtctctgcctggagggccttgcagacagcagactctgcagcttcagaggctggcagtgcagtgagctgggctctaaaaggcagaaaggttctgggacaagggacagcatgggaaaaagccgaggcgtgtgttgggagcagtggggttttgggtgggttgtctcctggagagggagtggggagaactgggagatggagccgggggcaggcttgatccagactgggaggtgcaggaatgccggggtgtgaagagcgtggtctttattctgggggctggggagccacagcacaatcttgagcagggcagaggtcctttgggagggtaagctcacaaaaactcagggaggcagcttggatgcatgcacgctccggccttgaccttgactgtggtctgttgtatccacagcacctgcatactgttttttcccgtttaaatgagctcacttcataagaaataaaactacagtgaaaacaacactggacactcttaggtctcattgttttttgttgagaagggaggtggtaaggcaagagcgtgatgctgaggtgcagggagtggggctctgtggtatgtgctgggctggaggcgagagtacgtggtggggtggccctgtcctgagtgacaccctgccccctcagtactacacctgcagctgtgtcctgggcttcatcgcctgctcggtcttcctgaggatgagcctggagccaaaggttgtgctgctgacagtggccctggtggcctacctggtgctcttcaacctctccccatgctggcagtgggactgctgcggccaaggcctgggcaacctcaccaagcccaacggcaccaccaggtggggtcccgcccgtccccgtccccatccccatggtggcctgttcatctggtgcctgcctgctcgcaccaaggggcttctgtgttcatggggagtgggcaccttgcagggcrgggctggcagatggtgtccagcgctcagagccgaggaattcactggcaggttctttaggaagtccctagtctgacagaggccaccgggtcatcctgtttccaggccaktctagtggtggggagggaaggaggctgcagctctagctctgtgcctctcaaggccacatcctgggtctcgagttctggaaggagcagttgcttccatctcttcctggacaggtggtgatacctgaggctggcagggctggggtgtgtggttctaggggttctgggtcccaagtggattaaggagcggacctggcccccctaaacaaaaaagctggaagcctgggacccagaacagaacctgctcctgtgggtctgccccgcacctgcaaaatccttatgccacccatccaccccaccccgcctgccactgaccctggctcaccagttctgggctcccttcaggccctcatcacagctgattctggtcattcaggggtgagatcagaggtcttccccacaagggctcccccatctccctgcccacctctcccctcccccctttataataccccaaagttgtcttgttttctacccaccccattagaatcaattttcccctttcccctgggtgtgcgtggcacctggagagcatgactcagtgggttggagtggtgagtgctgggagtgacttgggcctcccttcgcattcagtggcacccctagctgttcctggaaggacctgaagaccatgaccaatttctacctggtcctgttctacatcaccctgcttacactctccagacaggtaaggaggctggcmccccccccccccccaagctctgcccacttttcctcacctccatctggagatggggtggggtggggygggctcaggtggagtagcagaaaagactagagtcctgccaggaaagcactggtcccctggccagaggctccaaggacgccagggacagacagacctggctaggagatgcacagcagcacggctcccacttgcctgtggacggggcgcttatgttgctgccgtttgcagattgactattactgccgcttggactgcctatggaagaagaagttcaagaaggagcacgaggagtttgagaccatggagaacgtgaaccgccttcttctggagaacgtcctgccagcccacgtggctgcccactttatcggtgacaagttaaacgaggtgtgctgagaaggggckggggykggggcagggaggcggacggtccaggcgcagtccgtagggtgaaggtgtggagctggagtgcatgctgagcttggcttcctcaggtcctggcctcaccgggatgcccaggcgacaatgtatggcatcagctgtgagagcatgggcctggggtcagggacctgggctcaagtgtggtcgtgarcaaggcaccttgctttcccaggccttggtcttcacctctgtaaaatgggctgacagcccttccccacaggcttgtggcgaggatgaaatgtgtgttcaggggtttgtgatctggacattctgtgttgatgaaaatgtctgtacttctactagttatgtgtagcaagttttctagataggaaacggaggcccagtgagaatgaagacctcccgttaccctccactactgcagaggttctcaccccatgtgtacatggaaacacccatggtgcttctgtgagcaaaaaccaacctgagcctgaccctccctggccacccaattcttaatcacccggtaacagccaccagatgaaactcatgcagcccgcccccctccccactccccgaaagctgggctgggcagttcagcagtgccatctgctcctgaggccttgccactcttcctgtcccctcaagaggtgaagtggtgtaaggtccggtttcttcccatccaggactggtaccatcagtcctatgactgcgtctgtgtcatgtttgcctccgtgccggacttcaaagtgttctacacagagtgcgatgtcaacaaagaagggctggagtgcctacgcctgctcaatgagatcattgccgacttcgacgaggtacagcctctagcccagccttgygcagcagcccccacccatgctggagagggaagggcggtggcacctgccatcctaaaacccaatttaaaaatgtgacacagagctgggcaaggtggtctataatcccagcactttgggaggtcaaggtgggtggatcacttgaggctaggagttcgagaccagcctggccaacatggcgaaaccctgtctctactgaaaatacaaaaaattacaagctgggcttggggcgcacacctgtaatcccagctacttgggaggctgaggcaggagaatcgcttgaacctgggaggcggttgcagtgagctgggatcacgccactgcactacagcctgggcaacagtacacaactctgtctcaaacaacaacaacaacaacaaaaaaaaaacgacgtggcccgcctggggggaacatacattacacagaatataaaggtacacatttctttttcattctgttttatgcagcaaataattcgttggcatcttctctgtgatgggcagcttgctaagattagactcaggccccttagcttcatttccaactaagcccacgctatcaaccaagccaaacagaggaaatcagtttgggttgaattctttgctggagacaaagaatctacattcctgtgtagataatgctgtgtttgctctgtgcagacacagatggaagggaagagggagacagtgtggggacggagacaacaggaagagcaggagccgccaagggccatgtcctcaccatgcttagtcatgcgctcagctggcagggcagccatgagacgtgtgtgcgagaggcggcgatgggtggagggaaccccacacccttcctgagaagcaggggcagcctggctgcggctatggagtggcggctgcttcaccgcttccttcttgcctgcagctcctactgaagcccaagttcagcggcgtggagaagatcaagaccatcggcagcacgtacatggcagctgcagggctcagcgtcgcctcagggcacgagaaccaggtactcaagcccaagaggtgaaattcagctgactgtcctcacttaaaggtgacctgtcaccttacttaaagggtgtgcccttatctcgtcctgggggaggggcacaggtacttgtagggctcagccaggattttagtggtggggatcctcaacragagtggcgcgccagggcccactaggtctgggggctctggagatgcaaggatctgacccacagcctgtcccgcaggagctggagcggcagcatgcccacattggtgtcatggtggagttcagcatcgccctgatgagtaagctggacggcatcaacaggcactccttcaactccttccgcctccgcgtcggtgagcccgggtgatggagcggggtggggagcccctgcctctaggccagtccacccagtctgtgtggcacagctgcacctcgccatctattatgaaaggttttagaaatccctctgatctgacaagctcagcagttggacaattattctgatgttttgcatatagttagcatatagttaccattgagagttttaataatacgtaactacagaaaatggagaaccaaaattattgtctgtaaacaggtgaccttaaaatayagagaaggaagcaaagttactaaacctaaatagttgcgggcctgcgctcaaagccaggcctttgttaatacttttaacaaagtattctttgttaaaagagagattagcagatacaagtgttaacatcaaacccagacttctgagtctgaaaaagagctggccggggaatgccctcctcataccccaagcccgactgcaacgcagtgactctgggaagcaacccagccttcactctagttgttttgtccccrcatcctgtgctggggtatggattctctggcctcctctaagggcagaagcttgaggctytgcctgcacgcttgggtaactgtaaacatcrtcttcaggcataaaccatgggcctgtgattgctggagtgattggggcccgaaaacctcagtatgacatctggggaaacactgtcaatgtggccagccgaatggaaagcactggagaacttgggaaaatccaggtaaagacctattggggaagcagttgactaaggggaaaagatcttccccagaggtgaggggacttggacttaagagctgctgtctcacccagcagccatggttctagctatcacactctccagggaaggcagactgcatgcctgggcagtctctatctgtccctaccatgacaggtgttcttcccgcctctgaagacaacaggtctctcttccttttcaggttaccgaggagacctgcaccatcctccagggcctcgggtactcttgtgaatgccgyggcctgatcaacgtcaaaggcaaaggcgagctgaggacttactttgtctgtacggacactgccaagtttcaggggctggggctgaactgagggctcctgctggattccgaaaaggccgggaagccagtctccttccctgaagcaagcccaggagaagactctccgccccacgccaatcccaaaggcatgcagatggctgtgcatgttggcttctttggacctgcactggaggatttctcagacacatgcaccagattctggctcgaagcagccactgagccataatgcgcaggggaggccagaagctctgtgcctggtctgtaacagtttccaggccagctggagaatgttcactggttcggggctgactttgagatctttgttccctgaggtgccaggcaggcaactttagcacatgatgaaaacagacttccacctcagtggcctgtgggcacgcacaagtgaggtctgtttttctagacaccaagggggagtaagctgagctgtctagcacggattggagactccctctccctggtgggcctggcaatgacagcatttctcacagaggcattctggtaaatgaagctgaaaggggtgttttacatctgtaaacggtttcaaacaggtagagagaaaaacaccacaattaacactgttactttttgccttgtctggcatgtttgttttaaatgaatacattaatggggtttttatccttttgaatgacttttcagacactagacataaatctcttccctccagtgtatgctctgcctttttaaccactgacatgtaaggaggactactgtctagcatcagcttatggggtcagctggctgtggggatagagtcctgaggaatgtggtcacagcaagaaggcrgggagcagcagagccttgcctttgaatgaggcagcttgtgaggcaagcattctggagagaggtgctttgaaagtaaggtgcggcctttcacctcttccttgattactcacacatctttgcrttctcccctgccgtccttcaactgtatcttacttttcttaccagaaaggaatggagtctgtttagagacaacttggacaacctgtgagtgcatctcttctttcctttagtcttcacagctaactctggagagcttcaaaactagaaggatctactccgcatgggtgcatgcagaggctcctggatctgggaagcccgccccctcacaaatgctgagccgttcttgctctgaaactgcgtgagtcaaggcaaatgcaaaaagccaggttttggggatgtgtcttactgtgcttcaacttcccaaggaattgaaagtcaacctaactgtaacaacagggtgagaaatgaccaaactgcccgtgactttttctgaatggacttcataaccggaagacttaaccggtggcctcatcaccagagcatcgccaggatttctaatgcactcagtttccctacatagcagggattcttagctaggtgtccccatgaaccccgtaaagttctacacaaagtcttgcatacaggagcctttacaagatgattatacagggtkgcagattgggtgactgaccagacttgttggggtcctgggatgagttgccccgggctgcaaattaagagtacagctaagtgcgggggtggcggtggagggaacgaaaattgaacctgtctgcctgtgctgtgtcgtgtggctttatcagcccgaggaagggcaggtgtattctaatttgcacaaaggtgctgggtagactagtggcagctctcatgtgctgcacataagtggaatcagtatgaatagaagaacttgctgtataaaggaatttcatggcaacaatgctggtaagggcaattagcctcgcttaagttgccttttttacacaccaaaactttttacatgaagggctggtttcacatgaatactatactgaaatctgtgctctcaagatctagcagtgaccagggctgcccggcgggggctctcctggcaagtcaggaaggtttctgttgctaatataacatagaaacacattagtgcactgggcctctctgaggtcagcatatttgtactcttggaatatttgtttttttcttcagtaacaacagaaaccccagttgggagtttaacaaataactgactaccactcactcatgcatttttatttccaattaaagcaaagcactgtgctgtgctcagataataatagtttgtaagtaraagtttttagttttcagtgttcaggttatagaatataactgaccataaaaattacctgcaggtattttctttttatgaacttgtttttaaattaccaagtaattactggtgtcattttgttttatgacagacacacgtatctaacaaacaaacaaacagtgaccttctccatgggtcaaggacttccttacaatttctcctgagttaacttttgtgaaaataatacctaaggttttctggcttattgaggaaatttcctaacaaacaaacaaacaaacaaacagaagagaagatcattaaccactgtatactttgtgtatataataggtcagtgtaaagaaatatgatttgaggtggtgcatgcaagtaactagggtttattctatataatgaatatttatagatctgtaacatttgtttcaaaatgctgtttcatttttataaagtaccagtgtttagctgctttttatacattaaattagcaatttgaaaaactcaaatatctgaaggtattttattttcgtggtcctcatgaactcactagagattaaaagtagactcaaacaacttgaaaatttgactcttttagcataagattttaagtcttttgagggaattaattttcctttaccctatttgttcttcctaaatactaattaattttcaaagtcaggaaaataatagaaatcaaatggcttcctgcctgggtgatttatagaaggattgtataagggccttcaaacttaatttgttcactgaacaaggctatctatctatctatctatctccatcctgatttttttcccttgtgtataacaggttctataccgattcagcaaaatcaccatttatctcagcttgctgataaaagggggccatgaatcttgtggtctcctacttagagttcaactccttgggtacttgacctttgtatttcagataaacagtaagtaaagtagaaatgtcaccttttggtaatctggtaattccctgatctattcaaggatgacttagtttatcttatttggcttattactttgctatagtactaagtaactcctctttctttaaaaaacggaaaaaaccaaaaaagaacactagccatgtgacagtgctataaaactcccagtgtgcttttgtcaggggtgggtgggaggtgcctaattacccatacaagggcatcattcccactgggtatgcaggggcagaaccacagtagtaaattctaaaattatttcaagtatgttcgtataacggaaaatctcactggatggggccgttttaagaacgcttcttagtgatgatcctgtctgtgggacataaggaagaagcattggaaggcactattttgaaagaatgctgcacaggtatggcaacagccccaagcacattccttcctcacgagtcccaggtccagctttattacctaatacaagtccaacctctggaacatccaaattcgctgttccaaagtttaattaaaaacacaatttacaaatatttaatatcttctgaaaagcatttctaagttaagaatgaaaaagtatgtacataatatataatcaaataccaggcagcctcaacttccaccaggtccacactcagcaacatccgtctttttaggttcttcagtgtctgaaagaaaaagacatcacttaattcaacattgtttttaccttttaattaaaaaggggacatgaaagtcaagctgccatccagaagcataactgctgagagcccttcttcaccacatccaaggctgaagactacgcgcattatcaggtgatcattgtggctcttctgcacacaggaaatctttattaattctttagacaagataaaaagaaaactaagagtagtttatacattaaaaacagataaatgttccttttacagttgacccttcttatccatgggttccacatctgcagattcaaccaactgccaattaaaaatatttggggaaaaaacccaattaaaaaaatacaacaaacaatgaaaaaaatataaaaaatacagtctattaactacattctatgaagtatataagtagagatgatttgaagtatactggaggttgtgtgtagggtataggcaaataccttttatgttagggacttgagcatctacagattttgctatctttgtggggtaaataccaaatccgaggtcctgataccaatctcgggcagacactgagggatgactatagtcaccatagctttctgctttcccagagaaaacagggcacgtaccttctgtcaaatccacaaagttgttttccatgacgggggaaggaatggaaatccccattgcttttcgaactccatacgtgcttacgatatcacctggagttacttgctgtgcaagttctttaagattattggtcacttgttcagctaaaaagaaaaacaaagttccagatactaaagcatggttcctttagatagaggcatcccaaagaacagtaaatgtacacatgcaaagaaaacaaaacaaaaaaactgtccctgggattcacatcagcattactctatagtggcatcaccactgtactcaagaagttttttctttgaagcatcccgtgactctcctcttatgggaggcaaaacataccaagatgcatttctctgtatgagggacccaagagacagatcatgttcggagggggtctggtgctcaaacgttcattctgggcttcctggagttccctgagcaatctggtggtctcatcaagtttcttctggaatatttcagcttctgtgtggtaagaaaacagacacacttctgtttgatcttgtgcagtaaaccgaatcctaggctctagggctttgctaattattggttagccttctcccttcaaaagagtaatccgcttgaaatgacatcaacacgccatacccattcatttaacttggtaagccaagatcttcctgtggtgaatggctatgttaatctgtacttatgagacatgaaatcttgactgcctacatcatgcagtgtttcaatcaaaccctctggagacacttaccttcagagtcaaaaacttcaactggaacgccaaaatttgttactgctttcagcgctatgagcctgtcttgagtactggagtccaaacgccctggtggctctacttctgtaatctgcttcaaaaggaaaaacaggcaattactggcgcttgctaagccacagcagtgttaactagaaattactcagatggcatgtatttacaggcaaagttattctacctatttactatggagtcctaattttgatgcttacagaaaatgaatttccagaacacccttttaaaatgctattcccaaatcttggcaaaaacaggtattcaataaatccatacttctgtgaaatgtaatgatgtatcttatacaatttatatcatttgtttagtatggcaactattctaaagatgaagtaatgagagccttgttgttgcttaaactgtgaagagcttttggtgatgacaatgccttgtgttttcgagattcaaagactatttcatatttcagtccatctagtccgtatacttgcattcctattgatacacttcccgggtcttctccaggcctccaaactaggctgtcagtattgcatgagagaaacaaaatcttaaaaaggatggagttggcctggcgcagtggctcatgcctgtaatcccaggacttcgggaggccgaggtgggcggatcacctgacattaggagtttgaaaccagcctggccaacatagtgaaaccctgtctctactaaaaatacaaaaaaaaaatttagctgggcatggtggcatgcacctgtaatcacagctactcgggaggcagaggcaagagaactgcttgaacccaggaggcggaggttgtagtgagccgagattgtgccactgcactccagcctgggcaacagagcgggactccatctcaaaaaaaaaaaaaaaaaaaaaaaaaaaaagatggagtttttattttcagaatcattaagactcaggggtttccataacctcaacattactttttaggaatagatcaacccagatattaagcaatcaaaagctaatggttccatttatactatggtatggctctccaactctaactccattgatccacctgatttctctacctacatatgggctaaaaacttgtgggggagaaactgtataattgtgcaacttggcactgatatgcatttatggtttgccatttcagctaggccctcacaactctactcactaacctttttccttcttacccaatgggccttcccattctcaagacttctcttactccccttattttccatttaaatatttcttgtaaagtgtaaaataaaatcacctccatttcttttgctgtgtcaagtgtcctagtatggccttcatcttcaggcaatgactataaggatgaagaaaaacagctttttaggaaaacacatgaaggcgaatatcaaggaaaagagaaaactgtcaggagtttcttggcaagagaaaatgaatacaaatatggactactggaatataatttttcaggccaaaatgactaaatataattattagcattttgagaggattctgtgagctggggtacttattactggtgatgttatttccatgcctgatcaaaagctatatacatgtttaagaaggtatttggtaaataacttataaatatgtaaataaatggtatctgtttttatcagaaaaatccctgacgagaagacaggaaggagttctagggattactgtgcatgaacacagcaatattctcagatagcagaggattactgtaaaataatcaaatgctacagagaatgtgaaagcttcccaatcttgctcttcagagctaatgcacccaggaacaagagacaaatatatcatggacatcaatcaatgatgtcatctttctttgaaaggttgtgagttatttaaccaattcccaatttctaaaaattataaacaatgtaaccttatatgtaacttttgtattttttctagaataaattctgagaagaggaactgctatattgaaggacaaagacacttgacattttgaaacacattgccatattcaccaaatgaaaaatattcaattttcgttagactattaattcattcagattaattgatgaggatatggtaaaaaaatatgtattttttaaattgatgtaaaatttcattttttaggtcatgtgatgaaagcagtccaagtgcggatattttacagcagtcatcgttgggcctgaccgaggcactaacctcagctctgctgacaggtcacccagcaaccatatgtgcagttgtgagcagggtaccaggcactacagtcacagtcaccattaagagttagacctccaaaagacacagggttcctctaactattgtgacaggaacgttctggagatcaactctcttctgtatcagtaggaacattttctggttctaatccttaagccaaaactctgaatgattccagattaccaactatctccaactgaactagagatagcttacaaatgttaataaaatagcaatgaggaagctttttactttttaacttgaggttcctcccgatgtgctattactgcacgaggaaaagccattccctatcattttagccaacttagtttcaggccagtgagcaaaactttccttttttgttagaggacacaatgcccactgacttctgagttgtaaaccccatttttgagtcctacattcccaagatgaggagataaggataacgctcaggccctcacagatcctggtagctaaattactcctttccgtttattgtccacccgtggcctccagccgggctgggctgtctttcagggccacagagttcagctgtcatacttgttaatcccatggtttcattatactgaatgactaatgcttgagagtcgataataaattaccctgttttcattagcagtgttcttaccatctccatctcttgtagggtcctggaatgccctccttttgttaaaacatccagtaaactatctgccatgacatacggataatcttggcacgtggccaaaaactcatggatgctgcaagagacagttaggaaagtctcacataaatcacctccactggctttatcctcccatcagagccaactgtttccactagatgtcctcggttatacatcatgacatcaaatttctgcctagacacaacatggtatctacatattaattagcaataacattatcatgagataatatgaagaacacagtaaaaataaaacgttccaaagaaaaatgaaacctcagtgacgggtgcaggctcagtccctggatcttctgctccccgccccctcacttcctgtctgcagtgatcaccttcacctcaggactttcatatgggatcaaaaaactctcaaaagttacacctccagtttggaccacaccctttggtgctccacatggaagtctaacagacatctcaagcttaaaatatccaaaattgaaatgctagatcttccccccaagtaatgttccaaagcttcccccttctcggtaaatagcaactgcagtcttccaggctcagtgtgcaaaccctggagtaagcctcggcatctctctctcacatcccacttcaatcagtaaagaaatcctactggctgatgactgagcccttcccagaacctcacctgctactcccccggtccatttctcatctccctacttctgcccttgcctctctacagtctattctccaagagtagccagggtgatcctttaaacatcataatctggaccgggtcactcttctgctcgcaatccaccagtaacttccatctcactgagaatgaaattccaagtgcttataaagacccactctcatcaacgccctccctggccatgtgcctgcactcttctgcttcttcctgctgttctcaagtatgttgggaaggctcccactcaggccctctgcacagctcctgcactgcctggaacgttctttcaggtagcagccttgcttgcttcctcacctccttcagtttttgctcaactttcccttttgtaccagacttatctgaccgatttaaaagtgcatccctctcgtagccccagcactactctctccttctctgctgctttacctttctccaaagcacttgtcatcatttgacaggagggcatgggcctttgccagtgttgttcccctgtgcaatccctatttgtggaatgcatagatgcatgatccagaaagaattcattcaggctggtgaggtctaaaagattaaatggcttgatctgaaaccacagtcaacttcggacttaaggacctctaccttgtaaaaacaacaacaaccaaaccacacttactaatgtaaaagtgaacagattccctctttgtgagaaaagcaggggactggtgaatctacagggttaatttcttatatgtaatgaaaattagcaaggtactactgctaagaaggaataatatccagtaaactactgccataacccaagctcagtgtcccatcc

SEQ ID NO: 95228 - DNA, 81138 bp, Homo sapiens
  misc_feature (1)...(81138): n = A,T,C or G
ctcaatcactcattcactcactaacccattgacttactcaatcactcattcactcactaacccattgactcactccctcaatcactcattcactcactaacccattgactcactccctcaatcactcattcactcactaacccattgactcactcaatcactcattcactcactcaatcactcattcactcactaacccattgactcactcaatcactcattcattcactaacccattgactcactcactcgatcactcattcactcactcattcactgtggggaaaagaaagagagaccagactattactgtgtctgtgtagaaagatgtagacataagagactccattttgttctgtactaagaaaaattcttctgccttgagatgctgttaatctgtaatcctacccccaaccctgtgctccctgaaacacatgctgtgtcaactcagggttaaatggattaagggctgtgcagggtgtgctttgttaaacacatacttgaaggcagcttgcttgttaagagtcatcaccacgccctaatctcaaaccactccctaatctcaagtacccagagacataaagcactgcggaaagccacagggacctctgcctaggaaagccaggcattgtccaaggtttctccccatgttatagtctgaaatatggcctcgtgggaagggaaagacctgaccgtcccccagcccgacacccgtaaatggtctgtgctgaggaggattagtaaaagaggaaggaacgcctctttgcagttgagatgagaggaaggcttctgtctcctgctcctccgtgggcaatggaatgtctcggtgtaaagccgattgtatattccatctactgagataggggaaaactgccttaaggctggaggtgggacatgctggcagcaatactgctccttaaggcattgagatgtttatgtatatgcacatcaaaagcacagcacttttttctttaccctgtttatgatgcagagacatttgttcacgtgtttaccttctgaccttctctccaccattatcctattatcctgccatgcccaataatgatcaataaatactaagggaactcaaaggccagtgccggcgtggatcctctgtatgctgaacgccggtcccctgggcccctttttctttctctatactttgtctctgtgtctctttcttttccaagtctctcgttccacctaatgagaaacacccacaggtgtggaggggcaacccatcccttcaattcactccctcattcactcactccctcattcacacactcagccattcactgactcaccctttcactcactcatccattcactcattcactcacttattcactcactcactcattccctcattcaatcattcactcactcactcattcactcactcattcacctcttcactcactcattcacctcttcactcactcattcacttcaatcattcactctatcactcattcactcaccctttactcatacactcactcatttattgactcattcactcattcattcattcactcattcacttgttcactcactcattcacttgttcactcactcattcacttgttcactcactcattcactcacccattcactcactcaccggctcatttgctcactcactcattcacccactcacccattcactgagtcattcattcactcactcactcattcactccttcggtcactcactcactcattcactcatttattcactacttattcacttactcacttattcactcacccattcactaagtcattgattcattcacttattcactcacttattcactaagtcactcgttcattcacttattcattcacccattcactcactcacacattcactcactcacgttcactcattcacccactcatttcactcactcatttacccactcactcacttactccttcactcatccactcactcactcattcactgactcactmactcacccattcactcatttactccttcactcactcactccattcattcagcagcacccatggcaggttcactctgtcctgggctctgctgttgccctgggcctgcaacagggaatagtcaaagatctctgaatccacagcattcagagttcagcaggggggcctgtcgagaagcccagcagataggtgaaatgccccacgtgtgacacgcatgaggctgttttaagagaagcggggagggaacaggagtgtgcatggagcccgaatttctaagagggtgatctggggaggcctcaccatgcaggagaccttgcaggacagacctgaggaaggtgggaagagtgggtagggagaggagggcccgggctgaggaaagagcaggctgggcctgaggttgtcgggtgcctgcatgggtctctgggcagcactaggatccgatggaccagtgggccatgtgtggggcctgtgactcccaagtcagcagaggagatgcctgaattacatcctgataggtgcaccctgactttgaagctgaggacacccgaggcatggaggtggggtggaggtgggggcagagcaggggatggggagggagcctgtgtcagtccaggtcacaggtggtagcttggccccagtggctccagatgcaatgaagagccaggagggaccttcctgagggacttggatgccagggtagaggagcactgcaaggcttcagcctgagaccctgggaggatggggtcaccaggagctgaggtgaggaagaccgaggggtggggggttgcgtgggggtgcagaggcctaagctcagtttggcccctgcagatttgagatgcctactccatgcacaggcagaaacagcaggggaagggaagaggctgcagctcaggtagccctggtggtggaatgtgcagcccaacatgccggaacacagggttatggtgccctcatggctaggagctgctttcctcctgggatggcaggactcctttagggcacatgggcagctcctgcgctcaccgcagaggggaagtgggaagggcatctgtccctatgcatgttctccttcaccttgtcctaggcaggtcccaggcagcacctcccctcccagtggctccccgtggcccctgcccctagtgttcacagccagatcctcgaagagggctggactcagttgctcacttctaatgaacagaatcaggcaaaagagacggcggtctttcctgagattggattgggaagggctgcaggttccgtccactggaattctccccctggctcttgacatgtgctagttctggcaaagccagtcacctgcccagggcagagggcagcctgaagctgatgccagggacagactggggccttcagtccaacagcctgcaagcaacagaatcctgccagcaacacaggagtgagcgtggaagcagctcctcccatgatgagcctgagccttcagaagacactgtagccctgggcagacacctgttgcagccacagagggcccctggggcagagggcccagtgaagcctgtctgaactcctggtccaaggagtaatcattcctgtggtataagtgtgtgctggtgtgggccacagtttgcagtaatctgtcaagggacaataaagaacaaacacacatgtcaggtcctactgggtggaagccgtacagtcaacaaggcatgcagtatcttcctcttgaattagaagattcattgctcaggccaaagattaaacaacaaaaaaaaaatctctagttgtagcaccattaaaatacacgacttgcaaaaaaaaaaaaaaaaaaaaaaaaaaaaaagagccatagctatgcttttccatcttagctacaggtatatataaatatatgttaattccttgactgactgagcaatgggtcaaactcatgagaatagatgtgtgaggacggtcagtgaccaccctgaccccagcccttacatacagacaaacttttgaacataatccataaccctggggatctggacactctaaattttattgtttttaattaactatttctattccccaaacaatacctgttcattggagagaaaaatggcattacctatactaagcaaaagaaaggaaataaaatgctcagaaacatttacgtgtgtgcacactcacacacacacttacacgcacacgtgcgcacatgcaagcacaggctcacactgtgtccaggcctgccttttcatttatttgtttgacctgaacatatttccatgtcagtcgacacttatcttcgtagtggtaacagcaattaaatattatcgcagcgtatatttttaaccatcatttatttaactcgtcatgtttgaactgttaggttgtatttatcgttttctgtattacagacgacttgatgacaaatgaccaatcctctaatgttcaatataaaaatatcaattgyataaggagataaggggcatttggctaaaataaaattcagtgtgccccaccctctccacatgtaatttgctctaaaaaggcatgaatgactaaattagcccttctattctccagcgcagctcctgagcccagcggtgggtgcaggtgcttagagcctggctctgctcttctgccgccagaaggcgaagggcacccaacccaggattctcctctccttttttattaatagaagagtgctcaggctcagtgcatgagagcagcgctctctgactttgcacttatcagagtaacctagggggcttgtttaaaaatacacattccctggctgagctcccagaaattggacttcagtggtttagcgggagtgtgcataggccaggtgattctgaggaccaacaggggttaggaattgccccgttaattctggccaagggagagatcagaccatccagcattgtccgcagcagagtttttccccctcttttgcaatgaatatttgatgctcagagggatgagccccaggatgaggcacacatccaagaaaaatccatgcctctccatcttttccccaggattgccctaaggcgagccgctctttgtgattccttcactttccccggttcatagaacaggcctcttcttagtctgttttgttgtctcttatctgttcaacaaacacccactgcgcaggaccatcctccggtgagccgtcgagtggggccgtttgggagcccttcttcgtgggtgagcactgaaggaacccgggtcccataagcccgtgcttctatgggggctgccccctctcccatcgcagggtaactggcaccaggctgttaagctgtggatgggcaaccgcacagtgcattggatgtgagtatttcagtacgtggagctggccagtggagccggccgaggtcaggcagagcgtacagcagcgcgcgtgtccgtggggagggagggtcctcccgcctccccgcctccccgccaggccagtcctgttgcgcctcctcctgccccactctgactttccagcgcccaggccggggcgccgccagggcgtctctgagggtcgcgccccgataccttcctccaccccacggcttcttccccccaagggcggggctgggggcccaggagcaccacagcccccatgggcccgggaaatggcagcttcgtcatggcccagcccgccacgctcaccttttcccaccacctggaggatccactctccgtccgtccttcccgacctcaggctgcagaggaaacctgggggcgggggtcgaggaagccgagccccgaggctcccagcgccgccccaggaggaatcttgcgggccactagaagctgtgcgcgcggccgggctcggcccccacaacggcccgagcggccgggcctgccgcgagcctccgcgtccaggtggggtctccgcgcccccattccacccctccccgccatcggcgctccccgcaactgcggggtttccacccgccccggcgctcgcgcccactcacggtctccctcgcccccccgggagatgctcccggcgttctatcccgccccgccctggcgcgccccgcaaacgatgtgaccccggccccctgcggtctcccctcctccggacgctgcccctgccccacctgtggcgctcccgtcatctctagagcccccaaccagagtcctccagcccacccgcgaggctcgcgcacctgcgatgcggccccactagcagggacccgcccacctgtggcgctacccctgcctctgccgcctcccgcaccgctagcgcggcccccacctacgacgacccccgcgtagatgctcctgcccacacccgccccagccccggcccctgcccctagccgcgcccgcgccccctcccccgcagcccctcccatacgctcgggccccgcccgtcaccgcccattggcgctggggccgggcgggggcgcgggcggggcggcggttccgagtcaggcgcgcgcgggcagggtccccattgcctgctgcgcacccggacgtgcggctcccctcggcctcctcgccatggacgcggacgactcccgggcccccaagggctccttgcggaagttcctggagcacctctccggggccggcaaggccatcggcgtgctgaccagcggcggggatgctcaaggtgcgcgcccccctcccggcggcgagggagggacggacggacggagctggggagaaccgggcgaaggcgatggggtgaccggagagaagaggggggaagcgatgggggggacccggggaaaggtggcgaagcgatggggagaaccggggagaagagcggggaagcgatggggagaaccgggaagaagcccgcgcccggaagcggcaggggtacctgcggggcggcatgagccggcgaggcagccccggggtccttgcccggtggggcgggggaggaagggacatggcggtaggaacctccatccggaagatcagtgagttttccaccttcggttttgttttaaatggaacctggcagagggagtcgcctgaagcgccctcgggggtcgttctgcctctgagctgtaggacggggccgggcgtcccctccgaagcgtgggtacagcgcgatcacttcctaagtgcccccccgccccccaactccgccgcacgccaccccctagaatgtcgaggaagaaacggctgggtccccgcgcgcctcctgtcgcctcgtgccctgcgcggcgtgggcggggtcctggctgctgcaatgcgggacgcggcgggggtgcgcggggttcccgcctggcgtctccagggcggtccggcagcccctcgcgtttccgctgggagatttttaaaaagggtttcctgcgctcgcatgtgctgtcgccttccggctcgtgacaaaaacgaaaaccaaaatgggtcccaggccctccccgccagcctccgcagacgggaaggatcaggaagcggggactccgggatgtcagcggcgccgcggcgcgggctccgggcttccctgccctgcaatgtggaagctgctctctaggaggggcccgaggctgggcccacggacgcgggcgcgccgggaggatatttaacattgaagagcggaaggtggcggagactcggcgcgccccaggccccgggtgcacgtgggggcgccggtgcccggatgatggagtgtcccgatccgtgcaatccctggcgggtagatcggcgcttcccaggcgaacgcaacctgggagccttagcgatcgcgcaggctggagacgcggcgcgccccgagctgggttttgatttttgttttcccggttcctcctgccgcagatgcgtggaaaggcccggatggcggatttcctcccgtttcggggccgcgcactgcacagggttggagcggggatgcaccccctgcccactgcgcgggtgaccttcccttcgcccttgagcgcgcggggcgggcgcgggtgccgcaggttgaggcgctgtgggcgccgccccgcccgccacgagcgcctacgtgatgcccggcccgtcgtctccacgagccccggccccgacacccgtgcgccgcgcgctccccaggcccgcagcgcagcctccccaggcccagcgccccccgcgggagacccgggtggcagcgccaggccccgccccgcagcccgccctgcagcgcccccgggaagtgctctggcgttagcattccagtaaaaggaccccagcatcaacgttcttcctgcagggctgggttctcagagaaagaaaacgtgatgcagcagaggatgggattgaagaaacaggagagtgaagtggaaatagcctggcccgcgtgacttaaaccggcccggagatgtgcgggtacgaatggagccgccttggggtcgggataggacccagagtggcttctcagtcaaaggccttcagaagcagagggagcaccttgagtgaccttacctgggccgcgaaagacaagaaacctttggcacaggaagaggaactgatctctggaagccaccagggcgggtggaaagtcagggtttcaaggttattttggaatttaggtgctgtgggccttgtacggtggctcatgcttgtcatcccagtgctttgggaggccgaggcaggaggctcgcttgagccgaggagttccagagcatcctgggcaacatagtgagactctgtgtctacaaaaaaaaagaaagaaaaaaaattaagatactgcatgtattggaaaatatttatgggtcattcctttgagctccatgtccaaaagcttgctaaaatgcgcgggagtttgtgtacaggcatgtgagattaggatacattggcagaatcgcggtgttctctgttaccctggttttgccacctgggaggagttagacatattgaaggttagtaagtccacgcctcttcttttctggggaaaatgatactttggaaaccaatattatgtggggaacgcggcttggttgctgcaacctcgggttaataggagacagctgccctcagctctgcaggtggcatcaaatatggtggcctcgagcccacatgggtcacacctgggctgtccctggggaagcccgccatggcgggtcgcctgggcactctttccctggcagagctgaagtcacaatttttttgtagactctgtaaagagctttacccttcggtgatacgatcttgaacctgttggagcatttggacgcatttcttttaaggaagttcacctccagatgtactcagagggcctggtcttagctgccacagatttacaaacccttacagtaagtaggttattcctcgagaatatctcagtgtccccattcttttaccattttattctgattctatgttagtacttgattttccctgacatagaagactattgcttgtagctrgagatgagagaacatattcacattcacgtattaatttcaggggaattttctgtcagatgtgaaattatggtaaaattccgtatattaagatgatcatagctaccatttgttgaaaacattttgtattctaagagctttacacttcttatctccaagcctaaatacatgatcccaagagaggcgtgtcctcattttggaagtggggagaaagactcagaaagaaaagtaagttaggtaagggcatgaggtgcatacgtgattgtgataggagcaaaacagatcttaattccaaatattgtactctcccgtagaccacgaagagtacttatgtctggctgtgtcacccaggccagagtgtagtggtgccatcatagctcactgcagcctcaaactcctgggctcaagtgatcctcctgcctcaaccttctgagtagctgggaagacaggaatgcaccatcatgaccagctaattattattattattattattattatttttgtagagacaggatctcactatgctgccgagactggccttgaactcctggcctcctgtagtgatcctcctgccttggcctcccaaagagctgggactacagacatgagccattgtgtcaggcctccaccatctccaccatgtttttcagggacctttcttggtgaagctgctttatctagttaatgctcaaaagtgagcaaaacccgatttgcccaaaattacacagatattctttgggtggctttgttaggggaacggaaaatgcctttttatagtgataggagtccaggtggcaagaacgatattatgtgatgggctgctttttcttctctcagtagagtgtatattatttaattataagatacaattgaaaatctctttctcytttctatattcccgactccccgggccttgaatgaagaaagtatttctcaggctgtttttgtttgtttgtttgtttgttttttctacttgcttggatatcttctgtctcaggctgttttttttttttttttttttttctttctcttcttctgcctctttatgtatcttctgttgtcccaagacatgtctggaaacttaaattgattttcactcaatctgaaataagctccataactctgaatggcggacttaccatgactaagtccccactgccacagaacactgtgccacacaccaagagtgactcattgtcttagtcacaggttgtggcttctgaaggtcctggtgcctggtggagctgagtgtactgggaagtccaggtgcatccttagggtaggctggatgtgaaagctgcgtcctttttgcctgtggtgaggtgaatatcaatacagtatttatagaaagtccacataaattgagtaagtacaaacctttccaatcctagtgagaataactagcattaatgactctttgttatgtggcagggcctcagtgatcctgggcaatgacttatccctattttacacatgagcaaggggcgcctgagttgcaccaccttccctgagttcacagagctccrtggtggggccgggccctgtggctgcagcagggatgttcagggctgcgcgtacctgcgtcttcactggtgtctttcccgcgcccagcaccrtgcctggcgcttcgcaggaatgcaagtgtttgctgcctgcctcctgcctggaatctccactgaggagcaggaaaccaggggttctagctgtcttcttcgtccatgaagtcctttagaggaattcaaccctctctaattaaaagtatccaatatcctcaggtcaatatgtgtaaactgttaagacttcaagattagaaccttaaaaccraagtcagaagtgtgaggtttccattggctggacgtgcattaggtcaatgacacacatatttattggacaccaggcttgagccccacatgggcacctttggtgtctgaagcaatgctggcttcggagcccagtagggtggaaggggaaactgagaacagcgccattttgcctcccacggctctgggcccgttaccttcctgtgyacatacatyatttgatgggatcttttcagtgtaaagtgcagtaattaattttgcaaaaattactgggtctgggaggcagtgtgttggaatgatggtgtcaccatgtggcacagtgggagatttgtgtaatggcatcattttctgtgaatgcagaccgttttgtgtgccatactcgaatgacccttcgaagctagacattttgtcatctttcgaaagaagcatgttttcccccttggttacagaaagctaaaagcttttgatacaggactccaaccttttatcagggagaattaggctctttaaataattagggctctaccaatctgatgggccatcagaagcaattaarattagaaaggtgaagatacggtaacgtagtcaggacaaacatcaggataccagattrcacgttcacaatggcatttcggctaagaaagtgcgggtgaatatagaacagagggccgtatgtcagtaattgggttccgttttgtgtttcttttccacaagccctttctggtgttgtgtttttgtttattagagagtagctgcccaaaggctacagtttccctccccactcctcggttctctccgtcttcacccccaactcccagtcctgtgtttggaattacagtcattgtgcttgtcaggatgtaagaggcagccagacacatggcagaccagagcactgagaggcagagacatttataggtcctagccctggtcctgctgtctgggtcagcagggtgctgagtgctgagtgctgagatagggtcttgatgttttcctctgcagaatggaggcatcactcagtctctgtctcctctccctgtctctgtcttccctcccctcttccctaacacatatccacagtgaaagtgttcaggaggaaaagagaataggctggactgtgctgggacccccaaccccagggcccgtgtgctattttcccagcctccgtgtgcccagagatgcctaggggagcctgcggaggtgtagatcctgactgtgtgggtctgagtgaggctccgactctcacggggagggcaccggtgctgctggaccccctggggccagtggagcggtttgcaaatcgggcagatcagcttctccacttctccaggtttccccaatgtgagatgctcccaggagtcccatgggattgttttctgactttgaccaggattttgacagagaagattcattaatataggaccccttgtctaaacgtacatatgtaaatgatctgatccgaagtttcctgaatggaaaatgattgaaagggtggcatgcagtagcctcggggagtcagtccttcatatcttttcagctgtgtcttactacgattaagattttatttctgtgtgtgtgtgtgtkttttttgtttgtttgtttgtttgtttttgagaygggatcttgccctcttgcccagcctggagtgcagtggcttgatgtcggctcactgcaacctccgcctcctgagttcaagcgattttcctgtcccagcctcccaagtagctgggattacaggcatgcgccaccatgctcacctgatcttttttgtatcgttagtagagatgggtttcaccgtgttggtcaggctggtctcgaactcctgacctcaagtgatccacctgccttggcctcccaaagtgctggtattacaggctggagccactgcacccagccttatttctgtgtttctgtaatcattgtgcatgttaacagactgccttgggtgagtcaggacaggattttggcaaaagaaccaggccctttmtgcctggagctgtcactcctgtggtgaggtgcgggtacgacgtgcctgtagcctgacctgagaggaaaagctcctgtcttatgaaagggcccaggggaacctctggttggggccctttgacctgacctgacagtgagggaggagtccgtagaggagagtggcccagtggaggactttggctttgccttgggtgaactgggaagcaggtggagggaagcagactgactgtctccgataagggtggctttgtggagaggagaggaggggaggggaggccacaagtttagggtatcacaaggagcaggccacagatggaaggttatggggtggggcacgtggcagggcagccctgtgtccacagacacatcccgccaaggggacccagagacttgagtgtgtcagggcttggggtgaatgggcactcagctgttacagctggaaggtagagcatgtgagctccaacagacacaggcaggtgggggttaaaggagaatcttcatagcagtgcttagaatagcaaaaagtgggaaaaccagcaaaaaactatcaataggagattaattaattccattatggcacctggaatgtgccgagaccagctcrgtcggggagaccgtaacccagcggcgctagaggaattaaagacacacacacasaaatagaggtgtgaagtgggaaatccgtggtctcacagccttcagagccgagascccagaacagagatttacccacgtgtttattaacagcaagccagtcatcagcattgtttctayagatatcaaattaactaaaagtatcccttatgggaaatgaagggatgggccaaattaaaggaataggttgggctagttaactgcagcaggagcatgtccttaaggcacatatctcatgctactgcttgtggcttaagaatgcctttaagcagttttccaccctgggtgggccaggtgctccttgccctcattcccataaacccacaaccttccagcctgggcgttagggccgttatgaacgtgtcacagtgctgcagagattttgtttatggccagttttagggtcagtttatggccagatttgggggggcctgctcccaacagaatggaaggaatttttgtcagcgtttaataaggagctttgtgctggtcgaaagtcaagaggtacacagtatactcaagggcagtattgaagagccgattccagagcggcttccctctggagccagtggggcagtttgcaaatccaggcagatcagcttcttggaggtttctccaacgggagaatctcccaagagtgaggcttgcatgtgggtggcctgtgttatatatgcaattttaaatgatctagttgccgcattaaagaaaggcggggcagggggccgggagtgggggacwctgggtgccaagactcaacatctgtaatcccagcccttcaggagcccaaggcaggtggatcacttgagcccaggagtttgaggccagcctgggcaacatggcaagacctagtctctacaaaaaatacaaaacaattagtcaggcgtggcggtgcacacctacagtcccagccccgtgggagattgaggtgggaggattgcctgagcccaggagttggaggccgcagtgagctgtgactgcaccagttcactccagcctgggcaacagagtgagaccctatcgcaaaaaaaaaaaaaaaaaaaagtagtgaacccgggaagcggagcttgcagtgagccgagatcgcgccactgcagtccgcagtccggcctgggcgacagagcgagactccgtctcaaaaaaaaaaaaaaaaaaaaaaagtaaaaaccggtaaaagcaaaaaactatgttttatattcaatccactattttgataacaatcaattattgtagattattcatattttacactgttttccgtagtaagtctttgaaacccagtgtgtaaagaagcttaaagcacatctccatgtggacgggacgcacgtggccagcggctcctctgagggacagtgtggtcacgcaatgggtggcgtgtgctgcctgtatttagaaggtccccatgtgggtgtttttgcgaaggctctgagggatgtgcaggggagggccgacactgtcccagccacgcagaggaccctggaatgcagcatgctgccgccgcgcccccgccccagcccctctgctacctgagctctttcccagatgtccatttggctaamctccctcaacttcttccctttccttctttctccaaacgtcactctcaggcaggtctgcaggctctccgattgtcaatggcagcccctccctgtcctccacaccctcaacaccccccaccccgcttgtkatttttctccttagcacttacggccatccatccatgggcatcatgcatttgttcactgtgtttcttgctttcgggtctctcctgatcggaacaagctcttccagggccagargcttcccatcttgtcactgatgcatccacacagagcccagcagaggtggcacttggggcacccgagctggacagtgggttggtggttgagtgaagagccctacagatttatctcaagccctcccctgaccctactagaagacacggtggtctgcacagtccaggaggtcagagaggccccccagttcgatgactttgaactggcagggatggggagggaacagcaccttgacagaatctgcctttggcatcccacctccccatgcctacataatccctgcattatcaaaggaaagacccctagaaggaactttggcagcagtagtgagatcagcgcggtgtaagctcattttctaacaaagcagcgggaggagtcggcaaactgactttatttctcaaaaagaatttatgcattgaaattaacaagtgagtgatcaggagtgtgggaaaattcaggaaaagtggctcagtgctgtgagagagggcgaggcagggagctttattactccagacaatggaggaggtaaaagatagacccagattatttcattagagttcatctattctttacctttttttttttcctttttttttttttttttttttgagatggaatctcactctgtcaccaggctggagtgcagtggcgcaatctcggctcactgcaacctcccacctcccgggttcaagcgattctcctgcctcagcctcccaagtagctgggactgcaggcgctcaccaccatgcccggctaatttttttttttgtatttttagtagagacggggtttcaccctgttagccaggatggtctcgatctcctgacctcgtgatccgcccaccttggcctcccaaagtgctgggattacaggcatgaggcatcgtgcccggcctattccttactttttaaaaaaaaaatgcaatttagattttatcagagcagaatcccaggaaactgagatttgtaaactgggaaatccagctcctccaagtagccaggaaataagggtgacttaagtcatgcttgctaggccctggtgtaggccaaggatgactctgactcaaggaagaaaccgtcctgtgactctcttacctgcattgtggtttagtaagaagctgttaaaaagtacggcatatgaagaaagcgatttaataattggtcagagtaatgaccagatctttcctatgaaaccgctccctcattatctccaactttatttttggttctcatgacaagatattcacttccctgaaaactgggatttttgcaaattacgaagcggtgtttttccaaatgttaaggttcttctttggtaggaagatgttattttctcctggaaatccttgggttgggctcccaaaaccaaaacaaaaccagatggattagccccaggatgcctgagctatttggacaatctgtggcttgagtgttgagtgaaagactctgaaactgccctttgtcccttaatggctgtgtgccagggcccacggacagccctaaggaaatggtgaaacaggtgacttttacctgtgacgccaaaagcccacgttgcgggctgtgaaagccctcattgcaggtgtgcacgtctgcctgcattgcaggtgtgcacgtcttcgtccctgtcctgtgggtgacagcccgccagtaaatgctggtatatttcccccttgcttttcatccaccagtgttcttctccctccaaacccctcactgaatgttcctggggcttcctcaggtttcatcttgcagggcccagcaggaggcagctgaattgcagtcctcactgttcagaagttcagagggagggcttagaactaaacagtctccactcccaggcaattaaatgagcatctggcctcagcaggtattattttccttcaagttcccattggtgactctgaggcacaggcattgtaatagaggaaattaggaaggcttgaaagttaaaatgaaataagactagggtttacactacagcttcaccgcttactaatgttgttaccttccagtaatcagtttatccccctaagagcctcagctttctcatccctccagggaggtgtcaggagctctgcaggcttcctgtgagaaacatccaggccagggctctggctgtgggtctgcagtcagcaagggacgtcctactgggccccaccgagtgctgccagtccctgagctcaaggaggacacatgaataaaagccctttgcaaygcagggctccatcctaccaatgcataaattaatagaagtcctttcaggacctagaattgtgtctctttaaaagtgtggtgcccccatcacctggaaattgctagaaatgcaagttcccaggctccctctccacctgtgaaacccgggggcagcccagctacatgggggtgctgcggccgctgatggtgagctcctgctgtggggtggtgtcactgttctttccaggtgggtgcaggtgaacccggagtgggggtggggagaatccagcagggacttcagcgattgagtttagtgctggggtgcatttttactctgcacaggagtctcctggggtcaccttgtgtatcatgtccagcttttttttttctgagacagagtctcgctctgtcgcccaggctggagtgcagtggcatgatctcagctcactgcaagctccacctcccgggttcacgccattctcctgcctcagcctcccgagtagctgggactacaggtgcccgccaccacgcctggctaattttttgtatttttagtagagacggggtttcaccatgttagccaggatggtctcgatctcctgacctcgtgatctgcccacctaggcctcccaaagcactgggattacaggcgtgagccaccgtgcccagcctcatgtccagcttttaagaattttattccttcttctatgtctttccacttaacatttcctaaaatccccgagttcttcatcattcctttatgaaagaccggtgggaacgaggtcttcagagagcggggtgggggsgggggaagaggagcaggggtgaggggccgccattgggtcttagttgtgctcctgcatcacctgcttcctagtgttggcacgggctgtgtttgatgggtaattcatccattagagtgaccatagcgtaaggtcctggaaccagagctgtgcgtccacccttcgagttgaagagtccaggcactgctgagcccagccatgggagagatgagcgaggaccttccacaggtgtgaggccaagggggcgggaggctctgtcctgccaggaataaatggaatcaggtgggaggctctgtcctgccacgaataaatggaatcaggtgggaggcaagccaggcccttttcctgggaggtgccagagccgaggaggagttggaggaggaagagcgtccgagcaagagcactggtgggactgctaccaaggttcaggaacaggagcctccgagtgctgccagacaggtgggaggtccctggggcatggccgggagctcaggggaacttgggttttcttccagtagccctgggaacctggaggaacgcggtcatattcgtgctttagaagagaacattgccgggtgcagtggctcaagcctgtaatctcagcactttgggaggctgaggcggatggatcacaaggtcaggagatggagaccatcctggctaacacggtgaaaccccgtctctactaaaaatacaaaaaattagccaggcgtggtggcgggcgcctgtagtcccagctgctcaggaggctgaggcaggagaatggcgtgaacctgggaggcggagcttgcagtgagccgagattgcaccactgcactccagcctgggagacagagcgagactccgtctcaaaaaaaaaaaaaaaaaaaaaaagaatattgaaactggtatggaaaacatctcggacgtagtgtcaaagtgtagaaagaaataacaagtgtgaaactcgcacagcccaacagcaaggcaccgtccccatacccagctctccaacggggtggggctcttgtggctgttacttcatttgttttttttctaaacaagaagaatatattcataaattatttgcataaaagcaaatgaaagagaaaaagctgttgtaatccttctggccacagtgtggctcatgtcagagggagtcagggagtcgggggtaatgttgggagcaggtgttggttgtatgggcaggagccagcaagggtgttagcagcattcagcgccagagacagagaagaaagttgtgctgttcggcaagagagaggttacagcgggaggaggaaatgatcagggtgagatgacctgcattttgaaatgctgagtttgatgtwcttgagagatggccactagttaatcagtaggtcattcgaattctttgtgttataagctaggtttgaatatamagtaaataagactatgtaatatatatatacacacatacatatacatacatgttagatacatagtaaacatgcrtttacctctaaaatatrtatccccaaggtttttcagccaaatagatactctcattcagaattgtcaactttcagaggcaatggtgactccagcatcgcygacctggcccaatgtaattgaagatttttctaagcatcttctgagccggtcaccgtccaagtgcacatagcctgcctctgtcacagatgcccctgcaggaccacagtcctttcatttgtggtttattgactggaaacatcactggcttcatggcccacgaactgcagcatctttagttctgacagctgtttctgaaacttaactttgcagaggaggaagcttggtgctctcaggtgtgtttgggagcaaaggcactgaaggctcaggtgttcctcatccttaagcagcagcgctgcatggctgtgggtgcggccctcgtgccttttcactcctctcccgatgggcctgagcttgttagccacgacagmaagacagaccctccaggcccagaggtggttccgagacactagtggcttcagctcccccaaatccagcggcagtggagagctaggtggaggctaacagacttatgatacattgtaagcagacttatatgatgatacattgtaagcagacttatatgatacattgtaaatagacttatgatacattgtaaacagacatacatgatgatacattgtaaacagacttatatgatgatacattgtataacactgttcttctcaaggggggcctccctttatcttcatgaggtatggttatttgtaatatgctggtttattttaactttactgataataaaattgcatgacttgttttctgttgaagcccattgcctttttttttttttttttttttttacagtggtagttggggatgtgatactccatnnnnnnnnnnnnnnnnnnnnggtcaccaccgtacctccaccccgtggtgtaaatacagtggtagttggtgatgtgatactccatttttcatctccttctcaaatcacacacacacagaatttggctagctgcaaataaacccctattctgtacttcgttttgcagttgaatrgagtggcctacaaattcgtaccaagtccaggcagtgatgttttgaacagaaagtagcctgggcatgggggtaccttgcgttacgttggctgtttcttttagtccttaccctaatcccagaggagtgtgtgtacccatttctcatattaggaaatraggcattgagaggttaggaaacggacccatggtcatgggtarttagtggcagagccagaattaccccsggctcttcagtgactcttgctcctgtttccactgcaggtatgaacgctgccgtccgtgccgtggtgcgcatgggtatctacgtgggggccaaggtgtacttcatctacgaggtcagtgtctgcccctcaccccctgtcrcccttcttccacctgcccagagccctgcagtcaccrgcgctcgctcacccctgcctcccccatgctgagcacagccgaagaggtgggcaggggagcaagatcctgccagccagggccgttcctcagcccacagaagcccctggtctgcagggacagatgcctggtctgcaagttttttgttaggcaagaggagaaaggagatgagagggagcccaaaaagccattttcttttttcttttttttcttttttagacagtcttgctctgttgtccaggctggagtgcagaggcacgatcttggctcactgcaacctgctgggttcaagcaattttctgcctcagtctcatgagtagatggaattacaggtgcccaccaccacacccagctaattttttgtatttttagtagagaaggggtctcaccatgttggccaggctggtctgagtcctgtcctcaagctatccacccgccttggcctcccaaagttttggtattacaggtgtgagmcactgtgcccagccacaaaaggccatgttgatatcaacttcctggtgttgatttataggattagaaatcaaccaatgatctctaattggttgtattggttggttggttgtatttgtctgaggctcttactgctgtagaagtgatttattaatttccaatgtaggctgaatttgaatacacatttagggaaatgaggaaaacagccactttgagcttttcatcattcatgtaaggtggaaacgatgcctagtgtctgctgatgtgttaaatagcaggagtgactccctgtctgccacttttgaagtcctggcaacttaagactaaaaagtatttgaaaggaaggcaccaatagagtttggatcacagtattaatttcagaaattattaggaaaaatatttaatgtttaaatttataaaacatagctttaaaaatgagaagaaggtatttttgtaaatcacttaatgcctccaaaatggctattagtgttttagtctgatttccttcagtatgacgtatgtaaaacaccggaaagaaacacacacattaggaaaagtacagcaaacacgttctgtatactgtgttttttgtttacgattatgtcatgacttttcactacgtaggtttcacgactgttgctttaacttattttattttattttttttgagaaaaatctcacttttgtcccccaggcttgagtgcaatggcttgattttggctcactgcaacctccgcctcccagattcaaatgattctcctgcatctgcctcccacatagctgggattaaggtgcctgccaccatgcccagctaatttttgtgttttttagtagagatggggtttcaccatgttggccaggctggtctcgaactcctgacctcaggtgatctgcctgccttggcctcccaaaatgctgggattacaggtgtgagccgccgcgcccagccaactgttgctttaaatgtcaacatactgtcttgttgaattgatgtctcatcatttatgatggaccctgtattccaccattcctgtggtattgcactatttagctttctccccgttttttaagctattgtaacactgcaagatctatgttaatattcaaagcgatttgatgttttgtattatttaataccttggtcctaatatcaggcaccgactgagctaaaagggacagtcatcatgatggcttgggatgcctcttgcctaagtaattcctgaaacctgtccagcctcgtcccagccccgcgcagggaaggcggtgctctagctcccatgatgatgctgtgtgccgctgtgtgcggcggccttctgagcactggcaggtttcccctgtctgctttctaagccatgtttccctttggtgaaatggttgctactattattctttgctcatttatctgtgtatccatttgtttatcatttgctggaaagaggtttttttgttcgtgttattgttgtttgcttttattcaattaaactggttacgtggttattgtttgtatttatgcgatttgggcaattttaacggagggtctagctgtagcattcccaggctgttgtttttatcattttatatttgggtgtttttaaggtcagattgccctcctgagtttccctgcctggaccctggccctggcggcagctgccccttgctcagggatgtggaatgagcacagtagacgcggtctccagcacagtcctccagcccctccccaggagagtcctccagcccctccccaggagagtcctccagcccctccccaggagagtcctccaccccctccccaggagagtcctccatctcctccccagtacagtcttccacctcgtcccaagcacagtcctccaccccctccccagcacggtcccccactccactctccagcacggtcccccactccactctcacgagcagcaggtcaccccagctccaatgctgccagcacagtcccccagctccactttccaggcacagtcaccgcgcactccactctccagcacagtcccccaacccctccccagcacagtcccccaacccctccccagcacagtcccccaacccctccccagcacagtcccccaacccctccccagcacagtcccccactccactctccagcacagtcccccactccctccccagcacagtcccccactccctccccagcacagtcccccaccccttccccagcacagtcccccaccccttccccagcacagtcccccaccccttccccagcacagtcccccaccccttccccagcacagtcccccaccccttccccagcacagtcccccactccactctccagcacagtcccccactccactctccagcacagtcccccactccactctccagcacagtcctccaccccctcctcagcacagtcccccactccactccccagcacagtcctccgccccctccccagcattgtcctccaccctgcccccagcgctggaatttgcacacagacttccagaagtggcggtcacctgcacctgacgaaggccagcttagtttccgctgctgctggagcatatacatgtgcatactgaatttgttccctctgcctttttttgggtgggcgggggagagggtgggtgtgatctgccttggactttgggagacagtaccacacccgtcctgagagctgctcttagtacagaaatgtggttttaaaagctgtttggggatggagtatcctgggaggaggtttttctgttataattcgcaaaatgtttttaaattcatgaagacttgtagttcacagaatgtttcccaggatgccttgtgattttcacggctgctcctgttcccgcggccctgacgctgttgtgtgttgagtggaagttagttccctcacagaagtggcggcctgaacactcacagggactctgggtgcagaggaaaggaaggaaatcacttctcttatttcacagataaactgacttaccttagttcactttctccgcgtcaccactcagcatgttcagggccaggaacagagttcggtccccgacccctggcctctagccgggagtagggagtgatttacccccttaggacgtttaccagtgtttggaggcattttttgattgtgccattattgaaaggattgcccctggaatgtactggggagaggccagtgatgctaccgcacatcctacgatggacaggaccacaccccacaaagaatggtccagacccaaatgttggtagaaacaaggccgagggaccctgcactaaaccaagcgcacactgtgtttggtttgaatgttgttagctggggaggggtggggagtgaggccgaggggagtgtgagggcctaatcttggatgcagtccctggcccactttaatctctcttgatgtaagggttgtgtttttgtggcgattgtcgggtgtctgatttttattggtcactgtgtgctgtagtcgcccgtctgtttcctggtgggattcagatgtcctcagacctgtgcctgctgtctgtgtggtatgtaccagaattaaggagttggtatggaacacactgggaggcctaccccagaggccctgggctttctctgatgtttgtttgtttttgagacagagtcttgccctgtgtcgcccaggctggagtgcagtggtgtgatctcagctcactgcaacctccacctcccaggttcaagcgattctcctgcctcagcctcctgagtagctgggattacgtgcctggctaatttttgtatttttggtagagacggggtttcaacatgttggccaggctggtcttgaactgctgacctcaagtgattcacctgccttggcctcccaaagtgctgggattacaggtgtgaggcacctcacctggctcagaggccctgggctttcttgrgaggtaaaacccatatgttctctctgtctcagctgggagggctggggctctgaggcccatccatgtgactccatggccgcaggtgctgtctggacgaggtctggacaaccttgtctggcggggacagcgcctcttcctgcccctgccctcggtggggaaggaggggttctgaytctgagatctcatttcctttagggaaattcaaggaatttctgcaattcttctgctgagatgtggccaaaataaatccttgtgtgcaaatggtgttttgggggaattctaatttttatgataacttttatagtaagtggcaccttcgaagctgtctaggagcagagctgaatggactgtttatgaattttggcacaaagaatgatcaggcttttggaattatcttactgaggaagataggagcagcctggggatcagctcatttgagcccaaatttcctctctggcaccctccccacctgccccagaaggtgggaaatcctagtgaacgggtccatttcttcaccttcctccagtgtagcccaggcacctacctctgggcgtcttgggaacataaattctcatggaccctcagaccgccaggactttgtatgagtggtgggttmtataaccagctgtagcaataaatgttgaatccatttatggtatcatcattttgctgttacagatataaaaatcctgtatctttcattctttttttttttttttttttttttacattatactttaagttctagggtacatgtgcacaacgtgcaggtttgttacctatgtatacatgtgccatgttggtttgctgcacccattaactcgtcatttacattaggtatatctcctaatgctatccctcccccctccccccaccccacaacaggcccsggtgtgtgatgttccccttcctgtgtccatgtgttctcattgttcaattcccacctatgagtgagaacatgtggtgtttggttttttgtccttgcgatagtttgctgagaataatggtttccagcttcatccatgtccctacaaaggacatgaactcatccttttttaatggctgcatggtattccatggtgtatatgtgccacattttcttaatccagtctatcactgatgggcatttggggtggttccaagtctttaattctaagatagaaaacacactaaaatctgtgagtgttttcctaactgggcagcaaagccccggctgacctggagcgcgttgcctgggggtgatcccgtcacccagccgaggtgacggctcccacctctctttgcaggggtgggtttgatgccgtgcactcccaagggcccagagtatgggtgcagtaacactcactgctttttaaaacattttttatttttaattattatggatacataatagttgtacctatttatggggtacatgtgatttttttaaaatttattttattgaagtaaaatatgcatatatcatttaccatctttactatttgtgggcatagagttcagaaatatagtcttcttcccttttatccttgcttttccccacccctccccttccatacctctgataattgcagttctcgtctctatgagatcaactctgttagctcccacgtatgagtgagaacaggcaatgtttctctttttatgcctggcttatttcttatttctttttccatacagagttttgctctgttgcccaggctggartgcaatggcccagtcttcgctcactgcaacytctgcctcccgggttcaagcgattctcctgcctcagcctcctgagtagctgggattacaggcacccaccaccacgcctggctaaatttttttatttttagtagasatggggtttcaccatgttggccaggctggtctcaaactcctgacctcaggtgatcctgccctcctgggcctcccaaagtgccgggattacaagcatgaaccaccacgcccatatgcctggcttatttcacttaacagtaaagcactttcatccccattgccacaaatgatggggttttctcctttatgggtgaacggtgttgtgttgtgggcgtgcaccacgttttctttgtccatttatcygctgacgggcsctgattccacactgggctgttgtgatggggagtgaatgtaggagtgcggaggtctctttctgccgattccctttctcggggtatatgyccagcagtggggctgctggcttgtgggggagttctatgcatgtcatagtctcatacaagcatgcaatgcatcatgataaaatcagggtaagtagcatatccatcacctcaagaacaatcatctctttgtgttaggaacactccaattttmctcttttagttattttgaaatattattttgaatatatattatgtatatattattatacattatgtataatatgaattatatatgtattatacatatcgtatacaatgttatacattatgtataacattattatatattattaaacattattatacattattaactgtagtcgctccatagtatcactcatccctggattttattccttctatctcaaactgttttttacccattaaccatccttctttacacccctgcttccttctacttttcccagcctctggtaaccatcattctgttctctgtctccacgagatcaatcctaactctgtcttcatgagatcaattttttatttaagcttaaatgtatgagtaagagattgcagtatttgtctttctgtgcctggcttatttcacctaatttctgcctgttccatccatgttgctcagaatgacaggattcattcttttttattggctgaataatattccattgtgtatcaagatgtggaatcagtctaagtggccatcagtgggtgcgtggataaaatgtggcgtatatacgcaatggaatatttttaagccattagaaaacctgctttttaaaatcccaagtcttctgagtcctggcctgcctctcagacctgggttttgggtgagccatcgtgggcctgcaggacgtactgcagtgactgtggatgcataaatcaacstttcgtttctgtgtgctcatctgtgcagtagaaatggtgtttgccctcctgtctccctggtagaaaggacttggaaaagtctgagactaacggggcagaggagctgtttgactgcttttcagggatgagacgcgcatgcctttgactccatgggtgtgtggccaggtagggaaacggggtctgcacctgaacacatctattcacagatggctctgcactgaagaggctcagccccctccccgggctggtctctgcgtcatacccacaggctgggcttctctctgagtgtcagggcgatggcatctggggtgggcaattcttggtgggcggtcctttgactctcaggatgcggagcagcacccctgtgtccacctaccccatagtcatgacagtcaaagatgtccttacagtatctccaacatcggcgaacgtcctatggggggaaaatcactcttttgggggaccgctgttctagacctatttgggctcaaattgaggggatattatgttttatttttttaagtatgactcagtaatttatccaacagatttttttcacctatactctagtttctaacctagagctctctgggttaccaacagaccaggacagttaaacaggttactattaattaaaggggtttgttttttccttcagtagtgcatgtgtgaagaaagtattaacctgggaacagtggcgtttctgctgaaagcctggccttcatcgagggacctctgctgtctggccgctgcttgagctcctataaacctgggccaagcctacgtgtgaagcatgccaagccttgggctgcattccagggagactcggggagggtttgccagttaacccattcctttctacctggtgaaccaattgttgcttctttcttttttctcttaagctaaggtttttccttagaagcctacaaatggctttagcttcttggagatgatgatactaagtatatcagatgctttgacccaaaggccatgcccagggtaaactaccctggctctggtgggtcmaaaccaagctggggcgagtcagttggttaatccagggctgccastgtgkctgcaggaaacagtcggctccttgcatttggtttcattcatgaatttcatatcctgtkgttgaatattcttctgcagatttcagaaattgttcatattattatagctcttcaaatatgactcayttaagattcttgccgagcaccgtggctcatacttgtagtcccagtactttgggaggctgaggcggatggatcctttgaggtcaggagttaaagaccagcgcggccaacatgacgaaactccgtctctactaagaacacaacaggtagctgggcgtggtgtaatccttggaaggctgaggcttgaactcaggaggtggaggttgcagtgaacctagattgcgccactgcattccagcctgggtgacagagcgagactgtgtcaaaaaagaaaaagaaaaaagtcttttatcttaattttttgtttgttttaaagtttggttctgctctagacagctgtttgtaaacaatatcagagctgtctttgtcatrgtccacaccctaaagaaaggctaggaataattctgatcattttatcgctagttttttccatgattaaaaataacacattcaaaaggtgtcagataagtgatgcctttttatgttgaaaggataaagggtgttggtacagcatcagcatccagcctctggtcttcccagatgtgctgccatggagcctgtgccacctgacccccgccaccggcccccaagcttagctcaggtgcccragggtctccatctccccatggcccccggtcagcagccctgtccctgcacccagactggccaacccttctgagcttgaaatatcagcatgtgatcttagcttcccttgtttcagccctgagcattacagcttgacttactataccaataaacaaaccattaacttatcaatgaattgattggcatcatgcttcscttctttagttggtctcgtggaggtagagaggaggatgtagatagcagaggctgggaagggggtgtggacaggaggggatgcagagaggtggatgggtgcaaacatatgcttagataggagtaggttccagtgttgatagcggagtaggctggctgtgttagcaacagcgtattatattaatgtatttcagagcagctgggggagaggactggaaatgttctgaatgggttgaagttaaaaatacccagggtgacagacaccccagtaccctaatttggtcattacaggttctgtgcatgcaacagatactcacatgtaccccacaaatatgtaaaattatatgtgtcaataaaattgaaaaaatatgggggaaaaaaacctttcccttcctgatagaaacccttcattcttcattagccataggaaatatttcttttgggttaaaatgaagctcctgcttttacaatttttaaagtgagaaatctcacacttgtgacccaaaataaacaccttttccccagaagtgctggtgctcccctgtctgaggaarggggtgtgggggacctctcctaatctggaggatgcctgagctgctgggatgtgtagaygggggtggccacggaagcctgagctcctgggatgtgtggatgggggtaggggggtggccatggaagcctgagctcctgctcctgggatgtgtggaagggggtggccacagaagcctgaactcctgggatgtgtggatgggggtgaccacggaagcctgagctcccgctcctgggatgtgtggaaggggctggccgtggaaactagttggcaagacaaagagcaggtgacagcattggccctgacttctgggactgtgtctgatttttttttttttaaatctctgtctcacccctcccatccctgactgtcacccccaccttcccccaacagtgttgaaagaccaagcaaggttgtccacatcccgttcagtcacatctctttgatgttttaaacataactatttctgcccattaacttccttgaagtgaaaactactcaaccactccacttctgtctaaaaataagtgatgcttgagcacagcactgtgcagtttyttacgtgtagctgttcccgacctgactytacagggtctttaccagagcccatgccttccactaacacgcgtgcgtgctcacygagctggctgactcctagaagaccagttgaggtggcctggttctgctctgcactccctgcctatcgttggaacattgtccaacaaaattgacacatccagggtgacgataaccacaggaacaagcattatctttttttttttttttttttttttgagacagagtcttgctctgtcacccaggctggagtgcagtggcgcaatctcagctcactgcaagctccgcctcccaggttcacgccattctcccgcctcagcctcccgagcagctgggactacaggctcccgccaccacacccggctaattttttgtatttttagtagaggtggggtttcaccgtgttarccaggatggtctccatctcctgaccttgtgatccgcccgccttggcctcccaaagtgctgggattacaggcgtgagccaccgcatctgtcgtagcattatcttttattacatgtttatatgccagccaggtcccatgctgaattcttcatgtatgatctgccttcatcccaccaccatttacaccattgcctgtggcttcagacaatctagtttcagtgaacatttcaaactgcagaagagcaccatctcccttcaccaccacctccccaccactgtggtcagctgaatgagcctcaaggtggggtttgctgtaaggtcactgccaggccagtgcttgggaccctctctctacaggggaggaagggcgaccggcctcgctcctgctggggctgttggttgtacaacttaccggaattgtgcactcttagctttggcttaaagaaatctgtgatgccagagggctaaatacatcatgctgttgcattattggtcttccaaagaagcaagtgcaggaccacatgatggtgtgtcgtgtkctaacctattttagaattttacagttgactgagtctcccaagaagaaatcctgaggctgctctatagaaattttctatcaagtaatgaaatcagtgagggtgctttgctggggtgattggtagggtctctggacaagagcgttccttcagagtgttggtggggaggtgagcagggcttgggatgtgtgttggtgtggggctgtttaatctcaggctctgcctctgaatttcctagagacaggataaagccacgattcctggcctttgaaaaccattgacatagtgaaattcctgccgcctctctttctcgcacacctagtttggaacgctggtgtttcccaagtctaagcctagagagccgttcagagctgacctctgcatgcatgctctgaattctaaaagtgaaatgctttaatttattaaggaatgttgtagctttaggttctgtgggggagggaaaaggattaaactagggaaagcttgattctgtaggaaacaaaaaaaatagtatttactcagaagcagcaaagcccctacatctctggatgcagtaactatgtctgcaggaagctggtgataacactatctggaaggcacttttaaagtctgttatctctaggagcttgttttattctggtagttggaatgttcaccatttggagttagttgagtgaagaattcaggaaatcagattggaaaaaagcattatccagttgagaagacacatggacccatgcaacaagcattctgaaagaaaaagcctactgctgcaacacaacggtataatttccctttgtctgtaactttaaaaaaaaaaacttacatatgagacgtccgagaaagccrcscataggtgaactacgcrcataggtgaactagcttactccatttatgatggattcggcgattgcctaaaaattctagtcaaaaccacctctacatatagaatgatctcctacatggttagaaggctggttattttgacacagctcaaaacaatttcgaataagttgaaatgacttcagagcctgtggcatgttcttagatgtgatcgaatgactcaacgtaaaaaattctgtccgacgatggatccgatacagccaacgaggagctctaaggttcatcttgtgagtcagagtcaacaagacagagaatgttactttggccaaaaaactgagataaggttaaaggttttatgctctgtttttcctatgtgagtcataaaactggcttggaaggcaaattccaaaagggtgttttaggaaacgtctgggctttggctgtagtaagataaatattcagccttctaagaagacttcaaaagagaaaactcatctgaatttctacgttgtagtacgtttgggcaaaatgagtcttcctaatttagtaatatcttccttgttggtgaaagacggcttagaactgcggytggtagttgcttttcacatgttccatgggcgtcgtgactttgcaaattaaagaatgagtcatttcctagcaacttagctcacgcatgcactagacagggagcattggaggtggcactcagaaagccctccctttctatttttttaatggctttctttgccacatgcatctatgcaacacaaaataatgaaattactttcagagaacattttacttttcaaaatgttgtggtttgcagagcagttttcttactactccagaagcaagaggattcgttaacatgtttgattaaatccgtatttaaattctgtgaactcatgcagggaaaggaaattgtatggttcccactatggcatattaactagtaaaatgctgggtggcggttgacttggaagcagcgtccgggatagcgcgtgctccaggaatactctgaaagctgatgccgttaggggtgcatggttgactcctgggcctgagacggcctcaggatgctgcagcggccttggcatcctcttcagcagggtggcggccggaactggcaccttccccccggtctctttatttaccaaaaaactgcatgcacagaaatgaccgcaacagctctgggtgtgggaatgtaggaactgtctgtttcagttttgccggagccccaggtttacggccgctctacatcccagtcctctcagggaggtcccggtttctgctgcagttcaggccccatcatgggtcatcttttctctcctcctgagatgtgggcttggaggatgggaggtcgtgcctctaagaagggtccgtttcacggtggcccaggctacatgcctgcttccttgtttccttgcccccccgagcttcatggaagtcaatctggaaagtcaggatcactgcagatggcagtttgttcagtgttgctcccagacctgaagaatggagcgctctgttgtgcttgcagaatgaagcataattcttagcagaaacctgggaggccgggtgcggcggctcatgcctgtaatcccagcactttgggagtccgaggcgggcggatcacgaggtcaggagatcgagaccatcctggctaacacggtgaaaccccgtctctactaaaaatacaaaaaattagccgggcgtggtggcgggtgcctgtagtcccagctactaaggaggctgaggtgggagaatggcaggaacccgggaggcggagcttgcaatgagccaagatcacgccactgcactccagcctgggtgacacagcgagactccgtctcaaaaaaacaaaaaacaaaaaaacctgggagtttggggtggtagagatcactgaaactgcaaccccaaggctaggttatctctttatttatgtatccacccacccgcctacctacctattgtacttacaatattctgaggattatggcctccaagagtcattcatggctttgcacatgaccgtctgttaccagtgagtccttgtgtggacagagcatccgcagcaggacagaacataaacggtgcctcccagggtgccctgtgcagaggcgrggtctgcatccgacctcacacttgctcaccctcgccctccgggggacggctacactgggctcatctgcactgcaagggaaatctgttttcagagcaaggggagacaataataataataataatccctagagtgagactgggctgtgtttagaagatgttcygctgttttgccatggaggtagggggcctggtgatgggcagtccctgtaccagcctgtgagccagkgcctgggtgcctggggggtctcgggaggtgcagacggggctgccagcgctgaaatgaaccagctctgttttgggttctgttccattccagactgttttctcctttcttgtttattacatgtatgacactaaattataaacacacatgtggccaggcatggtggctcacgcctgtaatcccagcactttgggaggcccaggcaggcagatcacttgaggtcaagagttggaaaccagcctggccaacatggtgaaaccctgtcactactttaaaacaaaaacaaaattagccagatgtggtagtgtgttcctgtaatcccaagtactctggaggctgaggcaggagaattgcttgaacctgggagatgtaagttgcagtgagccgagatcgtgccactgcactccagcctgggcaacagagcaagactctgtctcaaaaataaaataaaataaacacacatatatatataatatttctggtggaaatttataaatataagtatacaaattggccagctatcaaggtgcctgcactattgattaatttatatatagaactccataatctatgagtcatttcaattttaaaaacctttcttttttctgtcctccggaccttcactaaggtgggcttatggatccaacaataatctatcatgaacttttctaaatccttaatagttattccttcttaagattaaatgctgtggaaagtgagttatgtagatgaagttacccgtgggcattgctgcatttcctgatcttgtatattccstggagaaaaagatggggatgcatttagcattgaaaggtaattgttggccaggcgcggtggctcacgcctgtaattccagcactttgggaggctgaggcaggcggatcatgaggtcaggagtttgagaccagcatggccaacaaggtgaagccccgtctctactaaaagctacaaaaattagccaggtgcagtggcaggcacctgtaatcccagctgctcaggaggctgaggcaggagaatcacttcaacccgggaggcaggttgcagtgagccgagatcgcgccactgcactccagcctgggtgacagagtgagactccgtctcaaaaaaaaaaaaaaaaggtaattgtccttgggcttcttctatcaatgtgtcctcacatattgatatctgattccctaatgcagcaccgtgtcattaatggagggtaaggcagacaattattattcagctgtgctgtttaataatattcaacatacatcccaagtggcgcagggtgccttggcaggcggagcccctgacaaaatgctcccatgtatgtcccgtgctcgacagtgctgtgtgcctgtgagtttgtgctgaagtatgataaacacgttgggtgaaagtgacccctttcaacctctagcgaaacacgaccctttcaacctctcgggaaacgctgggccataggagaatggcttgattcctcattgcactgtgaggctgagtctaggcagacgttcccattactagggactcaaggtgaggactttcccacaattcactgcttttatccagtgctggaactgccctgtcttctgaccagtggatgctgaggaactgacattcactgtcatttttcccgttttatataatttaaggatcacttcccatttagtgaagtttatctcatttttaaaagattctccctttctcccctagggctaccagggcatggtggacggaggctcaaacatcgcagaggccgactgggagagtgtctccagcatcctgcaagtggtaggtactgggctgcgtccacagggttctctgagttagagactcttttatgtctagtaaattcccagaacacttgagctcagatcagttgcgaaatagagattatgtggacagaacagactttgtgagcagctctttacttgtggtttgatttttagaaatgcatgtgttaatctgtgagtcactttgagtacttgttaatagaaataatccaaatcggtgcctccccgctgaagacgctcatggggcccacaccttcgtgctggtccaggctctctctgcattgggcgcctcctgagctccgacacatcagaagagaggtggagggaattttgacaaccacggaagttaggtggagcaacgtttgcaaaacatcaggagagtgtgggctgaattcacacaggggagcgtttccannnnnnnnnnnnnnnnnnnngtgtgtatatgtggtgtccttgtatgtgtaggtgtgtggtgtgtgtgtgtgtgtgtgtgtgtgtgtgaaagaaagtgagtgaagagaatgggaatggcacccactcctctgcagcccagttatcctggtttcgttcctgagttgcggccacctcgtctctttggttggagtttctgggttgctggctctagctcccattgtgctggctctcgtgctgccccccaggtttttgtccaggcagagtccagagagcacccctgccctgctctgcgcccccaccctcacttgccttgggggttgggttgtaaatggtctcggtcacacttggtgccagtgacgtaggatcgtgtggagtgaatttcagtttttgtaaccttttcataatgttttgataaattaaatggtggtaggtttcatgtaaaaataggagcttttctgggatttggaatattagtgagtctctgtgtgtgaaaatgagctgtgtgcgtgcaccattggtgtatcgaaacacgcactcacgtcactgcaggggtctcctgggagctgcctgcagaccgaaggcagggagagcttcgcctccagtgcagagacaacccctgctgtgcttatgagcaccttgcttgacaaagtcagcacgcgcttagggatcccgtacggatggagttttttggtgcattcatggttttatttaaagaaatcttgcatttgtggatcccaccaacaattcttagtttttggaaaaccaagtgtgacgaatcatgatctatgtcccctggaagtttggatgaaagaatttaagatcctgaagatatagctctttaaaaggggcagcgagtatgtggtgcaaaaaaaaaaaaaaaaaaaaatccccctggccccaggttcctgctggttttacttgcaggtgctgtaaggggtgactggagggagaagcctggctgctggtcacaccgcttcccttgtcctggccggcatgctctggtggtcagtgggcttgtctttggttccacgtgcacctggttgagctcgttggccggtgctgaggcggctgctgtgacaccgcaggctggttcctgctccatgtatttaactgctggctgccgtgtgtctggctctgcaccctccctggctcctcctgggtgtcacgygcctgtctttgtccatggaatgctggtctgggactaaaaacaggaaaatcacagtctttcatagctagttactaactcacaagatgaaaatgagaaaaatgtaaattcyagcaccccatgtttatagtcggcctgtgtgtgccatccacctggcgctctctcagactgagaggagataaattagctggtgtctttcccagggcgggacgatcattggcagtgcgcggtgccaggccttccgcacgcgggaaggccgcctgaaggctgcttgcaacctgctgcagcgmggcatcaccaacctgtgtgtgatyggcggrgacgggagcctcaccggggccaacctcttccggaaggagtggagtgggctgctggaggagctggccaggaacggtgagtggacacctgctcctctgtcctgcgggttttcgccctgtttcagagctttggaaccgacaggtttccctcttcactgtggcagaagtacctcttctcacagatcttacaggtcaccatctcaggactttttaggatctcaaaaaacaacagcaatgatcgtaagaatgctagtaatttaaccttaccatgtgccaggcacccttcgacctttcacacagatagctttatggaatcctcacgacagccatctaagccaggttttagatcatcccatttacagatgaggaatcaaacggccactcagccgtggggcgagccgggtccccagcagcctgggacactagcatccgcctttcagccctcacactgtgtccctccagctcgctggggtcctttaaaactgaagttgggccgggcgcggtggctcacgcctgtaatcccagcactttgggaggccgaggcgggcggatcacgaggtcaggagatcgagaccatcccggctaaaacggtgaaaccccgtctctactaaaaatacaaaaaattagccgggcgtagtggcgggcgcctgtagtcccagctacttgggaggctgaggcaggagaatggcgtgaacccgggaggcggagcttgcagtgagccgaggtcccgccactgcactccagcctgggcgacagagcgagactctgtctcaaaaaaaaaaaaaaaaaaaaaaactgaagttgccacaggactttaatttatttagacgataaatctctgccaatacatcatccagtaccaactttggcactacttaggaaagcgtttctgagagccctgtgtgtatgtggtttatttttgttttgtttgattgtttgattttgtttgttttgagacagagtctttctccattgcccaggctggagtgcagtggcacgatctcggctcactgcaacatctgcctcctgggttcaagcaattctcctgcctcagcctcccaagcagctgggattacaggcatgcgccaccacacccagcttttttaaaatttttttatttattttttatttttagtagagatagggtttcgccatgttggccaggctggtctcgaactcctgacctcaggtcatccacccgcttcggcctcccaaagtgtagtttttctcccttgaagcggttatgtaatttcagtgcaatattaaatatgaccagggaagcatattgtttaacagcaactcgatgagaggcggcattgaggcaaagcagctgtcccyaggtttgtgaacatcctcgtaggggatggagaaggcygcccgttggaagcagccaggcctcacggttcccgcttgtccacctcatccygtctggcacagcacagtgagtgcacagaccgggacagtggccacaagtccgggcccaagcttgcccctggcccttcagtggttccgattccctttatgcagaactgcccagcccaggtctgtcctgagtgcgaggcagatgctcacccacgatccagcttcccacagatgcatgagaaatcagtgtgaagatggcctagtgtcttagattcttaattccgtaattgtaacgtatcctgttcaaagccgtgtcattctctgaagctgttgccaggaagtactgagatgtttgtttaccgattgcaaatgtggatcctttcttttatttttctaatccactgctcttgtctaagtgccaggtgacagagtccattgtgtgtaactgctgccagctttgtctggcttctctttccttaactatgcagaatccggttgccttgagttckgagaaaataaagaatcggccagggcagtggctcacacctataatcccagcactttggaaggccaaggcagaaggaccacttgagcccaggaatttaagacccgcctgggcaacatagagtgtgggtctacaaaaaaaattaagaaatcagccaggcatagttctagcttctcaggagactgaggcagaaggatcgcctgagcccaggagttcaaggctgcagtgggctatgatggtgccactgcactccagcctggtcaacagtgagaccctgtctcagaaaaatgataataaagaaatgataccaataacaaagagtttagaatggttgatttctctacccayggccattctgcctcacccctmgtggggcaccccccgaacgcgccatggttacggcgatgagacgtgctgtttgctccccgygcaggccagatcgataaggaggccgtgcagaagtacgcctacctcaacgtggtgggcatggtgggctccatcgacaatgatttctgcggcaccgacatgaccatcggcacggactccgccctgcacaggatcatcgaggtcgtcgacgccatcatgaccacggcccagaggtaaagcgctcagaggaascggcgggaggccagtggggcccgaygtgtgcccagctcagacgttaccacgggctctagaacattctgcagattgggtgtcctggtgctggtctcgtaacttgacttttaggagctattgccagaacattgttctctggtctacttttcatttttaattttaaaacattccttgtttttaacctgatgatagaaaacagtttattagaatttggaaggaagaaacaaagtaattatcctctaaatgtcctacccaaacatctccagaaggagtggcaagcaggaaactgttgtgtggattttccacactactcattagaaacgcagccagcgatgtcctgccctgtgtaacctacggattcacgaagtgtcgtgggggccacagcgtttgatccgaggtgctctaggctcagcaggttatcactaaagactgtggggcgcaccgtacaatttctgaagcaatttgcatgaaaaccatgtggaatggtaaatagaataagtgtctcccctttaaggacgaggtgctcgagactgggagagtgcccgaatccagtccccagcatggcgcctcccagtcctctgtgtgcgtgtcctgttcccagtgacgcctcactggacattctcagtgcgtgggcgtgaaccccacagttggtggaaaatcaccgagttggaaggctgctcggagcagttggatttttccattccctgggaagacccacagtctctgggcattaagcacttagtgagtctggcactcacttgtttccgtgggagagatccagccgtggctgtcgacagcagctgccgactgtgcccaatagagaaggtatctgggaaagagcccagcacggggcckgggagtgtgagtgtgtcctggcacaggcaggcagaaggtgtccaacgtgcaactggagagcgcagaggtggctcaagtccccttcstcrcaggagyctggaaggctactgcatagcgtttgccttagtagaaaatggaccatttttgaagcctaggtccctgcaggcctcctggctaactcrgctgtcaaagccccttttctctgctttctgagctgtttccaggactgagtgrgtgctccctctgtttctctgctttctgagctgtgtccggggctccctctgtttctcttccagccaccagaggaccttcgttctggaggtgatgggacgacactgtgggtacgtacctgcggtgggtccggtggacgcggttcaggtgggggaccctcagcatcatctccctgaggctgcaccccacatcctgaatgctcccgtggaaagtcytgaaggggccggcatcccgcttcatacctggcgttaggtctgcaygtctgtygctgagcggsstgcctgggctgccctcgtgggaaggatccttctggggtgttgatgctgttgccttgtccacrtaggtacctggccctggtgagtgccttggcctgcggtgcggactgggtgttccttccagaatctccaccagaggaaggctgggaggagcagatgtgtgtcaaactctcggaggtaatgcgggtcccgtggccgttgatagcgggcgatgctggctgcattgctttaatcaggatcccaagtgggacggcattttaagcaagtgaaaaaatttctctgtctccagtttgtcacactttgtatttcactctatggactgtgagcgtggggcatgttttcctctatgaaggctgagactcaaggcagaagaggtttcatttaagacctgaggctgagacagagtgagcctggttagaatgccccatgygtgcctaactcyggcaggcrgacttcagrcactgttggctccaggctccacacagccacccctaycattttctatgggygggtctttaatttggggcttaatagaaagcgagtccattgaggatgagttaatccacatcatggagtggtcgctatgttcctttcatgacytctttaggctcacgtgactgccgtgagcataggaaggacgacggggacagcagccacrgtggcccagcagtgtgaggcctttcgggtgcagctgcagctgccagaaacccactgtctgggccctgtgtccgctcacgccgttttctctctcccgactctctgctgctggagcctgtgtgcaatacaacctcatcccagtggccaggcttcggggcctcccctgggagggccggggaggagtggttcacagggagatggcaggaaactctggagggaggcagaaagcatggcgtgcacggggcgcctgtggggcgtccacctgtgtgtccttccccatgggaggcagaaagcatggcgtgcacggggcgcctgtggggcgtccacctgtgtgtccttccccatgggaggcagaaagcatggcgtgcacggggcgcctgtggggcgtccacctgtgtgtccttccccatgggaggcagaaagcatggcgtgcacggggcgcctgtggggcgtccacctgtgtgtccttccccatgggaacccctgtcaatcacaccagcaccctccacctggggctgactgggggccacatttctatctgcggtggtgatgtgagctcccagtcccaaagagctctcttccagtgagccacagccgccctgctccttcacccctgcccctctcctcacccctgccactgccccttcacccctgcccctctcctcacccctgcccctctcctcacccctgcccctgtcctcacccctacccctgtcctcacccctgcccctctcctcacccctgcccctgccccttcacccctgcccctctcctcgcccctgccccttcacccctgcccctctcctcgcccctgccccttcacccctgcccctctcctcgcccctgccccttcacccctgcccctctcctcgcccctgccctgccccttcacccctgccccctcctcgcccctgccccttcgcccctgcccctctcctctcccctgcactgccccttcacccctgcccctctcctcaccctgcccctgccccttcacccctgcccctctcctcgcccctgcccctcctctcacccctgtccctccctgctgtcacccagcacacctttcaccaccttctgatgtcattgggaagcagctcttaggaagttaggcaaagattcctgcccagaaagaggccagttcagtttgagacagacttctgtggttttgttgcatttgttgctaagaacaggattaggaatttgagagctttaattttctgtctccrcagaaccgtgcccggaaaaaaaggctgaatattattattgtggctgaaggagcaattgatacccaaaataaacccatcacctctgagaaaatcaaagaggtgagtgtgtgtagctgctcactttctctcggtttctgcctggaagcaggggaggctagcgtcatgggcaggcttggtttagaacattgaattattaactttttatccttgatatttaaaacattttcataatgactcagaagttggacggcaggggaaacacgcagctcccgctcctgggagcccattccgcttacgtcacctcttgccgagcccgtagaggttccgggactccccagcagacagagggggtcagctcgagtggccacgcgtgttctttggattagaatgttccggctcttaaacatgagctgctctgagaatgaggactgaccacttggcagccgacccgggcttctgtttgccacagtgggaaaaggcggcgtcttgctattccctgtgccctcccataacccagagcatcagctgagcacattcttactcacaaagccactgtgtcctcgtggccctgcctgggaacaggctttggcaggctttggcaggcttcgtgccctgggacttgctcaggccagtgcctgcctgtctggagaggactctgataccatgggctgtgcccctgctgtagacggggctgcaggctgccggggctggggatgggctgtggctccagcagccacggggcagaagacgtccccacctggctttgcaagtcggcttctttattgtgctttgttatggtcagttaaggagcaaagcatatctctggatatgaaaacagtgatggacacctgggaaagacatctgccaatatttataagtggtcatccataaagtccaggcaaagattttatttcccgcttaactgtaattaaattataggacaatggaccgagaaggaaccaaggaatttacrtagcccagccccactgtccttacagaggaataagctgagttccagagacagtcagtggcctctccagatcaccgggccggtgtgcccatgggctggggcgaggggaacgccttgattgggctggcttgtgctgttcaaatcacagctgaacaaattaaagctggttcaaggaagatgtttacattttttgtaaaatataagtaatagtttaaatgcaagctactgaaacgttacttttttatttttcttttttaaagcaacgaacatattacttgtattcattttctaggtgcgagccaagatcttgtctggtaacaacagtattatttttaaaaccaattttcagctgcctgttatatacactaaacgttctgctaggaaacaaaatttagaaataacttttcccatttagatctgaagaaagagcgaaaaaccttttccagtgcccagtacctccttccagatctgggctgctgtgtccgcatcacagttcygcrtcctaacgagatgtttccttgcagcttgtygtcacgcagctgggctatgacacacgtgtgaccatcctcgggcacgtgcagagaggagggacyccttcggcattygacaggatcttggtgagttgggaagggttgggcatcttcacaaggtctctaggaggaagcgtttctggagaggyacaggcaccagccggccacagaggctggcaaggtgctccccgagagatgcccgyggcccggccctcatcttaacgatccttgagacctttggtgtagaccagtctctaggcctgcagccattcagatgcgggragagctccctaatrtgggaaggcagtgcttggtgttggcacgacgtggaccccagagggcacaatcccagggcagaaaggctgtgtttctagtgtgagtttctggaaactgactcagggcagcaggaatcccaagtacaaaccctcmgttcttaacactcctgctctccatgtgccctgacctcctctctgttcccgtcttgccagttctaaaggagtggaaatcgctttgctctaaagagttgggctggaagcgggaggggctgtgagcacctgactgaggtcattggacgtcatggaaagataggaggtgacagggacagggcwggaygggaggctgcccctgacccacatggacctggtttccaggccagccgcatgggagtggaggcagtcatcgccttgctagaggccaccccggacaccccagcttgcgtcgtgtcactgaaygggaaccacgccgtgcgcctgccgctgatggagtgcgtgcagatggtgagtgggcagcccatggccaagggcagggmggagacggctgggacagaagctgcttgtcaggccagcctgggcaccttgggtgtctcgtcggtgcacgatgcattacacggcctttctgagaaggaggtgagctgcccgtggggagggagaaggcttgtgttctctcccacacctgcagagcctgcgccrtcttcgctctttggttttctaagttaccatccatctgtgtggcacatagtcgtaacctcccctgagtgggggtctagagcatcgggatcctcaacagtcgaggatccaggtggccccagtgcaccaggtgctgcagaaggacagagtgcagggaggcagccgagagagagagatccgtggacagactgcagggaggcgggcgtgagagagacccatggggcagagggggcagggaggcagggaggcgggcgtgagagagatctacagggtggtattttgtaggggaaggtgggaccttcccaaacttctccagtttcagccatttcctgtcctcctatccccaaggacattcaggtctgtgatgggacacagggaaagctctggtcacccgaagatacacccacccttcttgggccagggaactgtctgcctgcaaatgaacaaagggaaaagcagttccagcttttcaggcattggttcagtagtggaggtggctgtggagttagctgcatttgaagttatttaattaattaatttatttatttagagacggagtctcactgttgcccaggctagagtgcagtggcgtgatcttggctcactgcaagctccgcctcctgggttcacgccattctcctgcctcagcctcccgagtagctgggactacaggtgcccaccaccacgcctggctaattttttttttttttttttttttttgtatttttagtagaggtggggtttcaccgtgttagccaggatggtctggatctcctgaccttgtgatccatccacctcggcctcccaaagtgctgggattacaggcatgagccaccacgcccagctgttgttttatttttcagagttcattcatgattcatgactcctgttttgttgcctcttaacacacacaaagaagtcgtgaagcaatcaagtcagggacttgttgaaagtcaccttgtaaacataatttccaaaagcccaagggagaaaatagtatttgtgtgtatgtgtgtgagtgtgtgcgcaggcttgtgtctctgtgtgtatgtatgtatatgtgtgtgcatgtgtatctctgtatatgcatatacatgcaggtttatgcatatatttatgcatgtgtgtgcatgtttgtgaggtagtttgggtctgcatgtatgtgtatgtttatatgcatgagtatgcatgtttgtggtagtatgtctgcatgtatgtgtgtgcatgtttgtgtgcatgcatgtttgtacgtgtgtgcatgtttttgtgaggtagtgtgtgtgcatgttagtgtgtgtgcatgtgtgtatatgcatgtgtacatttgagtgtgaggtagtaygtttctgcatgttagtgtgtgcatgtatgtttatatgcatgtgtatatatgtgtgtgaggtaatgcatctgcatgtgtgtgcatgtatgcttatatgcatgtgtgagcatgtttgagatagtgtgtgcatgtctgtgtgtgcatgtgtttatatggatgtgtgtgtatgtttgtgagaggtagtatgtgcctgcatgtttgtgtgtgtgtgcaggtatgtttctatgcagatgtgtgcatgttggcatgagtgtgaggtagcgtgtgtctgcatgtttgtgtgtgcaggtatgcttatgtgcatatgtgtgcatgttggagtgtgaggtagtgtgtgtctgcacgttagtgtgtgcctgtgtgcatgtgagaggcagtaggcttaaaaggctcagagcactgaacgacatgcggtacgtgtattttgagcctgtgtctcatgtctctgcttgtctagagacgaccgtggtaggtgtcacttgccctgaccttgaaaccacccttgtgtggctttgtttttaaagctgagggaccactactgtgcacctgctgtttgtcaggygtcttcctgagggtctgacatgcttgaataaccttagagatagctggaagtaggagtatttttctcatcttacagatgaggaaattgaagttcagagcgagaaagaacttgaccaagatcctgacgttgcccagggctgcctggcgtgcatcagtcccagccccgtgtcccagggcctccatccgggcccctctgctcccccgcccgctgtgacctcgctcccatcccacatcccccagtgagctggtgtgttctgttttgtttttccccaccataatcaaattgagaattccttagaaccatgcctgagagatttcatttcctctggctttgttctcttggagttaaatcttcacagtgttgtgtccacaaacagcaggtgacaccttctctttttcctcagaagcctcctgagctaagcagtcccagggctctgacctcacagccrggccgtgtggggctggctgccaaccagcattaggacacacttggcggccggtcrtctagaccattaaccctggggctgctggctgcccgggtcagactggagggggctggtgggaaggaccragcyagtctctacctaccccatccatgatgcaycaggtcctgacacattctttcttcttttcatcattgttttaaaagactcaggatgtgcagaaggcgatggacgagaggagatttcaagatgcrgttcgactccgagggaggtgaggtgctttggagaaagctctgccctgtcaggracacacacccctcaggcccrgccactgcaaacgtgcttaggggttgtgcttattccatgtcactgtgaaaaatcagaaagtcaggcagtactcacagcaccgctcttgcagtagcaggccctggtgactggttagagagaaatcattttctaaatttgccattggtcctttttggtaaggtgatggttgtttaggagctaatgagattaaggcacaaggtgacttgtggccctttaacaacaaaccaaaacaaaaaaaggagtctccttctgttgcctaggctaragtgcagtggtgccatctcagctccctgcaatctctgcctcccatgttcaagcaattctcatgcctcagcctcccaagtagctgcgactaccagctcgtaccagtgcatgtcaccacatccagctaatttttgtatttttagtacagrcggggtttcaacatgttggccaggctggtctcaaactcctgacctcaaatgattcacccacctcagcctcccaaagtgctgggattacaggcttgagccaccactcccatgtcttgcaagagaaagttatgaagtgtagaagcgtgcccttttctcttagtccatttccaccagacacggacagcaccgcgggtcgcggctaagggctctgccatgcacatggaatcctggggcctcctccttctgcccagatagtcgggcagacacatygagtgctggcagataagccrccttttctccacatgagccctgagtyktgtccggtattctcgactccrgtccaacgacacccttttcctttaggagctttgcgggcaacctgaacacctacaagcgacttgccatyaagctgccggatgatcagatcccaaaggtaggtggccggcctcccgygatgcccygacctctcctgcgggcctcycctcatggcctctgcctcagtgaatgaggccacctgttttcaggcctggcacggcatgagccactgccaaagtgtgcagcaaatggagctcacgtgtgcccgtgacccagcrctcacctgccttctgttttgcagaccaattgcaacgtagctgtcatcaacgtgggggcacccgcggctgggatgaacgcrgccgtacgctcagctgtgcgcgtgggcattgccgacggccacaggatgctcgccatctatgatggctttgacggcttygccaagggccaggtgagtcacccaggatgccgtaggcaggcagacaccctggctstgagcacagtggacgtrgcggcgggggggtgccctcyatggccctcataccttttcatgcctcagtccgggatcctgtgatattgtgactgaatgactacttatttaaggcaaggcattgcttctggagtaaaatctcaccctaaggtaggtttcaggccctcagatggagcccagggtatgatgtgcttttgaattttctgaaaaggtgctgggggatggcagtgcctctggggtctgatggccctgacattaggtgagaaggaaggtggcgttgtctcggaggctgtggtttgtttaaaccgggcactggagggaaagcaggcagtgtctggtgtgcacaagcacccactgaaatacaaaccttagtgaacacaggtaacaccccttgatgtgtgctgtatccagttgttctgtgggattgacatgtgttcacycatttaagcctcacactaaatctaagatgttatccccattttccttacaagaaaaccgaggcatagggatgccaactgggctgggtgcacgagggaggactggaaacaggattctgagctcctgaccaggggctgaacttgtggctatttgtttatctgattagccaacaaatacctactttgtgaaattcttttttttttttttgagatgaagtctcgctctgttgcccaagctggagtgcaatggcgcgatcttggcccactgcagcctctgcctcctgggttcaagcgattctcctgcctcagcctcctgagtagctgaaattacaggcacgcgccaccacgcccagctcatttttgtatttttagtagagatggggtttcatcatgttggccaggctggtcttgacctcctgacctcaggtgacccacccaccttggcctcccaaagtgctgggattacaggcatgacccaccgtgcccagccycctactttgtggaattcttatgctgaggaattaaatgagtgagcaaagcagacacarctctctggttccgtggagactgcgtttatagatggggagagaggacagtggctgaggatcctcctgctctctggatggtgagcagtgctcagaggcatgccgaggagggcctgctggagatcccccagacagcaatgctgrggaaggtgctcccaggctgctggtggctcatggggcmctcaggggacactcatcccaggtggagggaaaggatgctctggagctgatgctcacaggggmgggggctccragcccgcacagggcagtgaggatgggaactgcaggggcagggccggcttctttgtgggcagcctgaggaggttggcttttatgttatgtgagattcgaaggtcctgagcagggactggcccacaccaaragctttctaaagggaccckctgctgttcactgaggcaggaggcagggctcccagccggggctttgcagtcacctagcaagagatggtgggtccagactggctactgtgcagatggcgagaaacctycaagggtctggaggtatggagggcacggagggcagatggggtttgcttgctaagtacacgcaggcataaacagaggaggcaaggatcactccattcctggcctgagcacatggaaagggtagagttgcaatttatgaggactaggaagccctgagacacacttcttgcaggtaggatgaggagcggagactcatgaggccagggtgaaagtgtgtgtcccacggccgaggacaggactggggatgctggggtgaaagtgtgtgtcccacggcggaggacaggactggggatgccggggtgaaagtgtgtgtcccacggcggaggacaggactggggatgccggggtgaaggtgtgtgtcccgcagctgagaacaggactggggatgccggggtgaaggtgtgtgtcccgccatggaggacaggactggggatgccggggtgaaggtgtgtgtcccgccatggaggacaggactggggatgctggggtgaaggtgtgtgtcccacagctgaggataggattggggataccagggtgaaggtgtgtgtccctcagctgaggacaggactggggatgccagggtgaaggtgtgtgtcccgtggccaagaatgtgcagtaagccgctgtgtcccagcatcttcaggagggtttggctgagctcatgggtttaggaatcttcagcgtctccacgttgttaaagatgcagaactcacagagcttccctgagggcctgagtgcaggcaggagagagagaaggtccaggactgattcctcagggcgccattgttaagagtagggtgggaagaggaaaccccagcccaggagactgaggagtggcagagaggtggggtggagatgccctgtggcatccctgggaacacagatgatccaccttccaccaccactgcccgcccttctgtgttggcccatccacccgcatctcagcagcaggaaccggatgaggaaccgttctgtcctgggtggatcttgctttccccgtctttcttgttcagacttgtgaagattaattggcttaaaactggtatttgctttatttaaaaaatattgccttcaaaactgatttatgtgggaaaaaaaagcctgatttatatggttctgtcaaatatatatatatatacatacacaccttgtacagtatttaccttttgatgtagaatgatcttttttctaatgtaatttacctggagatccccctgcagcatggcagtgtgtccaccacatccgtgaacttacccagaatctcgtgaccggaagctgcggagctggggttcgagccccacgggttctcctcctgcagtcctgccgtcctcgcagtggcatcctctttctgcgattaccttagtttgcttagtaatctgttttccttttttctccctagtttgtaagaaaagaaattttcccttaatcttttaccaacttagaaaccatcatgttacttttcttttagttgccggtggcgggatacggtgagctgatgtatctcacacgtggctcaggatgagacacagaggccccgacaggcagggagaacgcagcccctctgctgctcttcatgagttgttaaccttggacttctgcttctcaccttgattcatccgggcatcgtgataaatgctgtctcataygcctctcaaatctttaccggaatgcagcttgttgaaaagtacagaaagctatttttagcactttgcaacttgcctttcattgttcactttagctgtttcgttctgtgtttgcacattagatcaaagaaatcggctggacagatgtcgggggctggaccggccaaggaggctccattcttgggacaaaacggtaacttccaaatctcaactctatgacctgcttttaaggaagaaggaagagccgtgttctgggagagaatcgctgggtgccgacgccagttggattcctggaaaggcgtccctaagggaggggtgcaggcagttaccggtcctccctccagtggaactgcccgtgttccagggagctggggatgtgtcccagggcrtaagagagawgaggakgtaacttgtgaatgccttcctctaattcatatttccattcatttgaaaagccagctggcgagcctaaagcctccacttggaggtcataaagatgagtggtgtcacggagccgtggagatggcactctaagcaaaccctaaagcagcctggatagcaggtagcattggtgggaagcatagccctgagcagctgtgactcgaggctcagatttccacagccgaggaaaggacccaaggaattctagtctaaaaatctctttttcagacctacagtaagcctsgcgtccctgcatccctggggacaatgggatttcctaatgtagatgaagcctgagtaattctcacctttgatcatgtcagaggtgcgaatattaatctctgtcatcactacacattacaatttcacatggaaggaaggtagtttttggcaaatataataaatgatggattccatgtaattccggcttattgttccaagggagttagctgcaccctttgctttgctttacagccaggaccctggtactcccagccactggtgggatggtgggagcctcggagctgggttagctctacagctgcctcccggctgttctcatgagctctgtgtgtgggtgccctggacggtaaagctctaggtagaggcagatgcatccctcggtgtgcgttctggggctgaggactggctgctgacaccccgggcacaggtgcttgatagggccagggcgttgctctcgaacgtagagaggactcgctggctgttgtgggctcgtcctgaagaggcttaagaaacctcaccttaggggccagcacaggtttgcacttagctgcattcacttgtctgctctgattgcctggcctgaacgtttttgccctacggtgtcttataaatctaccaagagtacaagtacttcacttcttccaatcaacatgaaacctttggatgggcttgggatgggatccagggaggggcacagtctggtgttgcacttgttagccctgtcatgtgacattggtgagagcatgggggagggagagcaggtatgagcagatgggattttaaatgagatcaatagtggataatgcatatgtaagttatttggaaactggaaatttccatttaaacaattattgggcacggcggctcacacctgtaaccccagcactctgggaggctgaggcaggtggatcaggaggtcaagagatggagaccatcctggccaacatggtgaaaccctgtctctactaaaaatgcaaaaaattagccgggcgtggtggcgggcgcctgtagtcccagctactcgggaggctgaggcacgagaatcacttgaacccgggaggcggagcttgcagtgagctgagattacgccactacactccagcctggtaacaaagtgagactccatcttggaaaaaaaaaattgttattaattataacttcttaattttattttttctaatggggcagtagagttctttttaggtcaaggtatgagctgaaatgctttattccattttctcatgaaaacactgttttgagatgagattcctggtcattctgccatctgccagccacaacggcatgagtgaaaaggcaracgtttaccrctccttaattaaaaccacagactggggaaggcggccgggtggggacyggcgtggcrtccygcggaccgcgtggagtttggggtgtctgacatcgttctccacgtggctattttcagcgttctcccggggaagtacttggaagagatcgccacacagatgcgcacgcacagcatcaacgcgctgctgatcatcggtggattcgaggtacgttaccgtttctctcttgccggtcttgcaggtgtgagccgcgccctgtgttggctaaacattaagytacttgttggctactgsccacgatccgagatgataggttcccagacccagcggccactggagaattgtagaacagcaggatagcrggtggtaagacgtggcctacgagtggcccagttccagtaaagcaacttaaccgagaagcaaaagcttgactccttaacccgggcctcatctattcagtgagctcttaatgtatttcaggcctgtggaagtaattctatctcttgagtccagagtccagtggctacttagagactaaggtagttatacctagaattttgtttaaaatcacatattggactgtagaccctaatattttttctattcatgaagattagtcycatggtaacctttccatttacttttagaaaaagtaaaaactggccgggcgcggtggctcacgcctgtaatcycagcactttgggaggccgaggcgggcagatcacctgaggtcaggagttcaagaccagcctgaccaacatggtgaaaccccgtctctactaaaatayaaaaattagccgggtgtggtggcgggtgcctgtagtcccagctacccgggaggctgaggcaggagaatcgcttgaacccgggaggcagaggttgcagtgagccgagattgcaccacctcactccagcctgggccacaaagcgagactccrtctcaaaaaacaaaaacaaagtaagaacctcagaaatgagactcttacccatgagaggtttagtcatctaacygatcatgtctgtcctgcgccctttgtgcttacaacctgccgatccttgtctgtggtcttaaggcaactgtgtgttgatctcggagtgttttcgtgatgccccagtgtgctccctgcgtgctgtggtggaggtggcgctcccagcctctcccagcgagaccccctcctccccagcttccctctcgccccacaactcccacgcttgtctgacaggcctacctgggactcctggagctgtcagccgcccgggagaagcacgaggagttctgtgtccccatggtcatggttcccgctactgtgtccaacaatgtgccgggttccgatttcagcatyggggcagacacygccctgaacactatcaccgacgtaagtccgtgtgcgccctgccaggcgggcgccggctgacgctaaccccggggccccggccctttttatctaccagtgcgctagaaatagccttttacaaataccctgaatgagagcttctcgttctttttttcccccagaaaagtatgttttaagactctgaaaatttttgawctcactcccagaragttttaccacctcttcttctgtgtggccaccagggggacgtagtgtggccgagactccaggrgtgcccgtgagcacccgaggcgctgaggagggctgggtygcagtctcctgtgattgtaccagcattaaaaatcrcttgtgtgtgtgtgtgtgtgtgtgtgtgtgctgagcctaaattttctttgagcctccaatacccattatgatgaacccctgccttgatgctgagggtagaaattgaattgaatattttataattttattcattgccctgaatgcaccattgcatttgttatctctctggtcttggctgttgacctcattttcccctttgtaaactggggatgttaaattacctctaaggcaataattggtgctactttagtttttttgccaagagacaataataaaacatagaaatatattcttctttttttctttgtgggacggggtcttactctgtcacccaggcttgagtgcggtggtgtgatctcagctcactgcagcctcgacctcccgggctcaggtgatcctctcacctcagcctcccgagtacctgggaccacaggcatgtgccaccattcccggctaaaagaaatatacacctattcccatgtttgtgtgtcacgcttggtaattgaygtgggagtttgaagatccgtacctaacacagaaagcatttcattttttwaaaatttgatgtctaaaagtttgtagtaattctcaagttttaatttttcttgtgagayttggttctcatgaatatttttcaaagatattttttcttgtaaaaccttggcatgaaacttatttctagcactggtaaataaaaaaacaagcttttaacatacagctcatatggtaagtaatgcttagcactcgtttcttgcttttctgagcgttttaaactttcttcactttctttgcgaaggaaacctgcccaggttttcctgtgttcactggctttgggggcaactttcaccttatttttggcagttgctaatctctgacctagacgttgcttctgttctcctggtggtgggtgtcacggctttgctgctgcggggctggcccggctctggaccgaccttcgcactgtgaatgtgaagatgagcctctttcacagactggattccgtcattgctttcactgctctttcgcctgctttagctagatttttgggtctgtgaaagttgggtgtgcaatgggagggactgaagcttcttttttccctaattgttacctaattggaactcgcccagagggaacgggtggagaatttgagagcggtcgctgcagttagctgagtttctttttaattccagggtcctctgctataaataactgttttttttttttttcagattgtaaatatgtaacaaatgcatagggtcaaatttatgaaaaccaaaatacgtggggcaaaaacaccccacaaatgatcatttccacctgcttttacttcccttggagggattgtgtgatttattatgcgattgttttaaatgcagtttttcattcattcgagtttctcgaagctagkttaaacaatttctttttttttcttttytttytttttttttttttttttttttttggagacagggcctcactctgtttcccaggctggaatgcagtgctgcaatcgctattcactgcagcctcgacctcccaggcttaggtgatcctcccacctcagcctcctgagtagctgggactacaggtgggtgccaccgtgcccagctaattttttgtatttctatagagacggggtctccctgtgttgcccaggctggtttcaaaacgtctgggctcaagcaatccccgtcttgggctctcaaaccacaggggttacagggatgagccaccgcgccgggcctgaagttaactgattacaatgtctgagaaagaactggagcgtgtagttagttgagcctcccgttggccaggcacagccaccttggtaagtgcatgtgtgtgtccttgttgcccttctgatcctgagctccaaggaacaaggctgtcttgggagtgcggtggttctagtctcgtgatgggtgagtggcgccgtctgaccgaggtcaccctggcgaatgctgtggctgctcgggagctggggcagagaagagaaagccgctgagggtccctctgtggaccctgaagggagagggaccgatatgtgaacatggcagctgttttctccagagccctgtttactgacggccgaacagtgtgaatcctgagaaggtttggatttgggtctgaactgggctcgtctggccatagaagaacatgagctggtggcgtcctcaggaaatcagggtgtgaggcaactggacgtggatggctccgggtccccccggccactgtcctgaagccgccggaggctgaggacgcatgggagtgagcgtctcttccctgtccggccacaccctctgtgactggtgactcatggcatggccctgggcagcatttaggtttgaggtctgtagatggctccagtatactggcttctattgttcagaaaatttggtgattctcatgggggcaggggtggtgattttgccccaggggatgtttgcaacgtccagggaggtttctggttagaagtgggaaaagggatgctcccagcatctggggctggagacaagggacgctgcggaacgtccctcagagcacagggtgggctccataataggagtctggctcaggatgtcgccgtgttgtgcttcggaagccctgggcggggctgatgtggtgaagcctcatcttctctggacacgtgcgtcctcgtcctctctcatgatttccttcttgccagcattgatgcttagcccctcagaatctatgcggtgctggtgagtggtcctccgggcagagcagaaggaatgagatacctcagagccggtgtgacacgttctcaggatacggctgcagggagtttcagtccgaccctttcattccttagcactggcccattactccgtcctgtaagctcgataaggtcacatcagaagcacagtaagctgctgccacgctgccgtcagctgccgcgaaggtggcagtgaccacagcctcgtgactgattcacagcctggctgcgcttggtcttgagaattttatgttttgctgggcagggtctcccccgtattgaagcttcccttcccttttttggagactgaaggaaggaaaagaggagtgatagggaagaggggagagaggatttgcagcattgtggctgtccccacagatttcaatgtggagttaaggtgccaagacccccacctgccctcctgtgtgcctcaggcccctcctggtcccaggtcacccacaccgtctggcttccagcgagcgcttctcggagaaacagccagctccccacagccagtcttggtcagtcctgagctcgggtactccaaagtgaagtgagcgacatcacctgtctgaaaagcataaggagactcccacgtggcggtgctgaggggccacatcctgggcaccaggccagccagtgccccgacatgagtgttgctggccgggaagcagctggcatttggattgaagtcctgcaaaaactgccatggccagagcctgccaggcagagcctgcacagagcggcccaagagctgggcacgtgctgggcctgggtggatgtggaggctgtgccatggggcgcgggggaccctgctcacagctcaccttgtggtcacccagcactgaccctgctcacagctcgccttgtggtcacccagcactgacccacccgccccaccctcctatccaccrtgctgtgaactcacctgccacgggtctacacccactgtccgaagccctcggcccacacgggctccaggccttgggatgctttgcgttgcaccagggctgcagagcccagatcgctcactgtccgactctcccagggaggtgtgggcgccgccctgtgtcccaccagtagcatttctgcagcagatgtggggatattcacagtaagacggacacgtccaagaccataaatagttggttttgccaccacgtggatgtcaaaaacaccttgctgtgtggggccacttggaggtgggaacagtgggcgtgtggacctgtcctgctgtgactttggttaacaccctgaggtggagtctgaaaaaccccggtgtacacgggctcaagaaccgctcccctttctgataccggagcgcatttcccagtggaaccccagagcagcaactcaggttcttgctcgcctgtgcggctttgtgtgcggcttgccgagggcagaaacggcagcttccgcccggagagcagagatgtggcgtggggctgagtgtggcccaccggtaatccagctgcatgcccccttccctgcctgcacctgggcgccgcctctgcacgatgaaggcrggcatttggtgtggtccttacagccgtgtgccccatcccactgatccttgcctgcctgcagaaagctacaggattggctttgcctttaagtgtcctgactgccctggcctcccttacctaccatgacacgccgagagctgagctgtcccactcgtgactaactcgccgttgcctgcaacctgctccgttgcctgcctcacacccaccccgctgtgctgcctgcaggcaccccctttcatgaggacctgggctgtgcccaggcggccccctgtgttgytggggcctgtgctgctctcgcacggcctccagagcctccctcggccccttgacccgcatgaaccggcttcccctggtgactcagtcccctcccgtcccttcctggacctcagcacaggccctggsgctggcaggtgagcacccggcacccccgctaaccgcttggccctgctgcttcaggcttacaagagtgcgtgcgacatggccgaggcacgaggccgccaccaggagctttgcatccccctgtgtgtggtgccggccacgattagcaacaatgtcccaggcacagaaataagcctgggctccgacactggcctgaatgctgttgttgaggtaagagaaccccgtttcctcycrttgcttttccgtcatttattttagcaacttgtttcttctgtgctaaggatgagccggatttattcttcttcttttctcccctttgttagcttggctttatgtcacactggccagaacagggtaaaatttttttagcttctctgccttagggagagcctgtctttattgattaaaagtgagatgatatatccagtccttgggatcgtgtttctatcccacctagactaggggagccgcaggtaccattgctctggaggctgcctctcctgcccacgctgagtagtgaggctgcagggccagctgtgggagcctgcaggaaggggtgtaaatgcccggtaagtacgagctccaggacagagccgtacccactgggggccgctgcctggaaaacagccttcctggtgagacaagaggctctttagagagccgaaatcacaccctcctgggcaggcggtttcaccaacatgtgccttgggaggggtggattctgccagtcgtgggtgtggtgctgacacccgcatggtggcccctccggtccctgatactctgacctacctctatggtcataagctggacatgaagacctatggtagttccacaggcctttgctgcagagacggtcctcactcagctgcagacaggacggtggccaccgtgacatgtggggtcacgtccgtgacttggccacctggtgcgagggacccacagcaaagcagaactgctggccggggtaggcctgcatcgcgtgcggggacagcagccactggcctttaccttacatcttgacgtccaagccagctccggagtttgcagtgaaaactcccagccctgctggagactccttagttcagcttagcacagaacctcggaagacagcagttctattccgggtacttccttcagagctgagttacagtgcagggaagggagcagaggagccatgaggtcggctgcagcttcctgtgcgtccgagcctcagcctcccactcgagctgaggggcgtgtcctggccatctctctcctgggcttctccctgtgttccccagtgctgtggtggtcttgcagaggctggccctggctcattcccaggacttccttgggccccgcacttgacccctgttgggtgaatgccattagggtccggccatcgctggcttcactctcctttagcaccttgtagatgtccatgcacacttccaccctcgcgccccacacgcgacgcagccctaccctggccagcagctgtgctttgctgcgggttccttgctgtagcagggacaggacccccaccccctgtcccgtctggccaccgacttcagcagaggctcggctgccgtgagggataccagtcatgggaaaactggcctccctgcagattcacagagcaaggtggttctcacagagaagtcagtggcttttttctacgttaatgctgtagcaaacgccaccttttctttcaccaccaatttatatttcttaacacccatggagcaaagtgtggtgatgtttgaactgtagcctggggctctcgctcccatgggactcctcggggaatttcycagcagcaggatcgcctctgygtccttgcagggggtggcgtctgctgggggcacatcccatcgtgcagggggaacggctgaggtcacaggctttgcctgacaagtgccactcacrgctgctgtccacgtgccagccctgggacacagccctctgccatccttccacccactcggaggccagggaggcacctccgtgccacactgcaggcaggcagggccgcgcttgggatctgccgccttcttgtcagtgctgctttgactaattgcctgaggcacggccggagtgacttgctatttttagaagctaattcaggcttcagatgccatctaggtaatgaggagagagttcaggaaagctgtatctaagctccagcaaaggcggcctcttccgtaccagctgtcgctgcgtttacactgagacgagcacacagtcgggggcrtggctcaggtgtcagggctgcgctgttccacagccccctggggcagcctggcgggaccagaactcagacacgcctgggcacaaatcagcctcttgggagagctgctttgcccgcagaattcttttgccattaagcggttgatgtcattctttgaatgagtgacagtaattccccacctcagggtgggctgcgggggagattcagttggaaaagtaacccatgaggttttgtgcctctgggggtcctgaggccccacccgtgcctgggattctctaagacaaaggasaagtcttaaagccttacagcatcttaagtcttagatcacatttagagagaccyggtacaggtggaacagtgcaaccctcagaattctgcactggcccttcaagaaggcagttgtgggctctttggacccttgacggggatctgtcctctgtcctcctaagcacaaagatgggaattcttcccattgcctgtttctctccccatctcggcttctacacaatgcaaagtggcccgctaactagagtccgtgttcagttttgaatacatcaaccaattattttgggaagaaaagaatctgccaaagaaactggaaatacagtttggaatcatttaatcaagcctgcatttattaatcaaagtgcacttttagatttcatccgaagtgctcaagtgaacatttcccaatgggtgttaaacttgggtgcacagactctcacgtggctcctagtctcaagtccacaccccacttcatgctcttactcttggctgagtcccatggaggcccgttagggaatcctgcaggatcagccgttgaccaggacggacggacggctggctggggaataccatgcttatgtcattcagagacaagcatttcttgagcgcctgctgtgggggctcggccgggtgctgctgatggtgcactggtgtaagcccagcccacagttcctgtcctcatggaatttgcagcctagtgaggaagatcctcccaagtcaaataaccacaaggtaactgcagggagagacaccgggataatttctgtgaagagaggacatggggtggctccgagagcccctgacagagggaactttgtggtcctagaaaccaggtggtgttttcctgaggaaatgacattttcctctggatcagagctgaggaaggtgcctctgtgtgtcccgtggccgctgtgacactgaccacacacctggggctggaaaataatactcactctcccacagctctggagcgcaggagccatgggctgaggccagaatgtttgctccaggagcgtccctcgtggyccgttcaggtgcccagagttgcgggccttgcacgccttgtacgccttgttccctggcgcctcctccytccatgtgggtgtgcagcatcccgctccagggccttcagcctctgcgcccctcatctgctgatgcaggtgatggcatttarggcccacctgggtactcctaggattcacctttatcaccgcatgagggagcattcccaggttcyagggattagggataggactgggattcctttggggrctgctctcccgcccaccactgtgccrgaatgtgatgcacacagcggccagcatatccaaaggccccaggaggacctggggtggctggaacaggacctggtgccgggagcaggcggggcyggggattcccgacaaaggcttgatgtgtacttgaagtgagcaaagggttttgaataaaccaagaactggatcagatttatgttttttatagatggggtcctttctgtgtgaacggattggagggtcccggggtgggagctgaggcccaggaagagggcgttgcagccggactgatgtatgggtgggaaggcggccgatgcatttctttgccatttttctccccgccgagcttgggtcctcatggagggcrgatggcagacatttcactctgggacccgatgcctgtgcatctggaagacttccccaggtgcctgggtctaagaaccaccatctgcctttgagtagagtttccataaatgtaacattcgccaatggatggaagatggccgcacctctaaaatcacagggagcttttcagaagaaaatagaatagcacagcggttctcacggactaagctggcaggggacagtcccctaacatctcagctaacacctaacggtgtctgtgtccggtgaaagyggcttcagcagggacagtcacagagcagcgtggagtgagctggcttgtggggtcgtcttttccgtccccttctatggggcctgggagaagggagcggcagatggccaggcccccaaaacgggacatcgaggtcacctccaggtggctgccatggtggggttgcgggggaccacgttcacacccactccgagggcacatccyggctgctgcacacccttcacctctgcgggatgctgggaccgcatgtttgggcgcggtgggggggccttgctgcactcactcttgggggagctctgggatggtgggcgcgccccgggcctgggctggagtgactgatckcttctctgtgaccagacctgcgaccgcatcaagcagtcygccagcggaaccaagcggcgcgtgttcatcatcgagaccatgggcggctactgtggctacctggccaacatgggggggctygcrgcyggagctgatgccgcatacattttygaagagcccttcgacatcagggatctgcaggtatgtgacggggctggcctcagggcccgtccccttgggatccactgggtgctrcggagtgaatcatcgtgtctagggtggtttgctttccraggggcatggagatggagatgctacagaacaygccacgcttgatacacttcgcatcgcccaggtgcccctactgcgtgtcaggtgacggygggtgtgcctggttgaggacaccttctagtctcatgtgtgaaacacaagcgtttgtttgacrtagtctgttgtgtagttaatgttgtctcacttaygtcaycaatgattygagaacctccgctgacagtcaccacccacgtctgcgacaggctctgaaggttgctgcagcttcttttaaatcctgaggcccctgatgctgcgtctgcctctaaacggacacagacatgaccgtggtttctcggcatctgtggctcttttagggaagggtgtcgctgaccccgcggtctgcccctgcttggacgacacagcagaatccaggcctggaccctgcaacattcaaagttgctaaacttcatgcaagatgacaggccttggcagataaaatgcaacttgaacaattgtctttatttagagagggagtcttgctgtcacccaggctggagtgcagtggcgtggtctcggcttattgcaacctccaactcccaggttcaagcgattcacctgccttagcctcccaagtagctgggattacaggcacgtgccaccacgcccagctaattttgtatttttagtagagatgaggtttcaccatgttggtcaggctggtctcaaacttctgacctcgtgatctgcccacctcggcctcccaaagtgctgggattacaggcatgagccaccgcgcccggcaccattgtcttttaaaaagtttggctcagaaacaagtaacatcctaacagatcaagtaaaaagggccttggcactaattatgtgacatgtgaatcacgaatttctttaccatgtcaaatatttgtggagtcattcactgcatcatgatgtttctgtcaacagtgggtcccataagattataatggagctgccccaaacaggtgcagtttatcttttataaaaacatatctttttacatatatttttataatatatattttataaaaagatgttttttatcaaaaaatatgtatctcttactgtgcttttctacgtctagacatgtttagatacacaattgcctgcagtattcaacagtcccagacattcaggtttgtagccaggaacaacaggtgtgcagcaggctctgcctcctgggtttgtgtgagttcactgtaggatgtttgcgcaaggcttaagtcacctagcaatgcatttctcaaggaacatatccccctgttacatgactcatgaccgtatttcagaaatctgtccaaagatcctgcctcaccagcgctcagcatggcaagggcttaagagaaattatgacagatttttattttttgctttaatttttgagatggagtctcgctctgtcacccaggctggagtgtagtggcacaatctcggctcactgcaacttccgcctcctgggtttaagcaattctcctgcctcagcctcccaagtaggtgggactacaggcacctgccaccacgcctggctaattttttgtatttttagtagagacgggggtttcaccatgttggccaggctgctctcaaactcctgacctcaggcaatctatccgccttggcctcccaaagtgctgggactacaggcatgagccaccatgcctggcctcctactttgtgaaattctgccattgcgcccagtgacagatttgattagatgtaaaaacctccattttcttaggatgaatcattagagaattacctccctcttgtaatcctcctaacatgatctgaaatggggatgttcttactctaagaccatcttttccttaagaaatctgtgtatgaatgtgagtctacaaaattctttggtcagacactgctcatcaggccgtcacatgagattccatagaaaggccacaggtcactctttcctctgagagcaccgagaacatcgtcatgcaaataaacaaggagcaatagagccatgaatgatcactaggcaaagcacggaattaccattttcagagggaccctgttgactctggaaggtgttgctagtggccgccgtgagggctgctcaccgtgccctgtcctcagcgttcatcgctgcagacgtgtcctccctatctgggaggaggctccccaagacccaagccgcgagagctgcagcctccttggccacgctcactgccacacttggttggcacttcccagcctgcagtgcctggcacacagtaggtacttagtagaagtttattgtctgattaacaaaatactctcttccagtccaacgtggagcacctgacggagaaaatgaagaccaccatccagagaggccttgtgctcaggtgagagagasagaccaggggctgatcttaccctcaccgccacaccctggttcttagattctagtctgtgacttgggctggatgagtggtcatttctttgccgctagagtgcactacacacactgagcaggtgcagaagacagctgtggtgcattgctctaaaggcttgcctgcatttagacaactaatatttttgctttatagtctcttattctttgatatcttgcaatcatttccctaattagcacctgatgtttatgaagaaagaaggaaatacagtcatccctcttagcctcagggactgtgtcccaagactgcagtgggtgtctgaacctggggatagtacccgccccctgtatacacgaggttgcttccatctgataaccaaggyggctactgagtgactcgggcaggaggcacagacagcatggagacgcagggcacagggatgattcacgttctgggtgggacagacaagagagcacgagatttcatcacgctactcagaatggtgtgcaatttaaaacttacatatttatttctggaattttccatttaatatttgtgggcctcagttgaccactggaccatgggtaacaaactgcagaaagcaaaaccgtgaactggagggactggtgttgatgtagaatcaccatagggttgggggatgcgggagtccagcctcccagggccatctccccaagcagggagccacgtgcccactgcasgctaaacaaagtgactccttctcgctcgtttcagaaatgagagctgcagtgaaaactacaccaccgacttcatttaccagctgtattcagaagagggcaaaggygtgtttgactgcaggaagaacgtgctgggtcacatgcagcaggtaggcccgagactgcatgaggggccacaaagccmctgtcatgtgacttttaaaagattagtgtcttattttagccattgtggggaaaaatgtataagtaaattccaagatgataaaaaacatctgaactttttgagacagagtcttgctctgttgcccaggctggagtgcagtggtacaagcttggctcactgcaacctccaccttccaggttcaagtgattctcctgcatcagcctcccgaggagatggcagtayaggcacccaccaccacrcccagctaatttttgtatttttagtagagatggggtttcaccacgttggccaggctggtctcaaactcctgacctcagrtgattcacccacctcagcctcccaaagtggtgggaatacaggcctgagccactgtgcscagccaaaacatctgaacttttaagtgatgccaaacatcaccagctttaggattcttttgttggtgaggtttgagtaatggggattttaagggaactgtcagctttcatgaaaacagtgatacccccattacttggaaatgcttattcaaattaaacacttcatcaagttaaaaactggagcttccctaagatttaaaatggattatcagacatgtagtatacttgacaccccaagtcagaatgacctggaatgagctgcacacaggcacacacgtgttatgagctgagcctgggacacagggtccaggcctcctaacttgcacayactccttcctcaccacctcctattcttatacttttaagccagagcccatgaatcccctgcaatgatgatgaaatagtaggcatatgtgtgatcttcttaaagaatccacaacggttatcmgattaaagctgtgacccatccccagytcagatgagttcatgaaatcctgatttaagattttaaaataatgaagattgttagttgacttgttcrgtttattaaaatcctcatcttactgagcggggrgaacacttgatactttttcttaacaggccaagttcaggctacgggaatcacaggttttgttctgttccaactataaggacctagaaataaaaacatgaattctgcaaaatagaaattgtcatttctatttaacagcaaagtgttactgtataactggtatttcatataactctaaccaccaacagggtggggcaccctctccatttgatagaaactttggaaccaaaatctctgccagagctatggagtggatcactgcaaaactcaaggaggcccggggcagaggtaaggggtctggggagrgaggccacagcctygtgatgcaggccgtcctgccttggtgaaaatgctgtcctatcggggagaagtagggtgctggttccttcttcagttcagtactgagctgcacgtgatgttttactcctgatctctgagtgttgctatttaaccaaccttggattcctgggataagatcagcttgggtatgacatgttctcttttatcactgctagatgcagtctgcagttcttttgtgcaggctttttgctctagagatcctgaacgttggccagcaatttcccctcacagtttaagtggggccttctattttttgaatgtttgstaggacaacctccttgtgactatccatcaaaacttccagttttgaggaagatctgactgctgaatgaattgttcatgtttgtagaactgcatgttcgtagaactgtgcatgttcttccttaaatcagttytgtaagttacatattctaagaaatctttaaactgaagtttcaagaaacatgacttttttataatactcttgttaatggttccaacatggctgttccccactcattcctgagtggctctttgtgccagcatctttctcacccccacccccctcagctttcttaatcagtcatagcagatgtgtgcttttattccggcaaaccactatcactgccagtgtccaacttagaaaaatgacagtctataaaraccagtgatgtgaatagtttcaatgggtttgtctttttgaagaactgactttggctttgattctttctacagcgattttcttttgctaatttagctatggatgctttttgcctctgtgtgtgtatgtgtgagcataaattagtgtcctgctgtaatttaagctaatttccctattmcactatttagtgaaaaattctctccactgggaggaaaaaacaaaagctgctttccaggaagccctcrgggcagtcccacaggagcagagctgcacgaggccaggtgctggccccactgcgcggctgttctcagtctcactgggcttccaggccrggttcagcatggttctgaggaatctcagttctcatctcgccccgtrattctgctccccvayctgcccatgttgacagggtgttattaatcttttttaaaatcttttataggaaaaaaatttaccacygatgattccatttgtgtgctgggaataagcaaaagaaacgttatttttcaacctgtggyagagctgaagaagcaaackgattttgagtaagttggctgggttccctgaggcaataagaccccaatgtgagtwcgggacaggggaatggccattgctgttgctgtcggcaactcattcaggggtttgaggaactggcttttctgaagctcagttaaaaaaatactaggtcttggctgggcgcggtggctcatgcctataatcccagcactktgggaggccgagacaggtggatcacaaggtcaagagatcgagaccaacctggctcatatggtgaaaccccatctctactaaaaatacaaaaatgagccaggcatggtgatgcacacctgtagtcccagctactcaggaggctgaggcaggagaaatcgcttgaacccgkgaggcagaggttgcagtgagctgagattgcaccactgtactcaagcctgrcgacagagmgagactccaccactgggtcttcgggaataattttaaacaatggtttcatttgatcctgaaattggctttatcatctagttgattcagccgaccctacaaaccctgtgtttctggcaagaccgctcgctgtgctggccaggcggaggcatctccygccagtgactgcaggcctcactgctgtctcctcttacctccacaggcacaggattcccaaagaacagtggtggctcaagctacggcccctcatgaaaatcctggccaagtacaaggccagctatgaygtgtcggactcaggccagctggaacatgtgcagccctggagtgtctgacccagtcccgcctgcatgtgcctgcagccaycrtggactgtcwstttttgtaacacttaagttattttatcagcactttatgcacgtattattracattaatacctaatyggcgagtgcccatctgccccaccwgcnccagtgygtgctgtctgtggagtgtgtctcatgctttcagatgtgcatatgagcagaattaattaaacatttgcctayaactccaacagtcctctgttttagttttttaagtaggagattagtacctcaatctatgggtggctactaaaggttttctcagttttgtgggcaaactatgcacacgtcatacaaggagaacaaagccaggagttcacacaggccaaggggaaggccacgtttactcaccgttccatatctgccatgtgtcagtttccatccacagcagcaggccgggaccctgggcctcgaccccaggctcctgctctcctttgaaagtaaaacatgaatcttagttacttgtcctcttgattgcaatcctagctgcatgttaaaaccaccaaggggtgggtggggcggcggtgggttcaaaaatctgatagccagcttctcctccaggccaagccacagtcctcgctgggacctaggttggaactctccggaagactcctgccagagtagacacggctgctgggatgacagccctgctgccctggtgggcccccctcctgtagggacagcgtttctgcctcttagctctagtctgcaagagagaacagctgcgcctcagaaatgggggcagagagctgggtggagggagaggagaggccaaaaacaaactctgtttgggaaatcagagtccgacagccaagaaagagctagcgcggaggctttcctttctggctctgtaacgatgaagcaagtgcttgctcaccccaacccacttgcttctcaggacggtttccatgcagccgccgcggtgaactcccgtctggtggacactcccccagggcctcggtgtgatggagtttcctgaatcagcgcaggcagacgtgggacacccttgtgcaccttttcattttacttctgtttttaaataaaggccctaaatgctgcttaaaataatgactcaagcagaggttaagtcagagttgccctttatttttagattcttaaatattctagaatgaggtaaaacgagcctgccagtacaaagtgaaaattctacatggtgcatctttggcgcttcatgcatgattatttcaatgaacctcttcctggtcactcttaagatagatctgagtttttgactcgccagtcaagggctttggcgacactcaatgacataatattcttggaaaaagcagtagcatttctgacttttcatattcagctcggaggtgtattgtctcgggctcctgtgcagtcgagcrccacggctgctcatcggatgatccaggatgggtccttggcaattttcgggttctcgggtccgaggatggccaggcygtgtgtgctyttcccagtgccgaggtayctgagaggaaggcaggcgtggtcagcraggactggcttctgcgtgagcgctgttagagtcagcacgagggcttccagtcccagacgctgtctcccccgctccccactcacctatcgctcacggccaggagcttgtcgtggctgacagcaaagagctgctctctrtgggcctgcttcatctcatccgagaggccgtacaagaagtggtccattcctagaagacaatccacaggcacgatggagccgctgcccgggagctcgcgttgtgggctgtgcactcatgtcccggaggggacacaggcatctcactgtcatttcacgtgcatgtttcaaccacagggatgtgtctaacaacccagagatcacaccccgacctccagctcccacgtgccacgctgacccctacccacgcctgcttctgcagcagggatgcagtcagcgccrcgtgaggctgatgatgctgtgagcaaaagcggctccagagagtaacgtggccatgcccrggccgtgcccacgtcctccttccaccctaaagagcccggacactgccatgggttggccccactgggtctcaggtcagtaaaacaaatgacaggatgcactcttctcgcccggatgtcaggaagcgtgtttagggtgtcagacgtggaaatcgtatcacaagcaaggatggaggcaccagaagctggtgctcctgcccatgcatgccgggaacttggaaaacagcaacgtcatctgtgaggctgtgggttgagattctcactgttatactcaaaatacctttgtctgaargagcgacaggagcatctayggttgagaagacagaaagtttggcttcgtcsatgtcttgctgtgtgaattttccagacttagcccagtcgacagccttcccaaaagactggagcgtctctattgtatttgggtccctaggaaacccagagaaataaacgggcaagcattttaccaatggacaagtttatgacaaacctctgtcgacttaacagttcaacatcttctatgggttaacagctctattttatatctgatttagtccaaacagcccactgacaaatcgctcaattactctcaatggaaatttaaatctgatcacataagcctttcaacatgttctccctcttagacaaggtctgtctgcacaaagtcctccctagattatttaaatacacttctctgtgacctcatcaggagaggaaagtcagtggagggtaggggcaggtcaggattacagggaaattacaaagacttacatggaaaaattaagcaaacaaaggttttcctttcatctccctgaagacacacccagggtagtacaggaatcagcctgagggggccaatccagacttcccttcgtgtaaatgcaaagagcccagccctcccttcaccctgagctgcagaggggcggctgtgagctgcttccccatccttgtctagaagcatggcttccagcacagcaagggggagaactcatcagagtggcaatggctacctacgtatctacctacatgcctgcctacctacctaatctagctatgcatccacgggacagggtctcactgtcgcccaggctggtgtgcagtggcgcaatctgctcactgcagtttcaacctccccaggctcaagggatcctcccgccttagcctcctgtagctaggaccacaggcacttgccactgcggccggctggctccttcttaaaaactgttggaatacatgttctcttaggcagcaaagccatagaaaatcaagaatattgctttacagtaacggtgttatgtttatgaaagctaacagaactgcatccacatcaggcacctccaactgaaatgagctaagaacgctctcaggctgtatcagccccctcacctggggcctgtgtttcaggacccccacggcagggctgcaacctcagacagccactatggatactatgtttttttcctatacctatgataaagtttatagattaggtgcagcaagatattaacaaaatacaacaattatactgtaataaaagttacgctgatgggctactattaagtaaaacaagggttctgtgaacagaagctcttggatacccacagcgtatctgatacctagacggctactgggtgaccaacaggcaggtaccgtagacagcgtcagctttcatcccactgcttagaagaatggtgtacaatttaaaacttaggaagtgtttatgtctggaattttccatttaatattttcagaccgagggkgactgtgggtaataaaccatggaaggcaaacccacggatggaggcactaccgtgttctgccaaaatatgctggctgaagccagggtttactgaaggcagaatgcttcctgtttcggctgctggccctaatcctcgcgccagaaaggacattgctgggtgtggctaagtgcccaaggagtgaaaagaagcacacagaacaacttttgtctaaaattcactgcagtagaagaaaatgacactgataatcatgagtagaagactaaaacgacgtgtgcatcccaatgtgtgaactagagcaaaactcacctgtaagagtaaagggtgaaaatcccattgtggctgagttttgcgcctccaccataagcaccgcctttttctcgaatttctgtatgcaagaatttggcagtcatcaaacgtgcaaggattttaagactgaaatgattaaaaaatgcaagttaataccgtggctgataaaaaagcatagacaatgaagtaattgttggattaagtgaaaatgaaaatcgagttgtaaaataatgctgcataaattatggtcccatattttggtcttgttttttaagagatggggtctcgctctgtcgccaggctggagtgcattagtgcaatcacagctcactgcagctttgaactcctgggctcaagggatcctcccacaacagcctcctgagtagctgggcctacaggtgtgtgccaccacgcctgactatttttacagtttttgtagaggcagggtctagctttgttgcccaggctggtctcaaacacctggcttcaagtgatcctcctgccttcaaagtgctgagcttacaggcatgagattttcttttcaattaaccaaaactaaaaagcacaaggaagcacaattttcaaacagttggcttagattacagggttgaagggagaggtggtggggagggaatcttaacacttccagcaccacactgcttaacttgttccaatgcacatgtggcatttttaaaatctcgtgaagtagaaagaggttatttctattataaaggcaaatgagcaaatgaacatttatttaaatgtctcacatcagaatatggaaagaaaggaaactgaagtgagttttataagaatcccttaagaaaacacacactctctgataaagcacatttctaggaacagggccaatttcctctgccttccactgtgaacggtaacatcacattcaagctgattctagaacacatccacctccgacagaaggcggggcagacaatgatgggagggtctgcagcacagacacaggctccttgaagacgcccgtggtgagatcagccccaggtcgccgcttccacagacaggccttttcctaaagtggatgaagggagtcaaataggccaggtgggaaatcaaggaaggagtgggcgtgttcccaggggctgtggtgggagaagtcacgaccatctcgtgtgggtcctccaggagaaacccagcgccactcgggtggctggggcgccgtcagccgggactagcgaggctggagtcagaccctgggggacggagtctccaccagcaccggcagggatggcgttccatccgtccacacattatccttcctgagaaatttctattacttgtatattaaaaacatgctcacttttgaaagattataaaatacaaaacacaaggaaaaaaagatctggaatcccactgcccagggggaacctccacatttttagtgttttctgtctacattttcctgttggatagtggaaacagacaccactcttctgccggcatagcagacagatctgttcatcttctacaaatatggaaataaatgaacaaaacagctgaccacatacttctacagccagctctttctgggcccccactgcagccccacgtttcttcccgcctgcctcctacacacctccccatctgtggccctctgtgacacacgtgcacctcggaggcccggctccttctccaatcaggacaggctgcccaggcctaagcctgccttccccctctctaccaggctcactccttggtttagtccctcatgggggtagctgcctgggacaaggacacaggaagtgaatttccgggatataacatgtttgcacatatctgtgtcatacacacccaactgacgggtccccaaaggtgcacgtctgtgagtctgtcctggtctggccagtttccccagatgggatgaacacagccaaggggcagccagagttcggaagaaggggctggagggccagtctgtaggctgcaaactccctcgccccacgccactttgggaacaggcctgaccctgactcttggctgtggcttcggctgctcaacccagggcctccttccctgagcttctgacttggtggggagacaggggagacaaactccttagagggactgtgaggcggcctccagccctgccatctgcagggctctgcagga

SEQ ID NO: 95229 - DNA, 50889 bp, Homo sapiens
ttttttcatgaaagcataactactagtcaaatatattcagcaaacacttcacttaaatatattctaatgttttaattctattttctaggtcctatgagtgggtttatctgcatcatgaagcttgttttggacttttaaaacttcctgtctgtcctagatgacagcatctataaagaggtactttaaaacttattaatgataatgacattcagatttctaaatcaatgtttctcataataaaagtggaaaagaaggaagatctaaagagtttaatgaagtcagtgaatggattcataaattgctataagtttaaaagctggtaaataatatcctggagttagggtagaaaaaaaaaagagaaaatgatactttgtgttatctattaaagataaatggacctcagaaaccatgttttctaatactctcagcttatagattaggatattgaggctcagaaaggaaatactagaatcagcagatatattcctttagatattccagccctgataacattctggcagctgtgaaattttcccatggcaagtagaaggattggactaaaatgtttctcaaaaatgtcaatgtgatgattacttcaagttgaggaggagtgcaaacctgaatgccagtcatgaaaggcataagcaacataggggcttggttatggtcgttatatcctagaccatagctctatctcaaggcagttttctcctgtatccattttaagtgagaggctcctgtttacccaaggttcctaaactcatgtaaaaactcagattgcagaagcgaaagcataagcaaagttcttgcagggttgctaagtacttgatcgagttttgaggttcattcaaccaggttttattactagttttgagagggaacagtatgtttctcatatccgttttcttttactgccttcctttctgtaagtgcctgctacatcgtagaagctcaataaacttggttgctgattaaataagaatttcaatcgattttctttaaataaagatttgtgtgtgtgtgtgtctcaatggcaccattcattgttaagctttccggtggaaagtctttatttttaccttccctaagtaagagcttcttcttctagtccctgttagtatagatactttcaccacatagctatagatatcctgccctttcccagttctgttgtctaaccaagacttcagaaataacagtgagaagataaaagtgtatgagaattggactcggggttataccagttctattttgctcttggggcactggaaagaaaataaatttaggaatggccacacaatgactaggaaaagtcagtaggtagtcaagcttctactctatcaaatggggaagcaggaagtaaggcccctcatgtctccaaaaggatagctgaggagatcttgtcaaatctgtaaccaaatcacaatgtcagcagcaaagatggtaggtttgactttaaagctgctgaaggagaggttcacttatttccagaggactcacaggtaaaattaaaattggctgagcaggccaggcatggcgactcacacctgtaatcccattactttgggaggccgaagtggaggggatcacttgaggtcaggagtttgagaccagcctggccaacatggcgaaaacctgtctctactagaaatacaaaaaattagccaggtgagatggtggatgcctgtaatctcagctactcgggagtctgaggcagaggaatcacttgaatccaggaggtggaggttgcagtgagccgagattgcagcactgcactccagttgggcaacagagtgagactccatctcaaacaaaaaaaaaatcagctggacagaagaacaacgctaggttgaacataacaattttcctatcacttgtcattgaattctcccttccaaccacagaggatcagaaaatgggctgttttatcagtccagtaagattacctacctctgtagtactggaatagtgaaccacggaagactccagaatatacttttaaagtcaatgaagatgctgggatgttcttgctcagctcaagatcttgtttcttcctgtggccttccatgtacctcccccttgctgggactggagagtgacatcagaatcacaattggtgatatcactgtctctatagcaacagtagtgaggctaccagaaaatgaatggtcaacaggacaaagaggaggggtgaagatatactccaaggggctgatgtttagtttagaaggactgggctttattctgattaattctctctttagagcagtggtccccaaactttttcacaccagggaccagttttgtgaaagacaatttttccacggatgggagtggggtgggagtatggtttctggatgattcaagcacattacatttgttgtgcactctatttctactattatgccataatatagaatcagtgggagtcctgtcttcctgcaactagatggtctcatctggggatggtgggagacagcgacagatcatcaggcactagattctcataaggagtgcacaacgtacactttccacaatagggttcaagctcctatgagaatctaatgccaccactgatctgacaggaggtggagctcagctttgctcacttgctcaccatttacctgctgtgtggccaggttctaaaagaccatggactggtaccggtccatggcctgagggttggggacctctgctttagagtgtttaatataggtgggggaatacgggaaggggacattttgccaatggattccacttaaagcagcagagtaagtattatgtattaacaaatctagaggacggcagaggagaatgagaaataaaagaattgagggtctaaattttatgcatatcccatggaatcacttcattttgtcagatccagccaggactctttttatttataagcatcttgccttctgtaaaaaaattatttttaggatattttgcctaaactgaccatctctgggttataatttgtcttagatcttcagagatacaataaccctattttatcatttgcaatgcctgacctgagaaactgtagtgggaaaaatcacaccaagaggcatttggttagctactctttctatgctttattactacattctctgaaaatgttacctcagctactctgtaattaatgattaaatataggactagtatatagtttccatggagcaaaaagaaattccaagcatggccacgagataatgatgaaaattgcaacagattcaaaagcggctggtttatcacagggttccttcaaaaaagttatttatcgctgggcacagtggctcacgtctgtaatgccagcactttgggaggctgaggcaggcggatcactagaggtcaggagttcaggaccagcctggccaacatggcagaaccctgtctctactaaaaatacaaaaaattagccaggcatggtggtacacgcttgtaatgccagctactcgggagactgaggcaggagaattgcttgaacctgggaggcggaagttgcagtgagcagagatagcaccattgcactccagcctgggtgacagagtgagacttgaaaaaaaaaaaagttatttatccattgatgatcttttatattgtctcaagagcttttgtattcttttcacagaaagtgcacctactagtcaaattatatttgtcaaaatatctcagtttcttttttcttttttttgagacagagtctcaactctcgcccaggctggagtacagtggcacgatctcggctcactgcaacctccgcttcccaggttcaagtgattcttgtgcctcagtctcccgagtaactgggattacaggtgcacaccaccacacacggctaatttttgtatttttagtagaggctgggtttcactatgttggccaagctggtctcgaactcctgacctcaagtgatccgcctgcctcgacctcccaaagtgctgggattacaggcatgagccaccgcacctggcctcttcgtctttgaaataatggggcttgctgagctcctaaaatctcttccagctctaacattctatgattttgatacttcagtggtatttgaatagtactgcatggacctacatatagcactttacgggtgacaaagcatctttgcatccattacgccacccgattctcataataaccttttgaggtaccagggtaggttttatttaccctgttagacaagtgtagaaacttgtccaggtcacagctaacgaatgacaaaactggggatgggatctagtattctaggtgttaaaaatcggtgttctttcagttgggcacagtgactcatgcctgtaatcccagcacttttggaggccaaggtgagaggaggtcttgagcccaggaatttgagacaagcctgggcaatacagtaagaccccatctctgaaaaaaaaaaaagtcagtgttcttttaattacaccatgcaaccttgaaactagaactgagaacatgaggcagtgtttaacttagagattttaaattatataattggcagtgttatacaggagtaagcaggttgctgatgacagtcaggatctgttgatccgaacaaggaaagtatgttagtatccatattggtcccaaaatcaagtattagcaaattgtgttaagtgaacataggataaggccaagaaatatgacagtgtagcgttactactaagcttctccgatgaaattcaaggtttttttctctcttccaattcaatttgttaggcgacacttcagtaaacagtaggggcaagatagagtggaaacagccaagatttcaagcctagtaataagcaacttctacatccctactcatcacaggcctttttgtctatcccagaaacacatacttttcctgaaaaaacaaagcactggaaggattaccaagtctagaaagaacccgccctccccaaactaggtggttttctgataagcctaaggtatgtttcacaggatcactggttgccatctcctacccagcaatctggagaggttgaccagaataaagtattttaaaatccaagcgcttagtctaacctggaatttcctcagtttctagatggctctttgtagaacaaggcagattctcaaaggtgaccacagttaaagaaaaaattacaagccattgcgctagagagagccatctgcagtttctccttagacagatgttcagatggcacacatggccactaaatttrcataatatttcaggaagttcacagatttcccgaagcccactcatgaatcacacttctggttaagaactcctagattcatatgctagttggtgataagtgctttggtatataaacttaaaccaaaaattggtggaataattaccaccttggataggatggtcagagaagttttatccgaagaggtcacttttgagcagagacttgagctggtgcagacacctgagtgtgcattccaggaaacgcgaacagcaggcgcaagggtccctatgagagaatgtgcttggcgggctcgacgcacatttatttacttgggacacaccctattttggtttctgttctccacttttcccctcgttcttgtccccccttttctctctcctgggccctggatctcctgagcgcggagggctacgcctccttcttcctccggactcaccagggctgccagcttagcttacattttcagggaacaggaaactgagagtcaggaaaggtgagctcttctacctcgggtcttgccattttgcatgtcctgagtcagtcactggttaactctgaacttcaggttcctcggcaattagagattataaatagcctatacagcctattccagatctgagattccaacagccaaagtcttttcacttcctttcttccccctctccttcactttcccagctttcttcttaaccaacaatctacccgaaaccgtcgtttcttggttagcgcttgcgcagacaggcgagaaaggtaagttttgacccagcttagcagccgtagtcagccgggagtgctgtcgtgggggattgtgggaaaagatggcggctgccscacaatcccgggttgtccgggtcctgtcaatgtcacgtaagtgttaccgggaacggcggcccctggtcgggattccgagacggggatttaaggttttggaagtggcaccgtgctgcagcggtcacgccaacttcctaggcacactctggtttctctaggtttggagctgcctcagtctggtttctcctttcgctttccgcttccccggctcacatattcaattgtgcacyaccttgggaggggacaaaagatcttaagcagctgtaagcgaagaggagaatgcgggggacacgttagggatcgagagaatcagaattctgatatggttgtaagggtttagggttatgagaaatatttgtatggggcggggggagaaatgtgtaagggagggaaaaaaggctagtggcgagaggttttcttagattgattttatgaccttgtgcaaacccttaatgggtctcaattcatatgagcacaatggaratgataatattacaataccagggagtctctgataagattaaatgagctaatatttgtaaaagcatccttttacccaaaagcgtctctacggatgtagaatgtgttcggcaaagtgcgttggggtctgggggagagagtgatgtttgaggagagaagaatcaggagcttggtggaaaggaaagtgaagaatgaaggctatgttagaatttgttagcattatttagtttctcttctgttctgattggatctgctcccactcctcaaactgaaaacatacatttgtccttccactcactaaaaagcaaggaaattagaaatacggttacacttcatcattgtcctttcaccctctactcttccacaaacatattccaatcaaacccccaaagttgtatttttcttagtgtattttagtcgttacagaatatcatttgctttcaaaattggctcatgtcagaatcactcgtaaagctttataaaaattagaaatgaggactgagtgtagagctattgagtcagaatttgtgagattagctccttgcaccttaaatttttaaaagcaccacagataggcttgatgttcagcctgagrcaagaattaggagtgtttagaggatccttttttttttgttttccatcttgggtagaactcctgcataccactgggaaggtggtggtgcacatcacttatagtggatggttttgtagtcacaatgtctttgcaaagacatttgctggttcttgttaaactattacaattgtatgacgtaatgtagattgtgaatggtaatcactatttattgagtacctgctatctgcaatctccagttctaggtatttttattaattttcctcttttaacttactttcctctgactgacaccatagcttgtgttcttaaccactctgcgttattgtctggtaaagtaagtttttgagtaaattctgtagaggcaagtctagtatgtaacataatccacacactataggacagaactgtgtaagacaactatatatagttaagtgtggcaagactattaagtatcacaggaaatcataaaagggaaagattagtatcatttgaggtactgagggatgattggaagaccagtggagaattgtagtgctcccactggtctctttagggctgttatgatctggaaagtcctctggcaaagacaagtgggtgagaatggagtcatgaggtattcaagaggcagtgaaatgactacctgaatatctgggatagtggaaaaggaggttgaatgtgttagatgggatcagacaatggagacctttgaaagccaagcagagtttagatcggtagtctccaaagggagttgtgcaagaggacctaataagttgtggaaatataaattagaactcctaaaaattgctttctatagtaataatagctaacacttatgtagtttaaactgtrtgccacacactattctaagtaatgtatgatttataatgtgtatatcatattggtactacatagaacgtgcatataattttttaaataratacttaaaaaaattaatgcagtgtgcaagcaaatatgtctggactattggtttgggtattgcagtaggaaactaatgtaggtttttaagcagagaaatataatgaatatataattaataaagaatatcattcttctaatagtactcataataaatggaagaaagtggagaggctggaaccaaagagagtaataatttatatttattgagcacctagtatttgcaaggcactgtgacagatgcttgcccatatgttattctcattaaccctttaaactgtgagcttcatgaagccagggttttgtattttactgtgatagtcacagtttctagaataattcttgkcccataattattaaaaaaaaacaatagccatgtgaggttagtgtgacattaccttctgagaartttcaaagtaataaaagcaactattattcatagaatgcttaatgtgctctaggtaatgtgctacatggtttatgtatgtttaatcctcttaacagtcctttgaggtattaattcctcaactcaagtaattcttcccagttcattgactctgccatcttttgcctgtcttatcctatgtcctcatttccttactcttcactcttatcattcccttttatgcatcctcaactccccagcccaactcccattgtcrtaaaaaacattgaccctgattaaacaaaacttyccacgtaatttgctgcctgccactgagcaatggagaacggggctagggaaaacttcagactaactggccttattttaaattcatgaatacaaatctcaagtagattttcagtgctacatttttctaggaaatttggtttccttgtctccataatcattacttaacatagcgagtttcctaaaacctctaacatgtgcttttgtctcattctcagctttacagagaaatcaaaggaatcagatgagaacagtcattttcccaccataaactctaatagttgatatgtgataattctttgccttttctcttgttacagtgggtgagctccttctgttccaatctgtggccagttccttcactttgcattcaatcttatcctctctcaactattcattccctttcctgaatcagtaattttctacctctaccatggaaatcatgtcatttccatcagcacataaatgttaactcatatttaaaacaaacaaacaaacctattcctgtccttgttttctctagttccatttctcctttttcagaaggattgtstatactcctcatctacttccttgcctcacagcctctcttgtttgctccagtctggctttcagtcccactaatccaataaaattgctcttatttatgccacctacagccacatcctccagcttctgtggtcctctgtcctcttcctayttcactttcagcatttggtaaagttaaccattctctccttgaaacagtttcttattttgggtttttagattctgtttccttctgagtttttctcctacctcatgggactgctttttaatctcctttactagtgctttgggctagtcactaaccttatccataaagtggtgataaagatagcattaaaaaagataatacctatgcagcacttagaataatgctggacacctgccaagagctctgtaaaggtagctgttaatatgatgttattattttgttattatgatgtgtggtccatgatgtttacttttaatttctgtcactatcagtgagctaggctatttctccaattcaatacttttggatagggaagaacaatgacctttgggcagaatgccacctgaaagtcatccctagaaacaaacacagattttctaaagaaagtcctgtttgtgtctttcacctctcccaagtgtacaaagcacgaatgctaagctccgaagtttgttgattggagcagaagtgcgttagcactttaaacctttttgtttctacttacatgaaagttgagcagctaactctaaaattctattctaaggagttagcaataacttgaaaactggaatgtatccaaaagagattckcattcctgccatatgaagaatatttgacaggacagggaatgtttaacctggagaagaaaatatttagtggggctataattgctacacttaattgtagaagagggattagacttgttctttgtcattctggaggaacacagggataaaaacttctgggaagcagtcactgattccccttgtggtaraactttctttctgttagaatggctcaaagcagaatgggcagctacaggaagtagtgagtttcccaactccacaggtgttcaggcaaaagccagatgatttctttgcacacatgctgtagagaagatgtaagcattggtacatgaactttgagggttcattctagtaccaagaacctcagtcaatgaaaaagaaatggtggaatgtttgacaagtctcttgctgttaaactttctaaaagtcagaatatcttttctcaagcacttcactccttttatcattatttgtgatgttcttcagtggttttatagtaagtctgaactattgaactgcattctttttttttttttttaatgttctgtactaataatcatctgcttccgaccagtatcatcaaccttatttttcattagtcaccagtttcagattctgttccaggagagtcttttgctgttgccctgtgctgtaggcttattcattctacctctgcattgtgatgtgttcctcatgggattctgtcctttcttttttttttcctcttttaagacctttctcaaaacattttatccaggaatacttcctcatggtaatgtgatttattgctcatttattacatattctcagttccttttaccgtataggcttatgctttcctactttgtgactgtttaatatgttttttaaaaaatgtgacttatcttcttaggtaagttacattgtatagggtagggagtatatttcctcatgtcctctggattctgtgtcgtagtagtttgtgtttattattgcccttgatacttaaattgctaaagtaytgattgcaaaataatgttacaagtttttagagaaaggagctatttgtgttsacasttttaaaaatattaatatttgccatgcttgtatactttggggttttgtttaaggttctgccattactgcaatagccacatctgtgtgtcacggcccaccctgtcgccagcttcatcatgccctcatgcctcatgggaaaggtggacgttcctcagtcagtgggattgtggccactgtgtttggagcaacaggattcctggggcgatatgttgtcaaccaccttggtaagtaaagttccttaagttcatatgctccattgccattgatcaggattgcctgatgagaagcatgagctatgtttctcttcattttaacagtattatgaattactcctgtcttggatgtatgtaatttttatttgttgtgacatgaagagcacactcatgctcctatataggaattattaggataggaataagggactctgaaaagctatggcatctttagcatggcaaaatattctttttgtcaaatataatatcaattcacrtaccatactagaatttaaatatttaccaagtcacaattgtataatatatccacattatgttaatgttgatccttttttcaatccattctcttttaggacrcatggggtcacaggtaatcataccctatcggtgtgataaatatgacatcatgcaccttcgtcccatgggtgacctgggccagcttctgtttctggtaagggcctttatgactgaatgaagttgacaaatataaattactaagrtcatttttaggagtgataggcagtataataaagcagtaatttcttcccagaatggacyaaaggcatcctctgttcccaggtcattctttcagctaggttccggcatctcctttgtcatgcaagctctagattggcagttggcaaactttttctttgaagggacagagagtaaatacttctggctttgcaggtcgtagagtctttgtcataattactcagctctgcccttgtaactggaagtagccatagacaatatgtacacaaatgggcatggctgcatttcagtaaaattttatttacaaaatgaggctgcaggctgaatttggcctatggactatagtttatcaatccctgctctagacctgtgctgtccagtgtggtagccactggccacatgtggctactgagcacatgaaatgtggctagtctgaattgagatatgctgtacgtataaaatatacactagatttcaaagactcagtatgaagaaaacaatatacgattcatcattaacaattttttatatttgttacatattaaaataatattttggatatattaggttaaataaaatgtattattaaaatgaattttacttgtttcttttttacctatgtgcctcatgttatatttctattgaatagtgctctataaacataaaaaaatcacaaatagggtgttttataacttggttgtttagtatagatttaacttagaacagtcctttctgagcattccctttgtcgtcctttaatctacaggttctttagggcagtagttgccaatgcggtgaggcaggggaaagagggtagaggagggccattaagggagtgattaatggaactctttgattgtcacagtgattggggagctgtcctggttattaggtacaggcacagggatgctaaatatcctacggagcacaggacagtctctttccacaaagagttgtgctgccccaaatgcctgcagccaagctattgattgcgatactgtctgggccttgatgcttaaatctactgatcttatagctgacttcctacttgtgttgtcctgtaaggaatggagttatacattttcccttttaaaaaatacttgctaaactttcttactatctctggtaatattcatacrgattatttgtaatccctttaaattttgatttattttcatttcattttcacattttcatttattcttgactcagtgttcacaagctaagtataatacttgtatcagaaatttcttatttccaaaatgtttttcttctccaaaatcttactattaagtatattcttggtattaaagttacagaatcttagcttattcctagttctttgtccctcaagtttgttggtcaccttgtcagagcctcaaaattgaagtatttaaaaagtgataggtgaaaacttttgaaccattggaattaaaccaaatgacatctattccattatttctgcagagatttatttcctgaatgtctagcattgacctgtgctctgagcacgtttggatgaccaagaccacagggaactcagagacttgtatgtttagtgtttgtttatgtgtttattttcgagaaggactatttggggtgtgaggtgctgatttccccgctttagtctttgtttgcatctgctgtctgaatgtccacttggtttgcccacctgactgtgtgcccttgggccttagccctgaaaatttggtttccttttattacatcactcactgctgtagattttatgtatatttcacttaatcgtcataataacctcgtgaggtaagttgtgttttctaattttacatggggtttgaagagataatttgtacaaagttagtatatggcaaactgggatttgcattcctgtctgtttgactccaaagccactgtttagactgtgtcttttaacccactttctatcatcagtcctaactggttcttcctgctggggcttcatctttttgttcttgaatctgattttatagtttgttttctctttcctaaattaaacagacatcctagttctctctctttctctttcatccccactttctttctcttttcccttcttgctctgtctccttcctattgcactgactcatgcatgtgcacttattatttggtgctaagaaattcttattacttgttatcttccattgaaatgcttatagaaacctgcccttggctcaccctgaagttttaggtagttctctttgactcttgtttttatgttgttaatggagaaattactagatctggggttataaaagaggaaagaattaaaaagaaataagaaaatagtcatgaatggcyccaactaacactagtctttaaaagacactcttcctatcttcagtctgtaagtggttgctgtcaagaagggaaagtctatctccctaatgatccttgcttctttgtctgtatttcaggattggagacttggtttcctgggtttcttttcaaacttagtaaggagtagttgggtggacaaaaactaatatgctccattaaaaatcaatagcctcctttttagctctgtcatttgattacctgagtaaagtgtactgttacctgtttgtctcggaaagagtgagggaatcagcagggagtctgagatgtcatttytgttgtaataaatggagcttggatgaaatggcaccatattatgactacagcagatggcccattttgaaacttgcattgargaggctgcagaagtgttgagtgctgaggtatacccctatgttttcatccgattgctttctgctattataggaatgggacgcgagagataaagattctatccgacgagtagtacaacacagcaatgtggtcatcaatcttattggacgagactgggaaaccaagtaagtctttgactcttgtttcttctttgcttaagtctttcttagggtttaatggaccttcgctgggcaccttttatgtgccagctatcacagtgacattttcaattagtgaataagggttggttgaacaaccacttgcatacccagtgacacccctgaggagatgtagctgacattaagtctggtataagtcagcagtgtgatatactgcccataaaaagccagtaggtggtattggtgtggctgctgttggtcctgtacttggatcagtccctatgggatggggttaagaaataggattttgcctgttctgctgtttagcaagctgaactttggtttttcttgtgtagacagtgttctagatgtcttttctgcattgttaattggaggtggcgtgaggactaatttgaacagttctttgtatggattgtttattaacaaataatgtttcaatcctatagtccacaacactttgtttacacctctttttwtagtgttaaaatttgacttagttttttaatatgtgtcttctcatcaaatattttataaattctttgatgmcttgggggtcttattcaactttttatcccccctaatgattaacatagtgtattgtacagagtaaacatttagttaacgttaccgamtgaaattgttgactgacttgtttttagtttcttttttttcccttgcgggaaacaaagtcccggggtaagaagtgattcctaacacttcagcagccagtacggccaggtttctttaaagggcctcagcctcaggattccctgataatgcagaacatgaagtatactggatttctaacttaaagtagtccttaaattgtgtagagtaatgacagyagagctgtcaacttttttwaaaaaataattttrgcttaaaaaaattaaaaattttttttctttttttagaaatagagacagggttttactgttttgtgcaggctggtcttgaactcctgggctcaaatgattcacccgccttggcctcccaaagtgctgggattacaggcatgagccaccacacctggccaaatttagctttaagttaaatcattgctgtttaaaagttyaagtagtrtgaatttcagtactgttatgaaaaccatcttatcacgtaaagctttgagatcctgtgtgtggagttcttaaccaatccttttattttttwtcttccagaaactttgattttgaggatgtttttgtgaagattccccaagcaattgctcaactgtccaaggaagctggagttgaaaaattcattcatgtttcacatctgaatgcgaatattaaaagctcttctagatatttgagaaataaggtaagtaacaaattgatctgggaagtggttcacagagccagagtttcttgggccatttgaaacatgatttcagtgagaagggtttatcacagmyatatgtagaattaaaaggttttctgattccctgcatccagaactaggggtgtgtgtgatgttttgacgttttgattgattgccttctgtttgcagggaactgtgctatggggcttcggagttggctagaccatgttactattggcattcagatacttaaagtttctttggggcatcattgaattatacagaaaccatcacagatttctgccaaaggaatcatacctgtgtcatctaccatggttaaaggaccatctttctttctcaccccttgcactgcagtggttttgtgccactcttaaaggggcaatgtgaaggctcagaatgacagggattaatatttgccagggaagatgcctattcacacagtgcttatgctccttttactcccagaaatgccatacctagagactgaccactgtagtttggagtcagtctgtagcctaagtgaaacgtgttcattatcagggacgcagaagggatatcagtgtctggccgtgcgcttaacatttggattctgccatatggaagcctgtttggagtcatactgataaggacaagagagttccttgataatggttccaagtttttgactcaccacattagtttactggataaactattcattaagcacctactgtgtgtcacatattgtgttaagcactgtggctacggtagtaaatagagagaaaataagagagagaatgcttgtgcctgcctctgcccaaacattcataaaatcatcagaatttcatgactggaagggaatgggaggtgtcaatggtgaggaagagagaagagtcaaagatgtccagccctctggctgaagccactgggtagatgatagtactgttgaataagatgggaaatgcttgggagggactaggctgtagggcagtgagtcttagccttagttgcacattaaaaccactgagggagcttttaaaaattctgatgcctaggctgcgctccagaccaattaaaacaatttctggggttgcaacttcagcaccagtattttttaactctgtctaggtaattctgagtgcagcaaagattgaggagcactattttacttgagagaatggaagatgattgagttttggactcacgtttcaggtgcatttcagatgtgtgtcaatcttccaagtaactggtatatagggtttctgatcctggaggtcagaagagaggtctgggttggagacagaaatgtgggagttaccagcatttgttgttaatttaagtgatgagagaggataagatggctgaagattgagaaggtagtttcagattgggcccagaacataccaatggttagtaatctggtagagaaggaggcacctgcagaaacccaaaccaatmaaacagaaagactaagcaggacatgataaggcggaagggaaaccaggagagtacagtgctagggaagccatggcmagacagtctcacaggaggaagtgaatacttatgaatgccattgagaagtcaagcaaatgttaactgtaaagtctccttggatctactgacatggaggtcattggtgatcttatcaagaatagattgagtgcagtggttggagcagaatccagaatgcgggtgcgtgaagagtgagttggaactgaggaagtgggaatggtaagggtaggtacattttcaggtagcttgactggcaagaggaagatgaaagactgagaggatagaagctggagggggatgtggagttggtatgtttttttttaaggtagaggatctacattgtttacatgctggtagggagatgctggtaaaaagagtgaggctgaggatgtggaagagagagtaaattggacaggttcctgaaaaagtgaaaggacrtgagctctaaagcattgaaagtggcactgttcctcccatcaggtaagagaggaggagaaaattgtgctttatataccggggtttgtagatttagtggtgagaacttgaggtggtttttcctctactgtcttacattttctcttttattagaaggcagagtcatttactggaaggaagagaaaagaaagggatgtctgaaatttgaatacagtagaaaatgtttcaaattgtctcatgggaaagtaagttaattagaggaaaacacggtttttgggaaatgttgagggcctggttaaaattggaggcatgaatttatagtggtaccaattcatggtttttattgatttattttcctgccagctgctcaagacagtgkgagtgcatggcccaagggaggccaatggagttcttctaggattagaattttgcctggtggctagagtaaaggacaaagsgacaaggtagtttacaatattggcaagagagtgatgagaagatggtctatggaacctaatctggaattcagagggaaggacaggaacagtcggaagagttgatacagkggaagcagaatcagtgcactagagttcttgagaaggttgagaaacaggtatcccaggagcagatgaacaaagaacaagcaggctggaaattgtaggaaatggacatccaagagcaggatgtcttcatttaatacctcagaagaagagcaattccagatgttgatacagtaggtggtgtaaccaagttaagagtggtagaggtggaaggaagaggaggtcgttggagttgagcagctcaagaacctgagaagtccaagcccacttggacatcatgtcacctccagtggtggtggaagtagaaaggaagactgaattaggtgctgatatcttcatcgaacaagaagacttgcctaggaggctagtagatgataacaagtaaggatggtacagcaattgagattaggaggattagtgactctatccccaacctcctttggatatgtaggtactggtgacacttccattattgcagcctgctgccaccatactgtcctttttctaacaggctgctagatggttgacacaaaccagagaatctgtaaatagaaggaaaaatggaggctgaagaaattctrctttgatttttctccttcttcaatrtaagcttcccttaaaataaaaaaattggaagagacccaacccaatctgtaaggtgcaggacatttttgtggattatattttttaaaagttctgtgtaactgagttttatgaattacatgattacctttatctggaggaaaatatcgcctttgaaatacaagtcatgtcttaatagtggaaagaatggakgctttattcacttgtctctaaactcaaaacaggtttrtttggttattgtttaggctgttggagagaaagtagtgagagatgcatttccggaagccattatcgtaaagccgtcggacatctttggaagagaggatagattccttaattcttttgcaagtacgtattctttcttaatggtagaagagagggatactgattaaccaagttgaagctgctcaagctaacagttttctctgattgacagactaaggatatattttttctttcccagttgccttttcctcccctaagtttatattttcatagtcaatgtagtctttgttatattccatatcaaaagaagcaacttagattaatggaaagagcatgaacttgggagtcagagacttgagtttaagtcttggcccagctaactctgtgaccttggcaaatattcgaatatcacatggaatagtttctctatcctaaaatcccctgtgttatatgtattgattcttaccctcctacccacccctaaccccagacaaccactgatctttttattgtctctatagttttgccttttccagsatattacatatatggttagaatcattgcagtatgtagcctttttaggtggacttctttcacttagcaatatgcatttaaggttctttcatttcttttcatagcttgatagctcatttctttatatagctaaatagtattccattgtgtatattccattgtattggatattggtttatccaatttagatgtttctatcttgtttttccccctgttgcttgtgtccacctaacatctgtaataatttctacttaaaaaaaattgtggcaaaatatacatagtataaaatttcccatctgctatgggctaaattgcgccccctcataattcgtatgytgaagccttaacaccattgtgaatttatttggagttaggacttttggaggaaattgaggttaaatgaggccataagggtgaggtcgtaattcagtaggattggtgaccttataagaagaggcaaaaagagagatctctctctccctgtgtgcacatactraggaaaggccatatgtgaggacacagcaagaaatctgctgtctacaagccaggaagagagcccttatcaggaaccaaactggctggcactttgatcttgaatttgccagcctccagaactgtgagaaaatacatttttattgtacaagccacccagtctatggtattttgttatggtagcctgagcagaccaaaatagattttggtaccaagaagtggggtgctgctgtagcaaatacctaaaaatgtgaacgtgcctttggaactatgtaaaggtagaggctagaagagttttgaggtacctggtagaaatatggacgttaagggtgatttttgtaaggtctcagatggaaatgagtaagatgtcattggaaactggaggaaaggtgatccatataataaaatggcaaagaaattggctgatctgtgtgtgttctagtggaaggtagaacttgtgagtgatgaaattgtttattcagctgagaagatttctaagtacaaagtattgaagaaatgccttggttcctcccgactgcttacaacagaatagaaaaagagagaaagaggaaatgaagaaggacttgttaagcaaaaaggaaccagaacctgaagatttggaaaattctcagcttatccatattgcaraaaatgagaaagcttgttttgaagagaacactaagagtgtggctgaacaaccatttgatgaagagattgtggatgcgactcaccaactaacaagctatcttggcagaagccaggaatagagatgagattacatcagcaaagtcaccaccagtttgaactagaaggggcagaatgaaagaagcctgtctgacttctgatatcctacaggaccagaccacagagctatttggctgtgaatttgagctattcttcaagaaaagggaagaatgaccccaaaaggggttcagagatgtttagaactatctctttggtttcaaaggatggggccattgcctcagtttaaacaccacatggcctttgtcagaggccttggaggtgggaccacccagagtcttggaggtacagctgcctgatccttggggctacagccccctggaacctttgaggtgttgaccctctgcccaggagagctattggggtggggctgctgccccagtaggtcctagaagttagaactaccgcttcagtgggtcctgaaggtgagaccaccacctctgtgaatctagaaggcaatgcatctaggcaaagaagattattgatttttagtagccaccctaataggtggtgtttcattgtgtgtgtgtttttattagattctaaaatctaatagaatttaccttgctaagttttggacttacttgggagttgttaccctttctttcttacgtcttccttttagaataggaatgtctatcttatgcctgtctcacggctgtattttggaagcacataacttgtctggtttcacatgttcatagttaggaattttgcctcaggatgacccacaccttgagtcttacctatatctgatttagataatatttggatgcgactttggagtttagagtcttgagactaagacaagattaagacccttttaactatttgtaagagtacagttcagtagtattaagatatttacattgttgtacaaccaatccccagaactttttcatcttgtaaaactgaaattctgtaccccttaaacaactcyctgttccctccttccccccagcccctggcaactaccattctgcttttggtttctatgaatttgaccacctcatataagtggaatcatacagtatttgtcttttcgtagctggcttatttgacttagcataatatgctcaaggtgcattcctgttgtaccacgtgatgtgatttccttcctactgaaggctgaataatattctgtgatatgtctataccacattttgtttaataagccatccatcaatggatacttggatttcttcccacttttggctattgtgaataatgctgcaatgaccatggatgtacgaaatatccctgatttcagttatttggtgtatgtactgagaagtggaattctgtagcatatggtatatctatttttactttttcgacaagmcaccatagtgtattccacagtggctgcaccattttacattgccaccaacagtgcacaaggtttccactttctccagatctttgtcaatatttgttattttctgtttttttttttttttataatagccatcctaatagttctaaggtggtatttcattgtgtgtggtttttttgtttttgtttttgagattgggtcttgctctgtcacctaggcagtgatacaatcacagctcactgcagccttgaactcctgggctcaggggatcctcttgcctcagtttcctacataggtgggactagaggtgtgtaccaccacacctggcttaaaaaatatatatatttttgtagagacaggtcttgctctcttgcccgggctggactcaaactcctggcctcaagcagtctttttgccccagcctcccaaagttctaggattataggcatgggccaccacgcctggcaacaatgtggttttgatttatgttttcctaatgattagtgatgttgagcatcttttcatgtgctttttggctactttattatttggagaaatgtctgttcatgtccttggctaatttttaaaattgggttgtttattttttgttattgagttgtaggagtttttttatttattcagaacattaaatacttatcagatatgtgatttgtaaaattttctctcattttttagtttgtctcttcactctgttaattgtgttctttgatgcacagaagttttaattttgatgtagtcaggcttatctatttttacttttgttgcctgtgcttttagtattgtatctaaggagtcgttgccaagtccaatgccatgaagctttctccttttgtttttgtctaagagttttagagttttagctcttaggtttaggtctttgatccattttgacttagtttttgtatatggtatgaggtaagggtccaattttattcttttgcatgtggttatccagtatgttgaaaagattatctttccccattgaatggtcttggtgcttttgtcagaaatcatttgaccatatatgcaagagttatttttctctattccattgctctgtatgtttttctttacgccactgttttgatcactacactgttttgattactgtgcctttgtagtaagttttgaaatcagaaagtgtgtgagacttccaaaaatttgttctttttcaagattgttttggctatttaaaggaatccctttaaatgtcatatgaattttaggatggagttttctatatttttgcaaaaataaaaagccattgggattttgatagggattgcattaaatctgagattgctttgggtagaattgacatatgtcttagtccattttggggtacaacaaacgttgagtaatttataaagaagagaaatttatttccaacagttctggaggctgggaatctcaagatccaggtgctgtcatctggtgagggccttcttgctgtgtgctcacatggtggaaggtggaagggtgaaagggacaaatgctatgtccccacatggcagaagaggagaagagcaagctagctgaatgcttcatgaagcctcctttatgagggccttaatcctattcatgagggagcaccctcatggcctaattatctcttagttcctatcacattggcaacatctgaactttggagggaacatatttaaaccatagcaacatcctaacaatattaagtcttccattccatgaacttgggatgcctttccatttaattgtgcctttaatttctttcagcaatgttttgtggttttcagcatatgtgtcttttgccactttgataaagtttatttttaagtattttattctttattgtactattgtgaataatttctactcttttttttttttttttgagacagagtcgcactctgacacccaggctggagtgcggtggcgtgatctcggctcactgcaacctctgcctcccaggttcaagcgattctctggcctcagcctcccaagtagctgggactacaggtgtgtgccaccacgcccagctaatttttgtatttttagtagagatggggtttcaccacattggccaggctggtctcaaactcctgaccttgtgatcygcccatcttggcctcccaaagtgctgggattacaggcatgagccactgtgcccggcctaatttctactcttaaatggtttaaaaaaaaaagaaaaacaaacaaacaaaacaaaaaaaacttttttaacctaacatttaaactacttgggatttgttttagtttatggtgagaactaagacattatctcacctttttttcaaatagcagaataattgtgccagcaccatatatcaactaatatttccatcaggccctttttctgggttatctgtgctgtatcactcatctgttgatacagcagcagaactcatctagatattaactagatagacagctcatctgccatatcaacagatgagtatcataaggaggaagagttccatgtttctccttagaatgggtgcagctagagtccagtcttggtcgtagygatgcatttagcattgcagagcagactagttgtctagacatttgacctcttttctttgctcttcatggttttaaacatttggcctttttattttccgagtttattatctgaaaaactaatgactrccttttgtaagtgcattcacttcctcagagtcagctacattcattatattatttctattatgcacaataattatgttaatcttaagactgttggatcttacagcaatttaagccttctcagtatagttctcattctttcttccgctaggtatgcatcggtttggtcctataccccttggttccttgggctggaagacagttaaacaaccagtatatgtaagtacttggatgaagggggtcagaaagggatttttgatgaattcagatttgagtgatcaagtttctggttttgtcctaatttagtaactctgtcattttctttgtcaacttgtgtcagctagctgcctcttagtttacttaagaggtacatgccttctctgtgtcttcacttgttcatttaagaaaaagttattgaactcataatgtgctagacacatcatacatgtcacatgtcactagggaaataaagatattaactagatagacacaaattgctgttctcaaattgctttcagtctgaggcagataaataaagcagttattgtacaacgtgatgagtgctatgataaggagagggttttatgtaattacatcagaagggcacctaatctagacttgggcatttcaaaaggaagggcatttagggtaaaaccttaaagatgactaaaggtaagcctgatgaaaggagttggggaagagtattgcatgcagagggaacagtatatacaggggcccagaggtgaaagagcatgttggattccatgttagattgaaccaagttttctcagtagtggcactattgacattttgagccagataattcttcgttatgggggttgttaaagggtgttgggcagcattcctggcttctagccactagacgccagtcacaccacccttcagttgtgacaactgaaaatgactctagacagttgtcaaatgtcccctgggggccaaaatcactattactattactgtttttgaaaatcaaaatggtagaatattagcaattccatgtggttaagcctaatagcttgtgatggttaataagagagttgggaatggtaagagatgagcttggcaagttgtgggcaaaagcaaatcagaggggcctcaagctatctgaaggtaagtgcattcctactacagaaartacttggatgagccttggattatgcgtacttggaaaatacttggatagcggtgattatttgagctcttgagaaggctcattcttttaagaagctttctgggaatagataatgccattattttaacttcacattttctttgttgagatcagtgtggccttcctcctttctccttccttccttccttcctttttctcttctttcctttctttctatctctccatctcccattctgtctctttttcaacaattacttagacatatattataatttcttacaggtcgtagatgtatccaaaggaattgttaatgcagttaaggatcctgatgccaatgggaaatcctttgctttcgttgggtaagtgcttagagtttgaattttaaattgtgctattataatgaaggaatcaatatctaaattagttactaacagatttatttgttgcacttttacaatatcrraatctcctcattgcttgcattaaatcagaatttgagggaayctggaatctactttaatgaatgattcttctgttaccaaggtctgagaaccactgccctagactattacatatacttagtccagtgacccttagggatggttttgtactactccagtgatgtttttaatatataaaaggatattgctgtaaattctaaaacacaaacaaaacacttttagggagtragtatggttataaaaccacattaattttgatggagtakcacaatgcctccagaggctgaaaaacgggtggtttatagcacaattactagtgctgtgcgagattgattatttcttttatgctctttgctaaaatttgctttcagaaaaaaggggtacagttaagctatgtggcttacctgaaattactaaatcatgtgacagctaagcttaggaatttttttgctgaattaactaaaagtcaaaaactaagacttcatttgccaagttgagaggtatcaaattcacctggtaagtggttcataaccctgtgattctgtgaagcaaactagtgacacttgacatctatgaaagttaaggatctggctcagtaattaagggatagcctaattcataagaaatgtttgcctctagaggaaaatgacactgttctctttaagccaagaggcatagaatatactcccagaattctgaatctatacattgttatgttccactattattatttaatacataatttttttcagtgtgaaagtcttggttttccatgtcaactagcagctgcaaaatatatttctccttttcagttcccagtttggtacattagcatgcaatcagttatatagyctagataagaattacaattcaatatattcaatacaggtttcataaaatactacacaaaagacattagttccagtgaagaggtacatggactaggatttcagggaataaatgagcggaaatggctttgtgaactttacttgctctagctctggatgagttgcacattttcctttttacctttgcccagccattatccttttgtctgggctccagtaagtcattcttgtttggcgtaacgatgggaaaaataatactagacattgcagtgtagatatttttcctcttgaaattgtagatakgtatctacacatttctcatctcttcagccccaggaaaaaactttgcttctttctctgatattttgaggctaaggcagtggcataagactataattttcctcctaggttttttgtaattatgaattatattatgttggtccattctatttgccattcattcataaaatacctattgatacacactcatacaacattacacacaactgtgatgatgaataaacacattcagcaaaatcaygatgtataagatcagcatagaaaaatcaatatatactagtaaatgaacaatgtgaaaataaaattaagaaaagaattttattcacagcagcataaaaaataatagaatatttaagtataaatttaacaattaaatttattatattatacctaataagtaatgacataccatgttcatggattgaatgagtcagtatgattaaaatgataatttccttcaaattgattgacaaattcaacttaattctatcgaaattccaacagacttttttgcagaagttgataaattgattctaaatttatatggtaatgcaaagacccacaatagacaaaaccattaagtttcataatttcaaaacctaatagctataattatcaagatagtatggtactgacataagaattgacgtatagatgaattaaccagaattgatagttcagaaataaatctttatggacaattgatttttgaaaaaggtgctatggcatttcaaaggggaaaggatagtcttttcaacaaatggttttgggatatccacattaaaaaaaagatgaacttcgactcctaccttgctctgtacatgaaaaaattaaaataattcagagacttcagtgtaagagttataaaacaaggattggtggcaagatggctgaataggaacagctgcagtctgcagctgccagcaagattgacacagaaggcgagtgatttctgcatttccaactgaggtgcctggttcatctcattgggactggttggacggtgggtgcagcccaaggagggtgagccaaaacagggtggggtgtcgcttcacccgggaagcataaggggtcggggaactccctctcctagccaagggaagccattagggactgtaccatgcactctggcccagatactgcgcttttcccatggtctttgcaatccgcagaccaggagattcactaaggtgcccatgccaccagggccctgggtttccagcaccaaactgggcagccgtttgggcagacactgggctagccgcaggagttttttttccatatcccagtggcacctggaacgccagtgagacagaacctttcactcccctggaaagtgggctgaagccagggagccaagtgatctggctcagcgggtcccacccccacagagcccagcaagctaagatctactggcttgaaattctcgctcctagctcagcagtctgagttcaacctgggacgtatgagcttgggagggaggggcgtccaccattgctgagatttgagtaggtggttttcccctcacagtaaacaaagccaccaggaagttcaaactgggcagagcccactgcagctcaggaagacactgtggccagactgcctctccagattccctcctctctgggccaggcatctctgaaaaaaaggcagtagcccaagtcagggacttatagataaaacccccmccatcctgggacagagcatctgggggaaggggcagttgggggtgcagcttcagcagacttttaacatccctgcctggcagctctgaagaaagcagcagatctcccagcacagcatttgagctctgataagggacagactgcctcctcaagtggatccctgcccccgtgtatcctgactgggagatacatccctgtaggggccaacagacacctcatacaagggagatctggttggcatctggcaggtgcccctctgggacgaagcttccagaggaaggaacaggcaacaatctttgctgttctgcagcctctgctagtgatacccaggcaaacagggtctggtgtggacctccagcagacctgcagcagaggggcctgttagaaggaaaactaacaaacagaaaagaatagtatcaacatcaacaaaaaggacgtccactcagagaccccagccgaaggtcactgacttcaaagaccaaaggtagataaatccatgaagatggggagaaactagggcagaaaggctgaaaattccaaaaaccagaaagcctcttttcctccaaaggattacaactccttgccagcaaggaaacaaaactggatggagaatgagtttgacgatttgacagaagtaggcatgttctaacccaatgcaaggaagctaagaaccttgagaaaaggttagatgaattgctaactagaataaccagtttagagaacaacataaatgacctgatggagctgaaaaacacagcacgagaacttygtgaagcatacacaagtatcaatagccgaatcgatcaggtggaagaaagcatatcagagattgaagattaactcaacgaaataaagtgaaaagacaagataagagacaaaagagtgaaaagaaatgaacaaaacttccaagaaatatgggcctgtgtgaaaagaccaaatctacatttggttggtgtaactgaaagtgatggggagaatggaaccaggagccaagttggaaaactccaggagaacttccccaactagcaaggcaggccaacattcaaattcaggaaatacagagaacaccacaaagatactcctcgagaagagcaaccacaagacacataattgtcacattcaccaaggctgaaatgaaggaaaaaatattaagggcagccagagaaaaaggtcaggttacccacaaagggaagcccatcagactaacagtggatctctcagcagaaaccctacaagccagaagagaatgggggccaacattcaacattcttaaagaaaagaattttcaacctagaatttcacatctggccaaactaagcttcataagtgaaggagaaataaaatcctttacagacaagcaaatgctgagagattgcatcaccaccaggcctgccttacaagagctcctgaaggaagcactaaacatggaaaggatcaactgataccagccactgcaaaaacataccaaattcttaagaccattgacgctatgaagaaactgcatcaactaacgggcaaaataaccagctagcatcataatggcaggatcaaattcacacataacaatattaaccttaaatggcttccttgcattggctaaatgctccaattaaaagacacagactggcaaattggagaaagggtcaagactcatcagtttgctgtattcaggagacccatttcacatgcaaagacacacataggctcaaaataaagggatggaggaatatttaccaagcaaatggaaagcaaaaaaaggcaggagttgcaatcctactctgataaaacagactttaaaccaacaaagatcaaaagagacaagggcattacataatggtaaagggatcaatgcaacaagaagagctaactatcctgaatatatatgctcccaatacaggagcacccagattcaaaaagcaagttcttggagacctacaaagagacttagactcccacacaataatagtgggagactttaacaccccactgtcaatattagaaagatcaacgagacagaaaattaacaaggatatccaggacttgaactcagctctggaccaagtggacctaatagacgtctacagaactctccaccccaaatcaacagaatataatttcttctcagcaccacattgcacttcttctaaaattgaccacataattgaaagtaaaacagttctcagcaaatgcgaaagaacagaaatcataacagtctctcagaccacaggacaatcaaattagaactcaggattaagaaactcactcaaaactgcacaactacatggaaactgaacaacctgctcctgaatgactacgggctaaataatgaaatgaaggcagaaataaagatgttctttgaaaccgatgagaacaaagacacaacattccagaatctstggagcacatttaaaacagtgtgtagagggaaatttatagcactaaatgcccacaagagaaagcaggaatgatctaaaattgacactctaacatcacatttaaaagaactagagaagcaggaacaaacaaatttaaaagctagcagaaggcaagaaatagctaagatcagrgcagaaccgaaggagatagagacaggaaaaacccttcaaaaaatcaatgaatccaggagctggtttttttcaacaacatagatagactgctagccagactaataaagaagaaaagagagaagaatcaaatagatgcaataaaaartgataaaggggatatcaccactgatcccacagaaatactaagtaccatcagagaatactataaacacctctataccagtaaactagaaaatctagaagaaatggataggttcctggacacataccccctcccaagactaaaccaggaagaaattgaatcccttaatagacctataacaagttctgaaattgaggcagcaattaatagcttatcaaccaaaaaaagtccaggaccagatggattcacagctgaattattccagaggtacaaagaggagctggtaccattccttctgaaactattccaatcaatagaaaaagagggaatcctccctaattcattttatgaggccagcatcatcctaataccaaaacctggcagagacarcaaaaaaagaaaatttcaggccaatgtccctgatgaacattgaatcgaaaatcctcaataaaatccagcagcacatcaaaaaacttatccagcacgataaagttggcttcatccggggataaaaggctggttcaacatatgcaaatcaataaatgtaatccatcacataaacagaaccaatgacaaaaactacatgaatatttcaatagatgcagaaggccttcgacaaaattcaacagcccttcatgctaagaaccctcaataaactaggtrttgatggaatatatctcaaaataataagagctatttatgacaaacscacagccaatatcatactgattgggcgaaaactggaagcattccctttgaaaatcggcacaagacaaggatgccctctgtcaccactcgtgttcaacgtagtgttggaagttctggctgggacaattaggcaagagaaagaaataaagggtattcaattaggaaaagaggaagtcaaattgtctctgtttgcagatgacatgattgtatatttagaaaactccattgtctcagccccaaatctccttagctggtaagcaacttcagcaaagtatcaggatacaaaatcaatgtgcaaaaatcacaagcattcccatacaccaataacagacaaaccatgagtgaaccaaatcatgagtgaactttcattcacaattgctacaaagagaataaaatatctaggaatccaacttaacaagggatgtgaaggacctattcaaggagaactaccaaccactgctcaagtaaataagagaggacacaaacaaacaaatggaaaaacattccatgatcatggatagaaagaatcaatacaatgaaaatggccatattgcccaaagtaatttatagattcagtgctatccccatcaaacttccattgactttcttcacagaattggaaaaatactactttaaatttcatatggaaccaaaaaagagcccacatagccaagacaatcctaagcaaaaagaacaaagctggaggcatcatgctacctgacttcaaactatactacaaggctacagtaaccaaaacagcacggtactggtaccaaaacaggtatatagaccaatgggacagaacagagggctcagaaataatgccacacatttacaaccatctgatctttgacaaatctgacaaaaacaagcaatgaggaaatgattctccgtttaataaatggtgttgggaaaactggctagccatatgcagaaagctgaaactsgatcctttccttacacctgatacaaaaattaactcaagatggattaaagacttaaacgtaagacctaaaaccataaaaaccttagaagaaaagctaggcaataccattcaggacataggcatgggcaaagacttcgtaattaaaacaccaaaagcaatggcaacaaaagccaaaatagacaaatgggatctaattaatctaaagagcttctgcacagcaaaagaaactatcatcagagtgaacaggcaacctacagaatgggagaaaatttttgcaatctatccttctgaaaaagggctaatatccagaatctacaaagaacttaaacagatttacaagaaaaaaacttcatcaaaaagtgagcgaaagatatgaacagacacttctcaaaagaagacatttatgcagctcaacaaacatatgaaaaaagctcatcgtcactggtcattagagaagtgcaaatcaaaaccacagtgagataccatctcatgccagttaggatggcaatcattaaaatgtcaggaaacaacagatgctggagaggatgtggagaaatagtgacgcttttmcactgttggtggaagtgtaaaccattgtggaagacagtgtggcaattcctcaaggatctcgaagtagaaataccatttgacccagtaatcccattactgagtatatatacccaaaggattataaattattctagtataaagccacatgcacacgtatgtttattacggcactgttcacaatagcaaagacttggaaccaacccagatgcccatcaatgatagactggattaagaaaatgtgccacatatacaccatggaatactatgcagccagtatacagaaaaggatgagttcatgtcctttgcagggacatggatgaagctggaaaccatcattctcagcaaactaacacaagaacagaaaaccaaacaccatatgttctcacttataagtgggagttgaacacatggaaacagggaggtgaacatcacacactggggcctgctggaggtgggaggctagaggagggatagcattaggagaaatacctaatgtagatggcaggttgatgggtgcagcaaaccaccatggcacatgtatacctatgtaacaaacctgtacgttctgcacatgtaccccagaagttaaagtataattaaaaaaaaaatttcaattggtaaaaatgtaaaaaaataaataaaagggttataaaactataataattttggaaggaaaatagaaaatcttctagaccttggattctagaagatttttacctatggcatcaaaagcctatttcataaaataaaaaataaatggatacattagacttcaccaaaattaaagctcttgtgtttcaaaagacaccattaagaaaatgaaaaaacaagtcacagattgggggaaaatatttgttaattacatatctgatagaggactactatctagaatatacaaagaaatcttagaactcaatgagaagatgatccattttttaatatgagcaaaagacatgaataggcatatcarcccagcagatgtacttaatcactaaaaaacatatgaaaagatgctccatatcattagtcattacagaaaatgcaaatcaaaaccattatgagataccagttcacagagagaaaataacaaatgttgaggaagacatggagtaatgagaaccttcatacattgctggtaggggtgtaaaattgtatagccactttagaaaacagtttggcatcttcttaaaaagttagcataaatttaccatatggcctatcaattttactcctagatatttacccaaaagaaatgaaaatgtgtctacacaaagatttgcacttgaattttcatagcagcgttatcataaatgctaaaaattggaaacatcccacatattcattaactgatgaaaggagaaataaaatatagtagcattctcatataatagaagttcaacaataaaaggaatgaaatattgacatgttacatgtgtgaacctcaaaaacatggtaaatgaaagaagctagatacagaagatcacatgttgtgtgattccgtttatatgaagtatstataaaaggcaaatgtaagtagattagtgattgcctgagcctgggagtaaaatccaggattaaatggctgtggaggatcttactagagtaaggaaaaatattctaaaactggattatggtaatgattgtacaacttggtaaatgtatgaaaaatcattgaattatatgcttaaaatggatgaattttaatgtatgtaaattataccacaatagtgaatagcatgggtaagatttctgcctttgtggagcttatagattagtgatgagatgcataagtaataattaagcaaaataattaaaataaatgaccgaaaaggaaagtccagttaattggaaagaaaaccagaaggaggaagttggcaactatattggatgctgccaggaggttgagtgagtgacagcatagagattcatggtcaccttaatgacctcatttgaacattaggcaaagggcagattggattgcagtgagatttgaatggcaggataggaagtggaggcaacagttaggtaactatttggagaagtttccctgtaaaagggagcaaaggaaacgggtaaagagaaggctatgaaacatgaatgtcttgtcaagggaggtaccaccctggatttggaagatggtacatcttgtttataaattggtaagaatggtccaggaaagagatgtcacttcatgactcaggagatgaggccgacagaaaaggagcaaagtscttcaggaattgagaggagttggatacagagtgcaaatgagggtttgacctttgtaaaaggcaaacatttcttcaactttaacaaggaaaagaattcaaggatatatgcagatgcaggtaggtttggctgtgggaatgttaggagtatcttttcttgttggaatgtgaggttagctaaaaggcaggatggagtgggtcagaaaagtgtgtggaaaatttgaggacagaagatagaaagtatgccctgggagaacaggaaagagcatttcctaggagaacatgtgggattgccaagcagaactgagtgttccattggaaattactgataaaaaaataaggtgaagtcaatcagttcaattgtatttcgtctacagttttgtccttctggggtttcaggctcagagaaggcacatgtttgggtcaaccagagtgagttttgcttagcaagtatagtgggtaggggcctgggagwcaagattttgctgaggatatttgcagaggaataactgtgatgctgagccttgaaatctaagctgggaggatgcgggcttcaatgtacctttggctgtgaggaagggcacttaaactagtgttccggttgcacttgatggaacacaaagtgcttcagaacagctgaaaaggaaacctattatgtagagttagttaacccatgataccagttttgtttgtcatcgtaaaaattcaagttgctcttggcgtagcatgtattatatgtcctgtaatgatccttacaaatccctctggaatttgaagaaccctgctaaggcctttgtctgatatttctcctggctgatagtttcatgttttttagtaaagtatgtcagaataatgaggttctcactgaattaccttcactcagctcttggttgtcacagatttactgtcatgaagcatgcaaatgaattaggaaatgggtaaagaaatattaaaatgcattataagcactgatacttattaatgctaggttaaaatcgtacagaactattcagattaatggaatagagcggaacgttcagaaacagtcccattatatgtaaggatatagtatgtgataagggtgacatttcagtatagggaaagaggcagtacagtaaatgattctgtaagtagcattgaagcaattggcttacatcttgggaaaaatataattacatgtttaccttatataatgtacaaaaatacgtcacagaaggaactttatagtaaaaaaaaaatcttttttataaggtttagacaaaatatgtagaaatttatgtcactgcagaggaattttctaactatgaatccaagccataaagaaaatcagtagttttggttaaattaaacagttaaaattttatgtgcacaaaacactgtaaataacactaaaagttaaaatacaaacaataaaaggtatttccaacaatatcactaaaatatagagaattcttacaaattatttttatagacagggactccaggaggaaagaaaagatagatgtataaatgaccaaaaattcgtgaagaaatgatctctcatattaaagacataataattaaaacatgagatacctttttttttttaacctagcagattggcaaaaattttattttcttatgacaactcatttcgggtggagggggcattcttatatataattacatatatataattataatttatataattatctaaaatgttatatacttaacattttatataaattgatagaaccattttgaaaagcagtttagaagtattcaataaaagccttaaaattttaaagtctacattgacccagttccacttctacaaatatattctaaatgcgtaatcatggataagtacaaatatttattacaagaatgttcattaaaacattataaaagaaaaaaattttaatagcataaatatctcaaaactggcaattgataaaataattgtgattacatgcagtgtaatatgttgtcatgaaacatgcaataaaataatgatgtggaaagacgattatgatgtaatgttaaatgaaaaagacattacggaatagaatggattgtgtatttattaaaagcagaataatgtatatatgtaaggggatgagaaggatatagatcaaatatattaactatctttcataatgggattatgggtgatttttctttgtgctattctgtatctactacagtgcatatatgtttccttttttataaggaaaatgttattttgttataaaggaaactttgtgagaagcgtgtaattgaaagaactgtgtattgtctttttatagtcccagtcggtacctccttttccacctggtgaagtacatctttgctgtggctcacagattgttcctcccattccccttgcygctttttgcctatcggtaagtagagtgctccttttgtgtgacttctgaaaaagccagctccacacacttgttcctaatgttctcccttagggttatagggtgtgtgaagggctggtctccagatctcctagtgttatgacattagcatagagaagaagcagaaatagattagtgttggttaaaaaaaaatatattggaacattaaatcttmccaattcccaraagtgaatcttcccacttcccaaaagtgaagatgcagttcttcactttctccaatttaaaaccatcgagtttaattttggagaaatatcttgctaggcacatatgtaaggggcagtcaggttcccctgtgtttcatgtcgctcattattaaatcaacctgatcatgctattggggaaaggagtcaggctaattcagacttggatttgtggttgccttctcttctttccctgcttcttagtttacttcttctctttgtgggttaaatatctttgacttggctgggagtggtggctcatgcctataatcccagtactttgggaggccaaggagggcagattgcttgagcccaggagtttgagaccagcctgggcaatatagcgaagccccatctctacaaaacataccaaattagctggatgtggtggcatctgcctgtagtcccacctactggggtggaggtggggtgatgcaagagaattgcttgagcttgggagttcaaggcttccagtgagctgagattgtgccactgcactccagcctaggtgactgctactgcgcacagtggtgcacacctatagtcccagctacttgggaggctgaggtgggaggatcacttgagttcaggagtttgaatccagcctggacaacatagtgagaccctgtctctggaacaaaaaaaaaaaaaagaaagaaaagaaaaacctactgccctgaggtaactgttgatgggagctcctttctcgtcctaggttttatattgtcctgatttgaaccaaataaaataaaatcttgaacttaccatgtcacaccctagtggyctggttaaggagactgtcacatccattgtgccacaaactgatcttcatttgggttttcatccattcattcaacaaatgtttattgaatgcctactatgtcttagataatgtactaggtactcagaaggttacaacaaacactcaaaaatcttatggtcagaatgttacaacaaaaactcaaaaatcttatggtctaacaggggtaccagaaaaatagaccactagaatgcagggtgataacgatatttattgagtgttacacctttcagactattcactttgtctcctttaatactcagttatctataaagtaagtaaggagagtatgtggagtgagtggaagaggaggccacagagtaagagaaacttacaagaaggccaaaaagtgatcaggcatttaagtgggaaatgagagtttggaattctagataccaaagggaatggagtgttttcaggagagaatcgatgttttaagaaggggaacattgctgttcattcacatgtatctcaagcccctagaacaatgcctggtacacattaggcactctgttaatattggtagaatgaagtcttacagaaaagtcaaataagataaaggaccaaaaaatgtctacaaatgaccattgtgaccgtggcttcagtgccgtgaaagggatataagccagattgcagtgaggcactttcatggttgtatataaaattgagttagagttggcttatgtatgcccatgacatggcccactgaggacactagaatagagacctgaagtgatctgttagcatagaatgagggcacagagagttagaggtttgtaatgagtgtttttattaagctatgttagcccaataaattatttttttctgccgttgaggaatctgaggctttatatgttgctggagaaattccagccagcttcctttttcatttatttatactatgcattagaatgttgtttttcaagcctttaaacrgctgtggaaccctgtgctcactgaagttttacgtcaagtcctgctgggtaaatccaataaaagagctggtctggttgcagtgatgggtgatactcaacgcatgtactcccaaacccttggccccccaggactctgtggggccccagcaaattcctagtgttcctcagatgctagttgaaaacccactgctactgggcacagtggtgtacacctgtagtcccagctacttgggaggctgargtgggaggatcacttgagcctgggagtgtgagtccggcctggacaacatagtgagaccctgtctgtggaacaaaaacaaggaaagaaaagaaaaagtcactgccctgaggtaactgatgatgggagctcaagtggcacgtaaggagcccttcaattttcattagcagtgaagagatggcagtaatgaagataggtggccttttccgttttgggttttatattgtcgtcctgatttgaaccgtagattttagccttctccttgcttttggatttttttttttttcctcaagggccccagctttcaggggttacgttgtatattttacacaccattcagcttgccctgcttctgtaaaggcagcatatttgaatatctgaggtttagattaaattgaatttcacagacttgattaaatactggagtttttctgtttgctttgttgtttgttggttttatttcattttaagtttaagatctgttgtttctttggaggagaacaaagtgtaccagcagttacagcagccgactgggttggcttgagaggagatggaccaaaaagcagaggtagcctcacaggtcgaggtggttattttcttaaaaaaaaaaaatcagttcagactgctctacagcggtctgtcttcctgcrgttctcataggctagcttacatcttgggcagagagatgcttatcacatgtgctatatgtatttctctttccagatgggtagcaagagtctttgaaataagcccatttgagccctggataacaagggataaagtggagcgggtgagtacatgtgtggaaagcgtctgcctgggcagatgatgaggcgttagacttattttgctttgcctgcttgcttgtttcccggcccttgtctgtttgctgttcttgctgtctgcagtcagcccctctactagcgctgaagctcatccacctgccctgctccagggggcggctcctccctactttctgtccgtcattatcagtgtttctttctctgcttgatcactcctgtcaacacacagaattgcctaatagctcccctgccaaagcctctcttcctcccatcactcttccagctactttcctgttgtgtcccttcacatcctaactcctcctaacttcctcctaacgtcctctttctttaacctactccagtcaggcttttattcccatttctcccctaaaattgctcttttcaaggttatccacaatctccagtctccttgctgccacatccaatggtcagttctcagacctcatgtcatgtgcctgtgcatttgcttctagggaggatgcaaaataaaacaaaaatactataccaataccacatctaccttggaagacctatggaccatatattggcaagaagtagccaaattgtcccctgaatgctgcctgaaagctaaagtgtagagaagatgagaaagtagtgcttagggaacatgtggaagtgggcaactcacatactttcttcagacatggtctatgaaagatcaggcaggatcgctggttgtcagacacttcagtttatcttacactaaagtgtctcttacgtttatacttgagaaagtgttgatacagtggcctgagtaggttttggatttggtttgcagactggcttacagccctctggtaaaagaattgcagactttcaggtgggtaggatgagggattgctgctgctctaggtgcaaatggattctatttatgtggttttgaataataatctgggatgtttgcaaactttacagttcattatctttccctataaacaagatgggtttggttttctagctctacagtgagcattagtcaaccaggttgagtacagctggagcaaaaaaagttacttgtttttttttttttttaatgggcaaggaacaaatgttgtgttatctcctaaattcaaagttaaaactgagtcagaacgcccgtgctcagaaaacaggggcgtgagaggactgaggaatggaccagctctgcttaagccctgattttattcctaaaccctcctgttcagcctcccctggcaagtgtggtgacttgtgcttccctgccctagatttatttctgttgaaatctgtatatagaatggctcatgtagtgccaacatcctgtgctcgcggctgccactggggacctcgatctgatacttggtgatctcgccctcttttgtcttaagccctctttgtgtgttctgcttttatagtgatttgcatgaatcgaaaattgccacatattctttgaaagcaattaagtctcaataataggactcatgccagcttgaatgtttaagtgcctgctaggatagcactttgttctcagccagttttcagcattgtctgtggtcctttgtttatccaaagatgcacatcacagacatgaaattgcctcacctgcctggcttagaagaccttggtattcaggcaacaccactggaactcaaggccattgaggtgctgcggcktcatcrcacttacygctggctgtctgctgaaattgaggatgtgaagcyggccaagaccgtcaacatttagtgcctccygagcarctcttggttttggygtcttttgggtcrgcccrtgtggtttgagcacccagccaggyggtctctttagagratcctgtacacagttccacyattaaaacatttcaggttgaattctgcagtattttcttccttgatttacaaaatgagaaatgtagtcacttagaacttgagcatgatttttkttaaacatatttaataatgatatatatactatttattctctgaaatgccagagagtttgaattttcctatgacaaaccacttytagcatacgttytagaagacaaggaccctttttaatgtcaaagtattgtaaagaccccaagtgatatgtgattgttttttaatttccattaaatgagagagcatacagtatcccctaacctgaatgtgtttacactgaaggtgtttttaaaatttattttaataatgtccatatgccttttaaaaatagtagtacatatatagaaaaacattgtccatagattctcaaaccccttgcagtaattccacagtcttcttggatctgagctatctgaggccagcccgatgcccttagtaccacatctggattatttcagacacataggtggagatagattctcttcmcatgcaaaggagatgcttcagcttctatgccagcagtgccagcacttaggaattakgaccttctaatgaagttcttaaaattgcagccaagacccagatgaacaattggtttagtgttggcaaatcccaccagtacagtgtgatttaaaactcccacaatttgtggtgaagccaacataccaccatcctaggtgacccagggttggtcattgtgtttcactggacttcagcctcctgatctatatttgggacagggatgtcagtaaaaaygctgtttgatgagggaatgcccgtctccttacagagagaaaggtatatcagtgttgaaggtaagttctccacctgccctttctgcctgcatcagaatctttttatcccaaaacggtcaacagtgagctactccaagtgtggtccatagatcaccagcattgggatcatcttggggcttgttagaaatgcagaacccgggctgggcacagtggctcacacctgtaatcccaacgcttttgagttgctgtggtgggacggtcgcttgaggccaggagtttgagaccagcctaggcaatatggcaagaccttgtctctacagaaaaatttcaaaaagttagtagggcatggtggcacgcacctgtagtctcagttattcgggaggctaaggtatgatgattgcttgagcctgggagttcaaggttacagtgagctatgatagtgccactgcacttcagcttggactgaagatcctgtctcagaaaaaaaaaaaaaaaaaaggcagaatcctaggttttgtcctgtcccaggcgtgttgaatcagaatctgcattttagcaaggtctccaggagatttgtatgcacattacagtatgagaagcactgccatacagaagagctgtatcagagttcagtgtgatccctgttattaatccaggttgctgaccccaccccagacccactgaatcagagtctcaggaaggagggcccaggaattttagttttattaaacattctagtttattctcctgtacactagtatatgtcagaatcagcgtactagggaaaggaacacaaacccaacttcacgttttttcttcagatgctgtctgttattttggatgacacccctcctggccataagccagccattaggcacagagatgggtggatttaatttgaaaaggaactataattctataatgcacagtgtcctctcttagaatatctacactttctttcctttttttgattcttaaaaaaaaacttattgatacataatagatgtaaatattgtcagggtatatgtggtaatttgatatattcatataatcaatcagtgtaattgggatatccatcaccttaaacatttacctttatgctagtaacattcaaattactctcttctagctattttgaaatgtacagtagattagtattaactctagttaccctactgatctattgaacaccaggtcttacttcttctgtcttaactgtaattatcttcattttctagcaatgctatttctcatctctaacttgtatcatctcaggatgctgtatatttcttttattttttattttttatttttttatttttattgatcattcttgggtgtttctcacagagggggatttggcagggtcataggacaatagtggagggaaggtcagcagataaacaagtgaacaaaggtctctggttttcctaggcagaggaccctgcggccttccgcagtgtttgtgtccctgggtacttgagattagggagtggtgatgactcttaacgagcatgctgccttcaagcatctgtttaacaaagtacatcttgcaccgcccttaatccatttaaccctgagtggacacagcacatgtttcagagagcacagggttgggggtaagatcatagatcaacagcatcccaaggcagaagaatttttcttagtacagaacaaagtgaagtctcccatgtctacttctttctacacagacacagcaacaatgtgatttctctatcttttccccacatttcccccttttctattccgcaaaaccaccatcgtcatcatggcccgttctcaatgagctgttgggtacacctcccagacgtggtggtggccgggcagaggggctcctcacttcccagtaggggcggccgggcagaggcgccccccacctcccggactggtcggctggctgggcggaggcgccccccacacaaacactgaagccgtagcattgactaaggaaacaattttaccatcctaagctagtggatgtcaccctctcagtgtatggaggttgcatatgacaagtaactgggagctgggcataagatctaggacactcatatccagggtgattctcttcataaggaggcatgggctgagtctccatttataggggctgtccccatagagacttcaagccacacctttctagggattcaggttgcacattacctgattctcacagttgatttgagcctgcaagactgtaaacccatcccattatcatgttttcttcctcatttacctacatttatcattaaacctttgtgattcagcaaatctgtttaccttctgattctactttaaattccgttcatgttcttccttggccctcctgtgtatttcccacagctttgctaggccttaagatcatctcacattcttcatcctaatgacaaaaataagttctatgggctgggcgcggtggctcttgcctgtaatcccagcactttgggaggctgatgggggtggatcatgaggttaggagttcaagaccagcctggccaatatggtgaaaccccgtctctactaaaaaatacaaaaaatcagccaggcatggtggggcccacctgtatatagtcccagcccaggagggagactgaggcaggagaatcactgaaacctgggaggcagaggttgcagtgagctgagatcacaccactgcactccagcctgggagacagagggagactctgtctaaaataaataataataataataataataaaggtacatgatggaagcatatatgggaatatatgcaaagatctctgagaagataaagaaaggtctctggaaggattagcaaaaactccatagaaaacggatttttaaagctgcatcttgatgttaacctgctgaaatgtgtgtgttggaccggggtgaggaggaagcagtcattcatgctgtggaagagaacagcatgagcaattgcagtggggcatgaatgagtgggtggttatgagtgggaggcagagtccgtgagttgggaggggcacaagcgagtttaacctttaccttggaggtgatgcagagcagttgagttccatacagatttggcttcgaatatgagttccactacttcttagttgtgagattggacaagtcacttgacctctctttgtcagcctcagttttcttgtttataaaatgggggtgatagtaataactacatgatgggatagtgatgaggaattaaatgagatcatgcatgtaaaatgctgagccctgcacataataagaactaagtaaatgtgagccattatcatttaagtagggaatatcatgcccatctgagtccatacatttgtttcctgacttaataaaatagctgccgttcctgagaaggagggattcctatttcccaaatgctggaaacagggacttatagaaggtaaattgccccattagtaagtagctgaattggttttccaacctggatctttctggctacaaaactgatgccttgttccagaaaggatttaaggatgctcaggaggaagacattcccagagttacactctagaaggtcttggagtgaatgggaggtatagtggaatggagggcgtatttgaagaaacccttcctgtgaaggaaaatccaagagaatgaagtaaggagagacttaaacttgaaaagattcttgtgagagaaggaaaggggctatttacaatagagaagagactagaagaaagtctgaactcacctccctggaagcagagggtggtggggtttttgagggctgtgtgagagtgtagaagtactgagaacaagaagccatgtggatcctgtgagggccaggatggggggggggtcatgggtcatctgtgtttgctgattggctttatccaaaggaagagtaaacatctcatccttatgacaggaagtagtcctgcagcttggagcaaggtgcccaccaaagttaggcacatcccacagcaagtgggagaaaggagtgctatctccttttgaggttacatttcagagaatggttcccctgggtccttgagaaagacagtcctgggttgtaaaactggcaagaggctgagggaagatgtatgtctcaaaggggaactcaaataatttataattttaagttttctgatgctctaagggaagtcaggtgcctaatattggtgatgtggtttggatgtccccacccaaatctcatgttgcaatgtaatctccagtgttggagttggggcctagtgggaggcgattagatcatggagtagatttatcatgaatgatttagtaccattctcttggtacaatcctcaagatagtgagttcttacaagatctggtcatttaaaagtgtgaggcaactctcctcaccccttgttcctactcctaccatgtgaggtgcttgctcccttttcacctactgccatgactggaagcttcctgaagcctccccagaagcagatgcctatgtgacgcttcctgtacagcctgcagaaccatgagccaattaaacctcttttctttatacattacctagactcagatatttctttatagcaatacaagaatggcctaatcgtgttaggaagaagcctgtctgaagtgcagtcaggctgaggggagcatgaaggccatcttgatgggggaaatcttttagtaccctaatgcgagcagatgatgatgttgttggcagagagggagggtataacttgtggtgcctagccctagagggaatggaagggccagaatccagagcataggtgggattgtgtgggctgacaagtaatagtatatgatagcatagtatatgatagcagtagtatacgatagcatgtgtgtgagtccattttgtattgccataaaggagtacctgaagctgggtaattaataaagaaaaggggtttatttggctcactgttctgtaggctgtacaagcatggcactaacatctgcttggcatgagccaccacgcccggccagaattttatttttagtgactaggctttcctttaaaacctctgtactaggccgggtgcagtggctcgcgcctgtaatcccagcactttgggaggctgaggtgggaggatcacttgagcccaggagtttgagaccagcctgggcaacagagtgaaaccccatctctttaaaaaaataaagcacttgaagcagaactttttatctgtcataatcactgctatgtccacagcacctaaaacagtcccagacatctgttgaataaatgaatgaatgaggtgggaagtctttctttacacttagatgaaaactccatcggaccccaaattgttctggtcttgttcaggtaataattttaattctataataaaatctcaagttataataggctcaatttgataattaggatgcccagtgttgtgtaataattaaagcgttaaatttcctctctgccccacagctgggatccaagaagaccctgtggctggctactcttctgtattttcatttatctccacccccagtttaccagcagtggttatcctctctccaagactgggccaggggtgagaagggcagtcttaccaggcaagggtctttgctgacagatgtctgggccttcttgacagcaggtgtttaaagctgaatctggttctactttcaggagagtgatggtttgagatggtaactgaagttgtagaagtagatgttgaggatgaagtatcatattaataaaacattgcccattaacaccttagcacaaattaaaactagctatacctcactgataaggacctgaatggctaaataatgatgaatgatttatggatgtagcagggaactgggtggaagcagtagtaagaaatttgaattaaggaatcgtaagggaatcgagattatctagtttcccctcgacattttataactgaataaacaataaaaaacaagagaagtgacagctttatagcatctgattggggaaaaacacatcttttctggggctagacagtccataaataggacttggaaatggaagtgtagggggagatcccattgtacttcagtggaa

SEQ ID NO: 95230 - DNA, 63962 bp, Homo sapiens
  misc_feature (1)...(63962): n = A,T,C or G
tggaggaactgacacacacacacatacacacacatgcacacgctaaatctttcaagatgccacatccctaggcagattggtcacttgccctttcatgacccttggtgcaagttggggcctcctacagggtggtaagcacattgactctaactgtaaatcagcccctctcccatggatttgcgggcgccctcgggtcagagtgtaaacctgttcatttaagggatttgttaaaagtgcaggcgtccgggtctcctaatgacctacagaataggatcttttggcttagaacctggacatctgcatttttaccaagctacccaggtgaattttatgaagtaaacactggaagaacactgccccagtgttctgatcagtgattggatgcatgagagggcacccagtgttcccagaaagaggggtctcgtcagcgtcttagtggagaaggacaagtgcaygcgagactgcagaggagtatttgctggcctctctagctgagtgaactttgacctattctagacagcagtaaactggcaccgattatggtgcaatgtttgatcaaattattttatttatttttaatggataattcatgtaataagacacaaaatgtagaatatattaaaaaaattacacagtgaaagcagtctcctcccacctctagccctcagtcctccaatgcctgccgactctagaggtagccacgattttgtggtgtttttaataaagactttgtgattttagaaagtgatctacttcagcagtcactttatacagggtaggaatctttttgttttaaaagaaaacaatttggaaataattacagattcacaaaatttgcaagaattgtacagagcagttctgtatacctcttacacccagtttttcccgatgactacgattatatttatataactgtatatataactatataactgagcagtgactggatgaatgagagggcacctagtattcccagaacgaagatatctaactgcatttgtaactatagtgaaatagcaaagaagctgatgacactcctatattatatatgtagttatgtaactatagtgcaatagcaaaagcagaaaattgacattgatactgtgtgtatatagttctatgcaattttatcacatgtagatattacatgtagacatgcaaacactgtcactcaagatactttagaactatgtaatcaccattgtatatacataacttaacacagtctactggtgttaccattttaccagtccacgtgaaatgaagaaacgttaccttatttaagtccctaatttgccctcccccatatatagtataattgtcttaaatatctcttccatatattttcagaccacagcagacaatgttatgatttttggttgccaaacgtaatttagaaaactcaagaggaaaaggaaagtcttttgtatttactcagattttaacattgttcttttgtttttcttgttccaagattctttcttttgtcatttctttacttagaacaatttctgtagtcatccttttgaggtaagtctgctggaaacaaattctactagttttcttatctgaagatgtcttgatttcttctccattcctgaagggtatttttgttggatacaggattcaggattgaccattcttttcttccagcacttgaaaagttgtgatactttcttcaggtcttcttgatttctgatgagaactctatcatttgaattgtttttcccctataagtgtcatttttctcttgctacttttaagaatttttatttgtctttagtttttagaagtttgattataatgcatctgggcatcagatgatcatgaatttctttgagtttgtcctatttggggtttgctcagcatcttgaatctgtaggtttgtgtcttttgccaacttttggaaatttcttttttcttttcttttctttttttttttttttgagacagagttttgattttcttgcccaggttggagtgcagtggcgcgatctcagctcattgcaacctccacctcctgggttcaagtgattcccctgcttcagcctcccatagctgggattacaggtgtgcaccaccacggccagctaattttttgtaattttagtagagatggggtttcaccatgttggtcaggctgtggccccacagtctcgaactcctgactttaggtgatccacctgcctcagcctcccaaagtgttgggatcacaggcctgagccaccgtgcccagccagcccttatttctttacattcttatttagccccacattttgtcttttccttctaaggctccgatgacatgaatattagatctgttgttgtaatctcaccggcctttgaggtttaatttttttttagtctactttctctctgtttttcagattgagcattttctattattccatcttcaagttcactgattcttttctctgtccttattctacagttgaggcctacccagtgatttttaaattttgtttattgtatttttcacttataaaatttccatttgtttcttttttatgtcttcaatttctttcctgagatttctatatctttgctaaaacatctgatttccttgctgtttcttcattcgtttcaagcatgttcataatcagtcgttcaagcaatgttactatggctgcttttaaatccttgtcagacaattccagcatctgtgtcatcttggtgtttgtgtctgctttaatttttttttttttttgagacacagtctcactctgtcacccaggctggagtgcaatggcacgatcatggctcgctgcagcttcaacctcctgggctcaggtgatcctcccaccttagcatcctgggtagtttgggccacaggcatgtgccaccatgcctggctgatttttttaaattttttgtagagatggggttttaccgtgttgctcaggctggtcttgaactcctgggctcaagtgatctgcctgcctcagcctcccaaagtgctgggattacaggtgtgagccaccatgccatgccaatttaaaaaaaagtttattttttagtagaaacagggtctcagtatgttgcccaagctgctctcaaactcctgggaatcaagccatcctcctcctgcctcagcctcccaaagtgctgtgattgcaggcatgagccaccatgcccggctggtgttgctgtctgttgataggctcttccaagttgagattttcctggttgttgatatgacaagtgattttctattgcatcttggccattctgaatataactttatgagactctggatcctatgtaaatctgttttagcaggcctttcatacactgttctggtggggagagggagatttcatctcatcgctgccaggtgggagaggaagcccaggttccatgcttggcctccactgacacctggtggggagggctgcctcattactgatgggtgagggagggagttcaggttccccactagccctctgctgacaccacactggctgaaaaggggagggccactgttcctttactgatatcatgtggggacaatgacaaaaatgccagctccccaagagaccttcactgacacaccctggaggggaaggtgggggatgcaggggcaaaccctcacagctggggtgaggttggaagtctaggctccccacgaggcctctgtggatgtggtgggcatggcactgcaaggttttcagtggcatttggctggagtagggcagttgttgtctaaacatcttctgtcttgctaggcttcccatttcctgtttctttggttagagaaagcagctttttcttggggcttctattgtctctgcccattgcatttccaagttgttgactgctccagcatccagcaacttggaatctatttcctacaatagctaggatatctggagatctctagtcagcctgccctgttctctctacctttcagagtcttcttaggtttgttttacatatcatgtgtactttttacttgccttgatgggaaggaatagagaagataaatgtaggtatttcttcttgtcccagaagcagaagggttatgcttttttgtttgtttgttttttgtagttgttgttgttgttgtttgagatggagttttgttcttgttgcccaggctggagtgcagtggcgcgatctcgactcactgcaacctccgcctcctgggttcaagcgattttcctgcctctgcctcccaagtcgctcggattacaggtgcctgccaccatgcccagctaattttgttatttttagtagagatggcgtttcaccatgttggccaggctggtcttgaactcctgacctcaggtgatccacctgcctcggcctcccaaagtgctgggattacaggcgtgagccactgcgcctggctggatcatgcgtttcttatgttttgagtctaatttgcaagtgggaggctgggagacattttctatccctgcgaaacagaagaagtgattccttttcattttgttcattttcatcctgtttttcctaaagccacattactttcctttaatccacatgtccgcctcagcacatgtcaccatgtgctgtgtttgggacgtagtaaatagtccaaagagccaggccggggtggaagctgtgattttgacgggattgacagtagactgagaactttgaacttttagccttggggaacaattttatgtgtttattctacaatgatgatcactggtgatttgtccaaaacatattataagtgtgaggtgtggaggcaaaggagttactggaagctggggcagggcagaagcccagtgtatgaagttgtgcagaggacaagcaaaggacagagaccagtgaatcggagtcatcccctgaggctcaaccccgggcaccgcctccagctcttctccacctgcttctaggcagtgaagtcctaggaactagcaagaaagtctgtccttaagtttgtgggacaagcatttgttgcacacctactatgtccaaaaccctgtagagttaggtaaaaagacatcttagatcccagctctccaaaaaagcaaggatctaagtgtacagagacttcttgcttcgtgatttcttcttcatcctatttatccccttcttatacccacaggaccagacctcacatgccctatcagagtctcccaggtggtttttccagggagagagaacattaaacatcaaacaaacatatatagagaaaagcctctcacccaggcagcctgagctagctgcaggagcaagcattcttctgacttctgagacagtacaaggtgtgtccaggtgacttacctgtcactgggcagctgccatgcgcactcctcacacctgacgctgctcagggagaagccaggcagctataatagtgttcttggccggagaacatctggcctagcaggcagggtgtcatctatgaagctgggtggagagaaagctgttggggaaaccagccccacaccacccagcggataccccgagtccggcggagacaaaggagttagaaagagacagaacaagcgtttaaaaggcaggtccaggggaccagagcgttggaggcttgctcacggcccagagctctgggctccacccaatttattggtttacaagctctttgttcttagggcagatgggaaggggaggaagggatgaggaaaaggattaatcagtgagtcattcgataagatgtgtaacagtggcggtttctgtgaatttccttgagcaaaggcgtgtgtctaaactacttaagatctttaatgactgaaatgggtgggagtgggtttcaggaggagccaagatgtttgattatactcctctgcttcaagggagtgttatctccctgagcaacctgtggaaagccgctgagcaacctgtggaaagccgctgagcggttatcctctcggggcataaagacaaagaaggcaataaggagactttgctcctcagaggccacccgtggcttcccatgggtgtctcacacaggggagaccaactcaactggcacctagaactctctttcccacaaaagctaggctggttctgattcttaacctgctccagcagtgacacactcagtcccacagggagtggacgacccccaggaagaagatgatgttttggaggaaactccccaaagccctcttcattgggctgactctggccattgctgtcaatctccttctggtattttctagcaaggggactttacaaaacctgtttacgggtggtctccacagggagcttcctttacatctgaataaacgcnacggggcagtgataaagagactctcccacttggaggtggaattgcaggatctgagtaagtttacaatgctaacctggaaggtgtgtgtgtgggtgtgtgtgtttggggcacttaggaaaaagggatatggaaggaaaaatgggtgagaggtcacattttcatctcagtcgctcattgaagcatctgacactgaattctgtgccttcaaatgggagatgggtattgagaatgaagtgagtagaagtggaaattagagcaagcagtatgggggaggtgagcatgtgtgtgtgtatgcgtgtgtgggcttgtgcacatgcattatcattatatctacatatgtgcaggcaacgagaagaataagaatcccaagggccatagacctgtccttaggcctattgaaggggtgggttgcacctccacacctgtgggtgtttctcgttaggtggaacgagagactttggaagagaaaaagacacagaaacaaagtatgtagagagaaataagggggcccaggggaccagcgttcagcatacggaggatcccgccagcctctgagttcccttagtatttattgatcattcttgggtgtttctcggagagggggatgtgtcagggtcataggataatagtggagagaaggtcagcagataaacacgtgaacaaaggtctctgcatcatagacaaggtaaagaattaagtgctgtgctttagatatgcatacacataaacatctcaatgccttaaacagcagtattgctgcccgcatgtcccacctccagccctaaggcggttttctcctayctcagtagatggaatatacaatcgggttttacaccgagacattccattgcccagggacgggcaggagacagatgccttcctcttgtctcaactgcagaaaggcgttccttcctcttttactaatcctcctcagcacagaccctttacgggtgtcgggctgggggacagtcaggtctttcccttcccacgaggccatatttcagatggtcacatggggagaaaccttggacaatacctggctttcctaggcagaggtccctgtggccttccgcagtgttttgtgtccctgggtacttgagattagggagtggtgatgactcttaacgagcatgctgccttcaagcatctgtttaacaaagcacatcttgcatagcccttaatccatttaaccctgagtcgacacagcacatgtttcagggagcacggggttgggggtacggttacagattaacagcatctcaaggcagaagaatttttcttagtacagaacaaaatggagtctcctatgtctagttctttctacacagacacagtaacaatctgatctctctttcctttccccacgcctatgtgtggtaggggctgttgaagagaggtggcaatctctggggcaagggcctcgcttccattttgcggtgtgctcctttcatgaactaatgagggctttgttagaggacctaagatcgaatcctgatgtgccattgtggttgtgtgactttgagcaagtgcttctctctctcagcctcaggttcctggtctgtaaatggagatgatgataacaatagtgatagttatcaacctgacctaatagggttgtgaagtagatgcagaaggtgatctataaactgctctgtgccaaattttaacctcctcatttaaacttaagggtaagatttcaacacattctggggtttgtttgtgattccggctcaccatggaagtctaatgcctctgaattttatgtgcctgtgcatccaacttcagcaagggaagcagcaatttccccctgctcccaggtaacagggatcaaatgctggaaccccatagggaggtgttttatgtgtgggcagggatgtgactgcccaggtgtgtgcacatggggctggagttggggaaagtgtcttttaaaatgagaactgagcattgtcagggttcagggtgaggctgggagatgggtggaaggaaaggcaggaagagaaaaaggaagggagagaagaaatcagggaaagagcgaggagagtgagaagggagatgagagaggagaaaagagctgggacaggaaaggagcagagaagtgagggagtccagggagagagagtgaaagagtttgtatggagacaagaagaaaagaagggaaagtgtgatgggagagaaggagagaataaaaggagagaggaggagtcctaaggcacccatagcaccttccacgtcctccttcataagactcatcatattttattatggtacagttttatggaaagcaagtttcataagtgctgtttccatgaacgtctcattcactactcatttctattcatacatcgaaattccatagatgaataaatgaswgggtgygtctaggaaagagagagaaaaagacaggcagacagggatgaagggaagagtgatacggggcaagagagtggatgaaacagagggaagatcatcagctccacaagccctggcttacctgggtgggtcggacattgcccatgcaaatatgcttggtgcagcttcaccaggaggatgcctgtgtacctagggtggtgaccccagcaccaccctcactatttggcagagcacccagaccacaccaggactgtctcacccatccccaaggctcatcacactggctcagcctcctcaagccgtaaaatggcaggagttctacccaaagccctgctattctttccatcagctaggacacaatgtgccatgaggagccagccagagccatctggtttactcctctttccttytttgcaaagatctttcttgttattcttggtgctcccacattttattcgctctgaaatgttgtgatgtcagagactcactaccacctgagttgaacctcaaaaagtcttctgggccctgtttctagatcaccaatgctttttttttttttttttttccacagagcttcctataactaaaagcctgtttaattacccttcatcctgtttgctcattgcctccaggattccaggaagatttaaaaaaatcagaagtcggccgggcgcggtggctcacgcctgtaatcctagcactttggaaggccgaggcgggtggatcacgaggtcaggagatcgagaccatcctggctaacacggtgaaaccccgtctctagaaaaatacaaaaaattagctgggcgtggtggcgggcgcctgtagtcccagctactcgggaagctgaggcaggagaatggcgtgaatctgggaggtggaggttgcagtgagctgagatcgtgccactgcactccagcccgggtgacagagcgagactccgtctcaaaaaaaaaaaaaaaaaaaaaaaaaaatcagaagtcaataaggatacttagttgaatcatgtaagctaccaagagcaaatgcaaacaataataattatatccctattgagggagggatcaatgactctaagccagttttctggaacctccctcagggttcataaaagccccactaggggaatgtcaatggatgtgtctgttttggggcttggaaagtttcagtataagttatggggataacctagtgacactgtattcatactaccggattgtgcatttcctcaaattgactttaggatggccaggtccaaaccagctcccactgatagccatgagtgaaagagaaaatcagatatccccccaaggaagaacgcagaggagctcagaggtaggaagaacccagtaccaccctgtggcccctgtatgcttaggacagaaaagtatgaataaccatagtgttccatctgggacactgtaaacagtatgctctcacttcttttttctacctgaacaagtatgcatggtgttcacatgagcctcctttgagagacctaccatttactttttgcccaagttttttcgactatcctctttttgtcttaaccacttgaagaggtgattctctttctccttttccttctttttgggccagtcttacgtcactttacaaacatgttctcctcccagtcacaggactcccctgcttccctcttgggggctgtatatggatctgaaatccagcacacacgttctgcttgccaagccatgtgctgtggcacgagatgcatctacccggagaaaattcacacgatggggctgtcccctcaccaagctgctgaccctgagttgcaatcattcagaaaaaaaggatgccttcttctaacttgtagaaagatgctggacaggctacacgtgatcctgtcagtctggttgaagtttagtgtgggcttaagggaggattagtagaaacaaagtagatcctatgtcagagtgccttgatcaccatggtgggatttagtgctgaagaatgtcatcatcactaaacactaaaatggttactttttctctctttttgctgagttcacagattgagcttgagggagttcaaggtgcatatgctaagatactccagcacaaatcttactgggtggaaaggtgaggtaaataatagatgacgtcatggatcctggagggcatcttctgcataaaacatcctctgcctsggtctatcactatctgttcattcttttgagttaaggcagtgtttcccgaattaatgtgacaattagatttatatagaccaattgtttaaaatatagattctcaggctctaccccagaattgagtcagaatcttcaggggaggcctgggattctgtatttttaacaagcttttgaagacattctttttttttttttttttttttgagacggagtctcgctctgttgcccaggctggagtgcagtggcacaatctcggctcactgcaacctccacctcccgggttcaagcaattctcctgcctcagcctcccgagtagctgagattacaggcatgcaccaccacacccagctaatttttgtatttttagtagagacagggtttcaccatgttggccaggctggtcttgaactcctaaccttgtgatccgcccacctcggcctcccaaagtgcagggattacaggcgtgagccaccacgcccggcctgcttttgaagacattcttacgatcacgcaagttggaaattgcaagactaggacatctccaattttaaagttcctcgtaaatcaagcacaggagaagcaagggcataggtggatgatggtggtagtggttaggttagatttgcctttgttaggcactaatggtgtagtaagtgtttcttaagttttactgtaaaaagaattactccttggttttattaaaaagcaggttcttgtaatttctcctgtctgtatttccacccaactctcagatcctgatttagtggatttggagattagcctgggtatctacattaaaaaaaaaatcacaactgattgattctgatgtaagtggttctcaggcctcattctgaaaaacattagcttattttccatctgtttctcagatcatagtcagttcttcgaggagctttgaagatgtgggatggaggagttttgatggggctaaagggagagacgtatctagtacatactttgctgggacagccttgcatggctggataagttccctgacatactacatcctctgtgacaagagcttataagttttaagatgtagtgggtaaaccgttagaggaaattaggatggaaaggaatacccaggtaactaaggaggggctgaaatgttttctctcccacccctgtcctcttcatttgcagaagaaagtatgaaattagctctgaggcaacaagaaaatgtgaacagcacactgaagagggcgaaagatgaagtacgccctcttctaaaggcaatggaaaccaaggtgaatgagacraagaagcacaaaacccaaatgaaactcttcccacactcacagcttttcaggcaatggggcgaggatctktctgaggcccagcagaaggcggcccaggacctcttccggaagtttggttacaaygcgtacctcagcaaccarctgcctctcaatcgcaccatccccgacacgcgagactacaggtgggatgaaccaggcttgggcttctagggtcctcagtttgatttgaggatgagctttgggagcagtgaacattgaaggctgggggagtgggggattgttggggaaggggttcaggctgagcaaagttgttgttttcaatttattttataatgacagctcagagaagataaccaactgatccaaatatttacagacccttgggaaagaacagaaatgtcagaggagcagaggtcctttgcaactctgatccagagaaacagagatatggtgggtctaactgataattttacagatgaggaaactgaagctgagaagggacttgcgcaagtcacaccaaagccagtagctctacctcctttcctaggactttgctcaaattctctacttgaattcctctttgctggtaaatctaatttgaagagcaatccctctccctctccatctgtttccctttgctattgttttttttttctcattctgtgtctcccaccctccttcataatacttttttagaaacagctttgttgagatgtaattcacataccatgcaatttatccatttaaagtgtgcaatgtaatgtttttcagtatattcacagagttatttactattcccacaatcaattttaaaacattttcatcactttaaaaagaaacggctttagcaggccctccacattttcctacaacttcctcatccataggcaaccaccactaatctactttttatccctatggatttgtctgttccggaccttttgtattaattgaatcaggtaatatggggtcttttgtgactaacatttttcacttatcacagtgttttcaagtatcattcacattataacacatatcaatacttcgttcctttttattgttaaataatatttcattgtctggattatacctaccgcatttcctttatccattcatcaggtgatgaacatttggattgttcccactttttgaccattatgaataatactgctgtgaacattcatgtataagtttttgtgtgaacaaatgtcttcttttcttgtaggtgtacccgatgggtagaattgctgggccatatgataattctgtatttagcctttcaaagaactgccaggtggttttccaaagtgactccatcatttaacattccctcaagcagtatatgagagttctgatttttccacatactcactaacatttgttattatttttctttttaactatagccatcctagtgggtctgaagtggtatctcattgtgattttgttttaaatttccctgaggcctaatagtgtgggacatcttttcatgtgctattggccatatgtatgtcttctttggagaaatgtctatttggagacgttcttttaaaaaaaaattggcttattttttttttattattgagttgcagagtactttatatatcctagatacaaattcctatcagaaatatcacttgttaatgatttctttcattgtgtagattgtctgttcactttcttgatggtcgtctttgaaacacaagagttttaaatcttaatgatgtccaatttatctattttctcctgggttgcttgtacttttggtgttatatctaagagaccttgcttggtacaaggtcgcaaaggtttacacccatgttttcttctaagaattttatagtttcagtcttaaatttaggtgtttggtccattttagtttttgtacataatgtgacaaggagggtccaacttcattattttatgtgtagctattcagttatcctactaccttggttgaatagactactctttccacatcagattgtcctgccacccttcttgaaatcaattggtgataaatgtaagggtttatttctggatatcaatcctctttcgttgctgtataggcctatccttatgccaggaacacattgtcttaacaattgtaattttgtagtacattttgaaattgaaaatgtgaatcttccaactttcttcttctttctcaagactgttttgtctattctgggaccttgaatttccatatgagttttaggattagtttgtcaatttctgcaaagaaaccagcaggattttgacagggatttcattaactctgtagctctgcagatctgtagatttgtggaggacttcatttaaaaattagatcttccaatccacggctgtgagaaatctttccatttatttaggtctttaatttctttcaacaatgttttgagttttcacagtataagtttgtttatgtcttttgttaaatttattcctaggtatttgtctttttgatgctattggaaatgtgactgtttttaaaaatattttatttaaattggcaaaattgtatatcttatcatgtacaataygatgttttgaaatgtatacacatcgtggaatggctaatatatatctaaattaacatatgcattacctcacaattattttcagtgagaatacttaacatctagtctcttagcaattttcaagaataccacatattgctattgacaatagtcaccatgtcgtacaatacaactcttgaacttattcctcctatctaactgaaatttgtatcctttaaccaacatctctctaacccctcttcgcccagcccccaccctggctcctggtaaccacctttcattctactctctttctgtgaattcaactttttcagattccacctgtaagtgagatcatgtagtatttgtatttctgttccttgcttattttacttaacataatgtactccacatttatccatgttgtcacaaaagacagaatttccttctttttttgtggctgaatagtattccatctattatggaatagtattccactattatgaataatgctccaatgaaaatgggagtgcagtctctcttcaatatactaattcatttcctgtggagatatacccagtataggattgctagatcatacagtagttccatttttagtatttgaggaatctctatactgttttctttattgggtgtactaatttacattcccactaactgtgcaatggttctattttttccacattatcgtcaatacttgttatcttttattttttgatagtagccattctaacaagggtgagatgatagtgcaatgtgagtttaatttgcattttccctgatggttaatatatggaacatttttttcataaagctcttggccatttatagtcttcttttgagaaatgtttgcttaggtcatttgctgatttttatttttctcgttattgagttgtttctgttccttatatattttggatattaacttcttattaaatatatggtttgcaaatatttcctctcattctgtaggttgtctcttcattcttttgatttttttccttgctgtgtagaagatttttagtttgatgtaatgctatttgtctatttttgtttttgttgcctgtggctttggggtcttatccaaaaagtcattgcccaaaccaatgtcctggaaaattttctctattttctttataggagttttacagttctgggttttatatttaagtctttaatctagtttcagttgattttgtatatggtgtgagatagggttcagtattactctttttaaacgtgggtattccgttttcccaaaaccatttattgaagaggcagtcctctttccattgcgttttcttgacatctttgttgaaaatcagttgcttataaatgtgtggatttatatctgtgttctatattctgttccactactctatgtctgtttttatggcagtatcatgctgttttgattaccatagcttaatatagtatattttgaagtcatgtagtgtaatgtctccagctttcttcttttggctaaagattgctttggctattcaggataatttatggttccatttagaacttttagagttgttttttctatctgtaaaaaaaggtctttagaattttgttagggattgaattcaatctgtagatcactatgggaggcatgaacattttaacagtattaattcttccaacccctgaacctgagatgatttttcttttcttttttttttttttttgagacggagtctctctctgtcgcccagcaatctcggctcactgcaagctccacctcctgggttcatgccattctcctgcctcagcctctccgagtagctgggactacaggcgcccaccaccacgcccagctaattttttgtatttttagtagagacggggtttcaccatggtctctatctcctgaccttgtgatctgcctgcctcggcctcccaaagtgctgggattacaagcgtgagccacygcccccggcctgagatgatttttcatttatttgtgtttctttaatttcattcaccagtattttaaagttttctatgtagatatctttcacctccttggttaaatgtattcataagtattaagtgtttgtatagctatcatatatagaattgcttgatttcctttttcgacagtttgctgtcagtgtatagtaaggctactgatttttgtatgttgattttgcaactttactgaatttgtttattagttttaaccatttgtagtgggttctttagggctttatatatatagatcatgtcatctgcaaacagggacaatctacacttctttcccaattttgatgccttttatttctttctcttgcctgattgctctcgctaggacttctagaagcatgttgaatacaaatgtgagagcgagcattcttgtcttgttcctgaccttagaggaaaagctctcaatttttcctcattgagtatgatgttagctgtgggtttgtcatatgacctttattgtattgaaggtacaattcttctatacctaattagttgagattttttatcatgaaaaaatgttgagtttttgttaagtgatttttcgcatctattgagatgatcatatagtttttgtccttcattctgttaatgtggtttattacatatagagatttgtgtatgttggactatctttgcatcgcatccctgaaataaatctcacttcatcatgccatgttggccaggctaattagtcctgctgtgaacaggaccacctrcacaatttgcagagcccagtgcaaaatgaaaatgagggaccttcattaaaaaataattaagaatttcaggatgataaaagtaatgaatgaaatcaataggggagacctatgtgtggggtcctgtgtgactgcacaggttgcataccataaagctggccctcccaatgtaatatatattctcacattgggattttctaagggaaattatgtggctggcataatttgccttagaaaatcccaatgtaagaatacatattttgtgattggttaaagcctgtttgcatgtatacaaattagtttatgtgttccacacgacagtagtttcaggcaaaattgtgatatgaataaagtttatctttccagctgtagcacatagaacttaccttatgtccttaagccattgttctctcccattgcttgagatggtacactgtgattctccaccgggaggagtggctagagatctgttcctctagatgtcatccaaccaacaaacactttttcagtatcttctgctgcactgttcaatatgatagctactagtcacacatggctacttaaatgtaaattaattaaaattatttgcttgaggtggtacactgtgattctctgctgggaggagtggctagagatctgttcctctagatgtcatccaaccaacaaacactttttcagtatcttctgctgcactgttcagtatgatagctactagtcacacatggctacttaaatgtaaattaattaaaattatttgcttgaggtggtacactgtgattctctgctgggaggagtggctagagatctgttcctctagatgtcatccaaccaacaaacactttttcagtatcttctgctgcaccgttcagtatgatagctactagtcacacatggctacttaaatgtaaattaattaaaattatttgcttgaggtggtacactgtgattctctgctgggaggagtggctagagatctgttcctctagatgtcatccaaccaacaaatactttttcagtatcttctgctgcaatgttcaatatgatagctactagtcacatatggctacttaaatgtaaattaattaaaattcaattaagcatttaggttttggttacattagccgtattataagtgcttgataggcacatgtggctagtagctatcgttatgtataggatagatataaaacatttcgtcattgcagaaaattctactggacagtgctggtctacacattccaggccaggtactggtgatgcagggaggagggagagattattcttttggaaccacgggaggcacatttcctacctcttttgattgatatacggtgggtaagaaaatgtgggtacggataagagaagtgtcgtgaaagcatttcaaatatagccaagaatatgcaaaagatgcacaggaaacagggcagaggagagaaaatctgaagtcactgatgtgattatgtggattagaggaaagagaagttcagcagaattttaatcagtcttccatttaacataatcacctattcttactcacaattaaatacagatttattgtataaccatcccgtaccagacattaagaactgccactaggctttaaagaatttaaagttcatctctgccaggctcctctgcctgtgctttaaatattcatcatcctcaggctttagtccaaggctcgtttctgctggtagttaaggtgattttatccacttacgaattcgccacttacatggcagtgactcccgaatccacaggactgtaatccagactgttcttctgaggctccagggccatatatgtagtgacctaccagggaattccatggggtgactcagaggcatctcagactccacatggccaaacctaagctgatccacttctttttctcctcttattgctcctagctcagtgaatgttgccattgtctacgtaataatgacaacaagaacaaaaataaccagcaaagtggtaagaatagcagataacctttatggagcttcttttactctgagcccttatgcacattaccacatttgaacctcataataatactatgatgtgaggattactccttctcctcctactattactaccaatactactgctactaaccaccaccctcaccgtcttataaataaggaaaggaagagaagcacaaaaagatcatgcagatagaaagtgacagctgtgactcgagtgaacacaggtctttctggagactctgctcctactcttactgtaccaccctcttacagcattggtatcacttgggagcctggaagaaattcaggatctcagaccccgctcagacctactgatgagaggctgcactttaacaagatccccaagtgatttgtgtgcgggtattgctagaatctgagaatttttttgtggtctagtattgccccttcaacttccacctgcccaccacatttgaataatgaatgagatgaggaaatcagattgaaagtatcttcctttcgcttctttctttctccagggttggccttaggtgaggtcttcacaccttcccacctgtattatggcgtccacatgtggctgattaccttctgttgtcctcatggcagcctgaatggtttctttaaaatgttaatttggtcataccaatcctttgcttaaaaccctttagtccctctaggatgaagtccagtcttcctagcttccaatgtccagcccctctggtctgtccgtcctcatatctcttggcactactactaagcagggcagttctccaaggagtgtgtgcttttttgtgtccctggcattcacctgcattttggcttttgcctaaaattcccttgcaatttcagagggtgcaattcaaatgcctgccaacatacatgttgtgagcattttgggtgagggcgatggtgaacgggtgaacagtgagctacgctgtgagtaactgcagcaaccctggccctggacagagcaggggctatctgctggaaaagtggttgcagtgagataaatatttgctttgtcagagagacaagaaatctggatttgtatgttggcaactacttgaagtttttaaaaaatgtgtggattgaggcttccttccagaatggcaaagtgttgagtgcaacattttctttccctagcaaaacaactatttgactggagaaaattataattatttaaatttttttttacaaactgtcctaaggaaatatgcaaatggaaaaacattctttcaagaaaatctactaaatatccttcagaacagcaggagtctgtggcattggagccgtgacttgttccccctacccaccgtcagcactgtcttatggaaacttctcaaggttatctgctctggtggctgtggtcaagaagtgggctccctgtccctgcaggtcctagcatacataggtccttggtatcaccccaggaagggcaggccacccacatttcacaccttctccttcctccactaggaatgcaaaagctctatgcctagtggaggtgattgagagagacaattgtgactcccttcttctactttgcctctactcatagggtgaaatttcaactccaggtgcatgagtcccaagaacacggggctccagttgccccttctccaacttgctgtcagagtggaagttccataccagaatgcacaagctaggaagaccaggagctccagggggctgccacctccttccccccagcccacgtctacctgtagagcagggtgtcattctagaagtgggcttctgtctccacctccagcttctgtgcagtggtgcagaagttctgttcggaggaaaggcaggatgaaaacctccccagctgtatttaagggactgaccttatttagaagagaggataaagaattccagctcaatgatgttgtctgaaacaacagagatcttggtggagaaaattaaagagtatgctcatagctccataatactagtagcaacaagcaaaatggcagaacaaccagaaatttaacaggaagaatcagggaaaaagattgccaagaagagccctccttggatcacacttatctctgggtcatctagaagtttgtgtgcaagccccaggctgaacctgctcaggaacaggaagactgaaaatcatttgccaaccagaacacagatccatcagcaaacagctgaagccccaccagcactaggggcttagggccaacctctgaacaaatactgcttgaacaataaactactctgactcagaggcaactactaggaagccaggattaaaaataaartcatgcacatccctggtaatctggaagactatgtgcatacctaaggctgtgctctctcaggagttaccacagagaagaaaatccaagctaccagtatgtgggtcaaaacgtaaactccctgaattgtgattgcagcctccatgccacawatatcaaggaatctaatcaaccaaggaggtttaaatccaatctctgatgaataagtggcttatgatgacccagaagcaacccctrggtagccaggctaaaagagaaaaacaagaagagaaaagraaaaaaaaaaaaagatcaagatcatgagcattaaaggctgaacactgcaggagaaatagattttgtagactctgcaaattagtttaactaggttaccaattgaataaataaacaacgaagcaaattacaatgacatctactcctgggttatatacagagttactagatgctttgtctaaaatgataagtttttaataagaaattatgagacatacaaagatacaggaaagggtaataactygtgcacaagagaaaacaaagcaacagactttagaaggggcccagatattggacttatctggtaatgacttcaaagacatcattataaatatattcaaagcactaaagttagccatgtctaaagcattaaaggaaggttataatgacaatgtctcatcaaatagaaactatcaataaagacttatacattataaagaggttccaaatgatccttctaaaactaaaaagtacaataataaaaatgaagagttcgactttcattttctggtctggcttttaaggagcttagaagtccccactgtatcctaacaacaagtaaaaagctgaaaaaatggaaaaataaactcttctcagctcttttagagaagtgacatggcagggcaaactgcttcccccaaaattggagagacagacaggtggatacagagaatcacaactttaccagagcagaaaccctgggaaccagtgctaggataggaaaacctgaactgtaaattggtgaattgtggacaagtctgagaattaaacactccaggaagacccagtcagagagcttctacacctgtgtacattttacccccaggacctctaccagatcctcacagtaaatatcagagaaaaatctcctcctgcctctgggagggaggagagaagaggtgaaaaggaatcattttgaaatatgccagattattctgtttttcttaacaaggtctgyctgaaagagaaactattttaccagagcctaacctgctggagttttatgatagcctaactgctgtggtttgaatgtttgtcttctctgaaactcatgttaaaatgtatttgccattgcgacagtatggggaggtgggaccctgaagaggtgtttaggtcgtgaaggctctgctctggtgaataggcaaatgctcttagcacgtcattatcatgagagggggtttgttatcatgggactgggctcttgttcttttcatcctctctttgttcattctgctgtgtgataccttctgccatgttataatgcagcatgaagcccctcaccagaggccagcaccttgacattagacttactagcctccagaaccaggagccaataagtttctattcattataagttacccagtctcaggtatactgttatagctgcacaaaatggactgacactaacctacctgggagaaggggaacattcaactctagcctgctttagctttctacatggtggaatgaaaatacccaactttagctccctctatccttttacatgggggaaaatatttacacttaaatttatgatcaactgattcttgacaagggtgctaagaccatgtaatgggagagagaatagtctcttcaacaaatgggtgctgagacaagtggatatctagatgcaaaataataaagttggatccctcatcacaccatacacaaatatttacacaaaatggtcatagatgtaaatataagagataaaactataaaactcttagaaaaaaatgacagcaaatcttgggagataggggttggcaagagtttcttaggtatgacaccaaaagcataggtgaaacaagattgaaaagttgaactttatcaaaactaactttgtttttcctgaaataataccatccagaaagtgcaaagactgcccatggagtgggagaaaatatttgcaaaccatacatctgataagaagtctagaatatataaagaatgcttacaaaactcaataataaagaaattaaaaatgggcaaacatatagaaaaaacttttggagctgatagatacgtttattaccttgattatgatattgtgggtgcgtgcctatgtgcagtttgtatatatcaactaaaccccaaaaaagctataaaaagggtaaaccagtgcctaccatatggtaagcatttagtaaatataggctagtttgccacctgtctctggtggtgaagtagagggtgtgtcaaaggtgactggggtctgagaacatgggaaaagggctgtggcaatgacaagaagaaggctgccagcaaggaaactaatccgggtgtagaagaggaacgggaattccttttgaagtatgttgaatgttccaatggaaacatctagcaaagattaataaaaaaagattttatccccataacaggagaattttggataaatgaatataaaatcttgctactgtgataagccactaagagttttgctttccagtgagtttgaggggtggatgaattggtcgatataacatcatacagagtgaaaggaaagattggatagcagtgttgaagtaattaaaaaaaaataatatgttataaaaatggtctcttatagatgtcttyggaagacatatccttcccaactcccatccctcagtgtcattctcatattcgtgaatgaagctctgtccattatacaacgggccatcaccagtatcatcaaccggacgccctctcgattgttgaaggaaatcatcttggtggatgatttcagctcaaatggtgagcaacgtgatcaaagaataattgtaaaaatgaccacttatcatctgtgcttggctggaaagaggttttggcttagagtttaggacaccttgggtttctcatgtagggaaaataaaaagatcatttgttaagggtctatttgtgctagccacatttaatcttcacaaagtcaagacagaggataattatctctacatggatgaggaaactgagacacaaagagatcacacagtgtgcttaaattgggctgcaacccagtggcagaggtgggagttaggccaggagcgtgtacctccaaatctacctgtacctctttttttttttttctttttctttttctttttttttttgagatggagtcttggtctgtcactcaggctagagtgcagtggtgggatctcggctcactgcaagctctgcctactgggtccgcgccattctcctgcctcagcctcccgagtagctgggactacaggcacctaccacctcrcccagcttatttttttgtatttttttagtagagacgagatttcaccatgttagccatgatggtctcgatctcctgacctcgtgatccgcccgcctcggcctctgaaagtgctgagattacaggcgtgagccactgtgcccggccacctgtgcccctcttatgcaccatgaagaagcctgggggctgaagcagagtctagagaaggactccagataccaggaagggacttagagttgctccttatgaggaacagatcactctccctgggtcattaagcctggagaaaagagagatttgggtgctgactcttcatagtggcaacagctcttgcccacagggtgcccgtgccccgagtctagcccacccaaggragagatgtggaagataacagacctgagtcctcactttctgagttcataatcccggcttctcctttgtaagtgttaggtccttgggtaactcaacgtcttcatattctgattttcttgtacacaaaatatggatgttgataataataaccattttatgaactatagtgagaattaaatgagatcataatggcagctaacattgcttgttctaagcaccttacgtgtgttaacttttttttttttttttgagatggagtttcagtcttatcatccaggctggagtgcagtggtgggatctcagcgcactgcagcctccacctcccgggttcaagcaattcttctgcctcagcctcctgagtacctgggattataggagtatgccaccacacccagctgatttttgtatttttagtagagatggggtttcaccatgttggccaagctggccttgaactcctgatctcagatggtttgcctgcctcggcctctcaaagtgctgggattacaggtgtgagccacagtgcccagccatgttaactattttaatcattacaacaaccctatgaggaaggaatcactttttgacccattgtgtagatgtgcaaaactaaggcatagactgatcaaggaacttgttcaacatcctacagctggtaagtgacagaactgagatttgaccatgaacttcagagtccagagccctggttctaaccactgtgttcccgttataatacatgaattatgtaacgcattttgcacatggtagcctctcagcaattgttggctcttagttttattaattttgtgcaacaaataaaagagagtagaattaagttacaaaaacttagaggtttggtctagcagtaaggaagaatttcttgactataagggctatgaagtggcagctcattggaggcagaatatgttccttctctgaggatctttaagtaccagataggttattgtaccttcctgagagagcaaacaaaatgactgcttaaaccttcttttttagacttccacactaaaaatacttatattcatcctttgcataccttcctctttttttatttccaatgtaactaaacaaaaaataagaaggtacaatttttagagcaaaattccgctgaaaaccaaagaaaagagactagtttcattcatttctgggcatggagactggtactgaattgcacacctggttttctgccccaaaaataggagcatgattagaaagacctctgccttggacttctgaaaacactctggctctgctccctgcctgagacaacgtcaggcaagtcccctcacctctttgggactcagggtcttcatgaggcaaagacaagagttgagctggaatattgtgaaagatatctttttctgtggaaaaaaaaaaaagtcaatactatactctatggcctatacgctatgttccatggggtgtagataagacttaattcaggattttttcctgtggaacaatgcaataaaaaaatacaagattacaaacacggggtagacacataaagaaaaaccaaagctttcttattgctctaagctgcactccattgtaacacattcctctcatttaggtctgaaacccacgtttgtttttcacagagatgatttgtttggatggtcacagaaaaggggactgtcagccattctttggtgttacagggacaggaattagagagtctctgtcattaaccacgaaaacaccagccaaattgagcctacactgagcataactcaaatatctgttttatgttaaacaggagaataaatggaagtctctaccatgtctactgaaagagaaactcactatccatgtgaatttgggggcaagtgactcaaccacttctcacctcagtttctgcatctgtaacatcagggaataatggtgcctacctgataggaccacttttgggattaaataatacgtgtaaaggcctcaggagagagcctgttcccattacatgctagctagtgttctgctcctcacctatctcagtgttatttgtagtacttttgaaatgccacaacctggtgccagaggtttgcctcctttctgtctttccctagatgttaagctttattcacatcactcaaatattttgagcttaaatgttaaatgtcactcaaatgttatgtgagatgtaagctttttaaaaattatatcaaggtaggtggaatrctgtattttctccctaattttaggaaaatttcacaatcaacaactacatgttgagtttctaccatgtgctagccactgggcagggaggaggatgtcagagagttcaagtttccttcttaattaatgaggcaagacacatctgtggaaagataccttaatgtgtgaagaataacgtgacaaaccgagtgaaccgtcagtgagcaaaagaaagcacggtgtgggggtgtggggtgtggtgatctaaggagggttcctggaggaggcaggctcggattgggacttgaaggcgtcataggatttgagacagcagagaaaatgagggaagactgggaaactgggtcggggtggagagctagggagcgccgaaggaatggtgtgaacaaaagtgaggaatccggaagcgccctgagctgaccagcctgggatagcaggctttggggaggagaccggtaggagggcaaagctgggaagggagcataggttgtcttcagaaaacccgtcgaggcgtccttaatctttgtgctatatgataggcattatttttcaggaggtgactcagaatctatggctcataaaaatttggagttggaagggtcctgactatttggtacttttcttgaaatttttaatatttgtttttctaaaaaagagacagtctcactctgttgccgaggctggcctcaatcgcctgggcttaagcactgatctgcctcaggctcccaaagtgctgggattacaggcatgagccaccatgcccactatggtacttttctctaggttgaggaatcagacacatccaatgggaagtgacacaggatgatgtagtgactgaattagaatctagatattcaggttcagtggcgcctcctgtggattactgactaaaagtagtgcctgggtaagtgtacagactggcaaccttggctaccccagcttactcccagaggaagcaaacagccttagacgtactggccctgcttagcaccttcaataattgagacaattactcttgagtgcagcagatctaaaatggggtaaattttactgccatagtcacttaggtgttgattccaggtcttgatcactctaggtctcacaaatatgctcgtcttttgagagaggaactggcaagaatctcgttccttggctatggggagagaggagagggagggaggacttggtaaacccaaccaggtactcacagagttcttgagacacggtgttctggtggctaaacacagcataggttcacatccagggcgtgccacttactagatatgtgacttggaaaagtttttaaaactctttgtgcctcagtttctttatctgtaaagtggggatattgtagtgcctaccacatgagatactttcagaattaactgaattaattttatcaatgagtaactcagagtcatttggttagatattttgcatactgctaagtgatttgcctgcaagtkgtttacttacacgtgaggaagtcagtggtaggctgagcccaagaacaaagccatagacaagctttattaaaagagagggaagagagggaagaaaactacctgtaaacaatctaggaatagtgaatcttgtttgcataatttttgggctaaatttactagctagaagctggcaaagagattaatctgtgcattctgtcccagttggtccttaagtaggtcaactgggaatatctaaaacaaaacaattttagtcatttatggattctccagagttttgagagtttagctatgaagatgttccaggccttcctgcagtgttttccatcaacctgtgcaccttaggctagatctgtccactcattctctcaagaacttctcaacgtgaaaaagcacttataacagtgcctgacacgtagtaagcagtattatcattttaagatastttaactgtcagggaaaggacattaggaatgatcacagtacacctcaggtgcaagggagaagagaggcaggtgcaggggaaatactacttattttctagttgactcttagaattgcccattttatgctggaggtagtccagccactaatatatgatagtataaaacttttgtatcacgttgattgttgcactcagaatttctataggtgtgyacttgattgacaggagaactaaaggtacacttggatragaagattaagctttacaaccagaagtatccagractactgaaaataatacggcatcctgaaaggaaaggtcttgctcaagcccgcaacactggctgggragctgccacagcagacgtggtcgccatcttggatgctcacattgaagtcaatgttgggtggtaaggctcaaagaggctagttcttctggaargggcagagaggagataktgtgcatgtactgaacacaagacaggatactgtggacacagggaaagtcagcaccaggccttaaataaagggaatctccaaaacagcatgcttttatgcagggattttgcttggctaagagaagtagcatggtggagagtattgacagttggatcataatgctgactttgccaaatactttgtgaatttgagtaagtcacttcacttaactagacattgtgtctttaactgtaaagatgaggagattagcctttggttattttaaaggtttttccccagccatgaaattacataataaaataaagagaactatgttctttagagaatgtggagaatcagacaggaaagaagcatcactttggaaacggagaaccaagagataacgtaaattcaaggagtaatatacatactgagaatgctgcttcacaacggcctgggggtgttacctgggtactaatttcaaacctgttctcgatgcgggttggcttctagcagcttcagctatcccgaaaggttacagagattctctggactctagagagttctactcacaacccagtacagcctaaatggaggaggtactcaatgtcagggcaaggtgcttggaacagctttatctgctctcccctactgcttgtcctcatatccaagctgggctttctgcacactcttgttctagggcagagccaatcttggctcggattcaggaggaccgcactgtgattgtgtctcctgtgtttgacaacattcgttytgacaccttcaaactggataagtatgaactggcagttgatgggtttaactgggaactctggtgccgctacgatgcactgccacaagcctggattgatctgcatgatgtcactgccccagtgaagtaagtctgaggagattcagggaacttgagtagcatgtgggaaggcaggaatgaactgaatggattttgtttatctttsgtggtagtaattggggtgacgtggaaggaggggaggggatgaggtgaaggacaagggatagagggaaaaaaccccaataagttatcccagttaagaaatcacagacactttgggatatttagggactttcagacaaaaatcaagcaaaacacttaaaattttggaaaacatttgggccatttcaagctttagcagactatgaagtaaggatacctagaagaaaaaggtgtaatttcaatatattttgagaagggttatgataacgcagtgggcgagggaaagctacatgcacttagtcttgcctgagagtttagggaaggccttcatgataagaacagacttaggtagagttctgaagcccaaataatcattgagcatcccacccctcgcctccgctccttatggagagattagtgactcttgctgtgtgctctgtaggagtccttcaatcatgggcatcctggctgctaacaggcacttcctgggagagatcgggtctctggatggtggaatgctcatctatggaggagagaacgtggagcttagcctgagggtgggtacatttcccttttctttatgggacaaagcagaaaggggaataatagaaaggtagtaggacccctggaatcctagaacaaggctgaatgtcattggctcaaaggtggatacattcttatgtttctaggcaactgggccaaggacggggggcaataggacttctggagtggacactcctggtatagcccatataatctgggaggtggggtgggaaggggtcaagttgggattgaatagatagatgtccctatttcacttgaggactctgggcatttttcaagcatctcctgggataaacttaaccttggagcagacaattctctagaaggccaaagacagcaaaaacaggagtgggcagcgtgaccagggaatgcagacgtgtgggcagccagcctgcttctgtactcacagccagagcagctgacgtgatagcctgagtttgtgctgagatatagtctaatctaagacaaatagccaggtttttatcattatataactgaaatcctcaaacccggccagttacggtggctcacacctgtaatcccagcactttgggaggctgaggcaggcagattgcttgagcccaggagttcaaggccagcctgggcaacatggtgaaaccttgtatctattaaaaaagaaagaaaaagaaacaataaatcctcaaaccagtgctagtcctgaccaacttctgtgtgtctggaaaaatactggcttcacacttaagcagtgatgcctcttgtctgcccctgacagcttcccatgcttgtttaggttaaatgaacaacctaaatttaaaacaaattaaattttaaatttttgtgggtacattgcaggtgtatatatttagggcgtgcatgtgatgttttgatataggcatgcaatgaataataatcatgtcatagagaatggggtatccatcccctcaagcatttatcctttgtgttacaaataatccaattatattcttttagttattttaaaatgcaaaattaaattattattaactatagtcatcctattgtgccatcaaatagtaggtcttatttgtcttattcattctttgtgactattatttttgtacccattaaccatcccctctcccccaactacccttcccggcctctggtaaccatgcttctactctctatgcccatgagttcaattgttttgatttttaaatttcacatgtaagtgagaaatacagtgtttgtctttctgtgcctggcttatttcacttaacataatgatctccagttccatctatgttgttgcaagtgacggcctcattctttttttttatggctgaataatactctattgcatactacattttctttatccattcatctgttgatggacacttagattgcttccatatcttgactgttgtgaacagtgctgcaacaaacaaaagagtgcagatatctctttgatttactgatttcctttcttttgggtatatacccagcagtgggattgctggatcatatggtagctctatttttattttttttctgaggaacctacaaactgttctccatagtggttgtactaatctacattcccaccaacagtggacgagggttcccttttctccacatcctctccagcattgttattgcctgtcttttggatataagccattttaactggagtgagatgatatctcactgtagttttgatttgcatttctctgatgatcagtgatgttgagtatcttttcacatgcctctttgccatttgtatgtcttcttttgggaaatgtctattcgaatcttttgcccattttttgattggattattaaatttttacctatagagttgtttaagctccttgcatattctggttattaatccctagtcagatgggtagtttgcaaatattttctcccattttgtgggctgtctcttcaccttgttgattgtatcttttgcggtgcagaagctttttaacttgatgttattccatttgtcaatgtttgtattggttgcctgtgcttgtggggtattgctgaagaaatctttgcccagaccagtgtcctagagattttcctcatttttttcttgtagtggtttcataatttgaggtctcagatttaagtctttaatctattttcattttatttttgtatatggtgagagatgcagacctactttcattcttctgcatatgaatatccagttttcccagcaccatttattgaagagactgtcttttccccagtgtatgtttttggcacctttgtcaaaaatgagttcactctaggtgtgtgggtttgtttctgggttctttattgtggttcactggtctatgtgtctgtttttatgctcgtaccatgctgttttggttactatagctctgtattataatttgaagtcaggtaatgtgattcctccagttttgttctttttgctaggcatggttttggttattctgggtcttttgcagttccacataaattttagaattgttttttctatttatgtgaagaatggcgttttgatagggattgtatttaatccgtatattgctttgggtagtatggacattttaataatattgattcttccaatccatgaacatggaatatctttccattttttggtgtcctcttcaatgtttttcatcagggttttatagttttcattttagagatattttttacttctttgcttaattcctaggtatttaattttatttgtggtgattgtaaatggaattacttttaaagatttcttttcagattgttcactattggcatagaaatgctactgatttttgtatgttgattgtccatcctgcaactttactgaatttatcagttcgaatagttttttggtggagtctttatgtttttccaatataagattatgtcatctgcaaacaagggtaacttgaacttcatccattccaacttggatgcctttatttatttctcttgtctaattgctctagctaggacttccagtagtacactgaataacagtggtgaaaatgggcacctttgtcatgttccagatcttagaggaaaggctttcagttatgttaaggtatgtttcttctatacttagttttttgaggggttttaaatcatgaatagaagttggattttatcaaatgccttttcagcgtcaattgaaatgatcacatggtttttgtctttcatcctgttaatatgatgtttcacattgattgatctgcatatgttgaacaatccttgcatcccagggataaatcccacttggtcataatgaatgacctttctaatgtattgtcaaattcagtttgctaatattttgttgaggatttttgtgccaatattcatcagagatattggcctgtagttttcttttcttttttttttttaacgtgtctttgtcttgttttggtagcagggtaatactggcctcatagaatgagtttggaaatgttccctcctgtattttttggaaaaatttaagtaggattggtactagtttttctttaaatattcggtagaaatcaacagtgaaaccactgagtcccaggttttcctttactgggagactttttattacagctttgatctcattacttgttattgttctgttcaggtttgggatatttttcctggttcaatcttgaaccaagttcaatgtgtctaggaatttgtccatttcttctagattttccaacttgttggcatacagttgcttataggagctgttagtgttcctttaaatttatgcagaatcagttgtaatgtctttttcaattctatttatttagatattctctctttttttcttagtctggataaaggtttgtcaattttgtttaacttttcaaaaaaccaactttttgtttcattgatttttttgtattytttatttcaatttcatttatttctactctgatctttattatttcttttttattttttaactttcattttaagttcaggggtactagcgcaggtttgttatatcagtaaacttgtgtcatggtggcttattgtacagattatttcatcacctaggtattaagcctagtctccgttagttatttttcctgatcttctccctcctcccaccctccaccctccaccctccaaaaggcctcagcgtgagttgttcccctctttgtgttcatgtgttctcatcatttaacttccacttaaaagtgagaacatgtggtatttggttttctgttcctgagttagtttgctaaggataatggcctccagctccatccatgtccttgcaaaggacatgatttcattttttatggctgcacggtattccttggtgtgtatgtactacattttcattatccagtctatcattgatgggcatttaggttgatttcatgtctttgctattgtgaatagctctacaatgaacatacatgtgtatgatttataatcctttgggtatatacccagtaaagggattgctgggttgaatggtatctctgtctttagatctttgaggaatcaacacactgccttctacaatggctgaactaattcacactcccatcawcagtgtacaagcattcctttttcttcacaaccttgccagcatctgttattttcttctttttaataataaccaccttacttcaaactatactacagggctacaacaaccaaaacatcatggtactagtacaaaaacggacacatagaccaatggaacagaatagagaacccagaaaaaagaccacacacctgtaactatctgatcttcaacaaacctgacaaaaacaagcaatggggaaaggattccctattcaataaatggtgctgggataactggctagccatatgcagaagattgaaactggacctcttccttacaccatatacaaaaattaactcaagatggattaaaacttaaatgtaaaactcaaaactataaaaaccctggaagacaacctaggcagtaccattcaggacatagggacaggcaaagatttcatgacaaagatgccaaaagcaatagcaacaaaaggaaaaatggacaaatgtgatctattagttatttcctactacaattttggatttggtttcctcttgcttttctagttctttaagatgcatcattagattgtttgaaatttttactgtttttgatgtaggcacttagaataaacattcctcttagtactgtttttgctatattccataggttttggtatgttgtgtttccattatcatttgttttaagaaattttccaatttccttcttaatttcttcattgactcactggtcattcaggagcatattgtttaatttccatgtgtctgtatagtttcccaaatttctcttgttattgatttctagttttattccactgtggtcagagaagatgcatgcgattatttttattttttgaatgttttaagacttgtttgtgacctaacatatggtctgtccttgagaatgatccatgtgctgaggagaagtgtattccgcagccactggatgaaatgtctgtaaatatctattagatacactttgtctatagtacagattaagtctgatgtttctttgttgattttctgtctggaagatctgtccagtgctgaaaataggatgttaaagtcttctgctattactgtattggggcctatctctctatttagctctaataatatttgctttatatatctggatgctccagtgttgggtgcatatatatttaaaattgttatagcctctggctaaattgaccccttttttattatatagtgaccttctttgtctcttcttatagtttttgtcttgaaatctattttgcctgatataaatatagctactcggctttgttttggtttccattggtatggaatatctttttccatccctttatttttagtttatgcgtgtttttataggtgaagtatgtttcttataggcaacagatcagtgggtcttgttttttcattcatttggccactctatgtyttgattggagagttaagtccatttacattcaatgttattattgataagaaaggacttacttctgctattttgttatctgttttctgattgttttgtggtcttttctttcttgtttcttctctttcctgtcttcctctagtgaaggtgattttctctgttgatatgatttagtttcttgctttttatttttttgtgtatctgttgtatgttttttggtttggggttttcatgaggcttgcaatactatcttatcatccattattttaagatgatgatggcttaacactatttgcataaacagacaaccaaacaattgaaaaaaaaaaaaactaataaawactctacaccttgactttgtccccccactttttaactttttgttgtttctatttatatcttactgtactatgtcttgaaaaggttttgtagttattattgttgatcgattcattatttagactttctatttaggataagagtagtttatacaccacagttacagtgttataatattctgtggttttctgtgtactgactatcaccagtgaattttatccctatagatgattacttagggctcattaacatccttttctttctgactgaagtactccctttagcatttcttgtaggattggtctggtgttgatgaagtctttcagcttttgtttttgtgggaaagtctttatttctccttcatgtctgaaggatattttcactgtatatgttgttctagggtaaaagttttttccttcaacactttacatatgtcatgtcactctctcctggcctgtaaggtttccatggaaaagtctgctgccagaaagtatgggagctgcattgtacgttgtcctcttgctgcttttagcatcctttctttatccttgatctttgggagtttgattattaaatgccttgaggtagttttctttgggttaaatctgcttagtgttctgtaacattcttgtacttggacattgatatctttctctaggtttgggaagttctgtgttgttatccctttgaataaactttctacccctatctctttctctacctcctctttcaggcctgtaactcttacatttttccttttgaggctattttctagatgctgtaggcgtgcttcattgctttgtattcttttttcttttgtctcctctgactatgtattttacaaatagcctgtcctcaagcttactgattctcccttctgtttgaccaattctgctattaaaagatactggtgcattcttcagtatgccagttgcatttatcagctccagaatttctgcttgattgttttttattatttccatctcattgttaaatttatctgatagaattctgaattccttctctaattatcttgaatttctttgagtttcctcaaaacagctattttgaattttccatctgaaaggtcccttgtctctgtttctctaggattggtcccttcattcatttggtgagatcatgttttcctgaattatcttgatacttgtaaatgttcttctgtgtctgagcattgaagagttagtctacttattctaagtaaagactacttattgtagtctttactgtctaggcttgtttgtacccatccttcttgggaaggctttccagatattcaaaaagacatgggtgttatggtctaagctgtacctgctttagggggcaccccaagcccagtaatgctgtggttcttccagactcrtagaagtaccaccttgatggtcttggataagatccgggagaatcctgtggattaccaggcagagacccttgttctcttcccttacgtctcccaaacaaatggagtctatctctctttctgttctgagctacctaaagctgggggtggagtgacacaagcaaccccgtgaccaccgccactgtgactgctctgggtcagacctgaagstagcacagaactgggtctcactcaaggcctgctgtaaccactcactgtgtacttcctatgttcccttgagaccctggtgctctacaatcagtaggtggcaaagccaggacacaggacacaggcctgtgtccttcctttcggggccgtgtgttcctccaggtcccaagtgggtccagaggtgctgtctggcagtcagacactaaagtaaaataccttaaaagtctacctcatgttttattatattgtgactgagcttgactgagctggcactcaaaccacaagacacacttcttcccactcttccctcctctttccaaagttagaggccagtgccaccacagacccacagggagtcctgccagactaccactcatgttcccttagggcccaaggactctcaagttagcttatgatgaatgctgcctggcttaagactcacccatcagggaagtgggctcccttctggcccagagcaggtccagaaatgccatctaagagtcaagtcctggaatcagggacccccaagagactgcttggtgctctacccacctgtggccgagctggtacctaaagccagcaagtctcagagacttacccacggccctcaatgtagtattgggtattgctgctagttgttcagggtcccagggctcttcacctagcaggtgataaatgctgccaggactgggtccttcccttcaaggcagcgagctcccttctggcccagggtgtgtttagaaatgtcatctgggagctagggcctggaccagggaccacacaactctgactgatttcctagcctgctgtaactgagctgatatccaagatgcagtcaaagtcctcctcacttctccctctcctctcctcaagtggaaggaaggggtctgttttggagctgcaagttgtacatcctggggttagggatgggtcatgccagtactgccttagtggccccaattgatatttcagtaggttgtgtgacctgcctccccacccccaatccactgtctctgggcccagttcagcactaggattcccctaatagttgcctagactgcctttcaggcttacttagagactcaaagcactttagcctggtggcaaggtttgtgggaactcaaggtcctacttctgggatcagtgatttccctctggctggggctggtttaaatgctccctctttgggtgggcatcagctgagtttggttcagttttcctttctgctctaacaggacagcactgagttgagtgcctcacgattgctgtgctcttcctcccccaacacacagaaatgctgtctacaccatgctgcagctactggggatgggggaggggtagcatcagtgattcgctactgtcctttctacctcttcagtgcctttttcagcaatatgaagttaaaatatgagtactgtgagtgcttaactgatttttggttcttatgaaggtgctttgcttgtgtaaatagtggttaaatttgtatccttgtcagggggatgattggtggagccttctagtcmaccatcttgctccaccacttctmccaacctgaatttttgtgctctataagggaattcaggatgcaaaccaagaaaaatagagaaattacaagtgcagattcaagatatgtcagtgtattggttaactcttgccaaaaaatgtcacgcaataaatcaacccaaactcagtgccttaaagcagcaataatcaattctcacagatttgcagatccagctggcttggatggagtggccgtgttccacatgtgttcactctggggctcaggcaaatgtgggatagcagctacctaggacagaaagctcttcttacggtgtgtaagagggcaaatgggaccatgtgaagtctcgtaaggcctaggtttagaagtagcaaactatttcagagtaagtcacatggccaaccctgaaatggtgtgaagaattagggccaataaatttcatgaatcagaatcaatttagaagagattttgtggataaaatatcatttccacagtatctcttttacctttttggtgtaatctacagggcctcattagaaggggctggcccgggggtttgtgattgttcttggtagttcatcttttttyatcttccagcctaaggccgaactcttaaaagaggcaatggaaagtagtcraaattacacaggtgttggagacagacagacttaagtcaaaatcctgctttgcctcttaagagtttttgtgcaacatacaagccctctaagccatacctgctgcattaagcacctagtatggtgagtgacatatggtttacactcaataaatgtttaacggtaaaaatgacaataataagaatgtcagggtggcattgtaacaaacactgaccctgagttgtaatgctgtctctgctaagtcactgtggactaagcttctrtaagatgaccttttttccccctccaagccctgaaattctgtgcttgtgacaaggtgatctctgatccactgtggtgtctggaggaacaaagtaatttcccatctagagtttatttcattccactgtctttaatttctttctaactgaaactgatgaccccatagccatgtactgtacccagtaaggacccactcaggactccacatttaatgttaacaaatgaattttgagtcttttctgggttataccttaagccataatcattctttggcagagaaaactaaccttttttggatggtggttgatrtggttaggctttgtgtccgcactcatatctcatcttaaattataatccccataatccccatgtgtcaaaggagagaccaggtggaggtcattggatcatgtcgggggggttttccccaggtkgttctcctgatagtgagtgagttttcacaagatctgatggttttataagtgtttggtagttcctcctgckttcattctccttcctgctgccttgtgaagaaggtgccttgcttcccctttgccttctgccatgattgtaattttcctgaggcttccctagccatgctgaattgtgagtcaatgaaacctctttcctataagttacccagtctcaggcagttctctatggcagtgtgaaaacagacaaatgcagtggtctgatcagttttcccatttgtgaaatgaagagaagcattttgtttaatgtacctcataagaatgatggtacagtcacaatgtaataatgaatttgatataattttataaagatattaattagaatgctcattcagcttctctgacagaggctaaaataacagaagcttcaacatgatagaaattaatttctctttcctataacagtttgaacataagcagttcaggattgatatggcagctctagggtgataggggccaagacttttatttggtggtcctgccacactcaacaccatatttgtattctagccagtaggaagataaaagggggaaagagagagagcaagctctttctttttaagagcactacctgaaagttgtgtatattatttcttttcacattctgttggccattacctagttacrtggccacacctgtgtgcaaaggagtctgggaaatatagattttagttactgggttatgtgcccagatgtttcttctatcactgtagatatagagcagaatagacactgggagtacaggtactgtctaacacaaaaaatataaatgcaaaaataataactttatttacggtacttagcaaagtcttgaggatgaccctagttacactgtggctaggttttcttacctaccagagctttaggtgaattccccaattcttcaacttaagacccaaagccctcattatttctgagttcctkatgctttgttctctccttctgcacctaggctgagtctctctgttttcattctcccaaacacacacagaacactgccatttcagtttctacaagacatyctttcttttaatattttgtgatttttaaaatggactttgcttaaaatatagggtcatccttttcctttttttttggatcaagcagttctgcccatatccagcttcttggtttgtgtgagactatttgcctyttaaaacatctaagtacttattaggatttttctccagtagcagatcttgaacatcagagctgcatggagtgctttattctgacatctagtggccatgacagggatggtgctcatcaatgtgtgtaaatggagatgatgggtaggaaaggttaagaagggagatgatgggtaggaaagaaaaaacagcatttgttgagcaccttgtatatttcacacactgtgccagaactgaacatgtaacttcctgggctcacaatgcagctctgtcatttactagctggtaaacatgggcaggttacttaaagggagatacctgtatggtgaggactaaatttatgcaaagtgttaggacagyatatggcacaaagtaatatattattatcagcagaagcttaatgtctctgtgtgtgtgtgtgtgtgtgtgtgtgtgagagagagagagagagagagagagagagagagagagagrtgatggaaggaatttggcaagtgggaataaatttggagagcagagtttgaaaacttttgggcaaagctaattatgggcattacttcataaacggcaatctttttttttttttcttttgagacagagtcttgctctgtttcccaggctggcgtgcagtggcgcaatctaggctcattgcaacctccacctcccaggttcaagtgattctcctgcctcagctcctgagtagctggaattacaggtgtgcaccaccacaccaggctaatttttgtatttgtagtagagacagggtttcaccatgttggccaggctggtctcaaattcctgacctcaagtgatctgcctgcctcggcctcccaaattgctgggattacaggcatgaaccaccacacctggcctcagcaatcttgacttttaacttgaatttaagatttcttatgataacagttaatttttctccctgaattcacgtgagttgaaaacctccatcagctaggaaaattggagtaaggtaatatttggatttttgaatgtttggctagagagaataataatatctgagtgcaagctggatgtaacctccacatgattctgggggccaatgaggagagccagagaaggataatgaaagaaaatgtgcacttcaggttatctcagaggctgccataactgattccttgttacatcatttaatcccagtgaaaacccaaatagtggctgtgcccttatagcagatgaataagttgagggtcaacttattccatcattgcacacctggcagctagaggcaaaacactctagctgccaggtgtgcaatgatggaaccagaatttgaacataggtcagtctgatttcaaagccttgcttttttttcttttttttttagtccattgttctggcaaatagggtgcaaaggaaggggaatctagggttttaagaagtgaagaaaaggatgaaaacaatttgaaagtcagataatgagactgactactcagttggacactcttgataagttaactgaaccgccgtggcctaagctacacactgttatctcaggtgctcccattggcatgagcgtggtaggttgctagccactgctatgggctaattaccttccagaaactgcatctcacttaggcaaccgtgaagagaagacacaggagacatcacgtckatccaatatgattaaatagtcctattagctactgagatgaacataatattttctaagctcaatattagaatgtgtgttttgattagtatgttttgtacccatcaggatggtaaaaatgagtatttgtaattgggtcataaggcatttggtcaagttatgcaaattagttatctattgctgtataacgatgttatcaccagcttagtgttttaaagcaagatgcattcattatttcacagtttctgcgggtcagaggtccatgcacagtttagctgggtcttctgtaaggctgccatcaaggtgtcagccagagttgggttctcatctgggctccactggggaaagatctgctttcaagctcacattattgttggcagcattcagttccttgaagtcttccaggctgaggaagcattcagttttatgctgggtatcagttggaagccactcttaatgtcttccctttttatgtgttagctgacagcatggcagcttccttcttcaaagccaacaaaagagagcatctcttggcaaaatggaccctccaatcttatgcagtgtattcatgatccatgtaatcaagcacatcctgccatccttgccatattctgttggttagaagcaggtcacaggcccacactcaaggggaggggatcaggcaaggctgtagacaccaggaggagggatcatggggtcactttggcgtctgtctgccacattgccctttgtctagcatgcaggcagagaaggggcatgaggaacttagtgcagtgagagtggctcagggcatggtgcctctcaggacatgggcactttccttggggataagggagcagaggcagcccctcctttggtccatgtaggaggacttcctgaaagaagtatgattcaggagttgtttgaatgacagragagaagcagttcagtagacttctaaggaaagatgatttagataagaaagttagaggaggcaatataaaggcaggagtgggaggactgagcttacattctttaaaaacggctctaaaatgtagtcttcttgtgtcaataagctatgcaattcattggctgtgaagcacgggtgattttttggtcttcttctgcaggtgtggcagtgtggagggaaggtcgagattttgccctgttcccggattgcccacctagagagacaccacaagccctacgccttggatctcaccgctgccttgaagcgcaatgctctgcgagtggccgaaatctggatggatgagcacaaacacatggtctacttggcctggaacatacctctccaggtgagtcatggaattgaacagcagcacrgaagaatgaaagaggaggaggtggcrgttatgtaatggggagggataaagcaaaagtgccatcgcagccctaaagaattagggtaaggtcctgatggtgtgataataatggctcttaacatttatgtaacagtacagtactgcattccggacccttctatatattaacttattagccgtcacaacatatgtaggggataggttttatttttattattctaaattttacagatgaggaagctgaggcacagagagttggaagaaacttgtttaaggtaatgcagggagtaagattcaaaccaaggaaatctggcttctaagttccatgttcttcatctctcttttataatgagagatataaacatagcaggtatgatgtggggtggtaggagaaggcactgtaatcttgttggatgcacaagaatgaggatagcattcttttttaagttttttttttggtacagatagggtcttgctattttgcccaggctggtctggaactcctggcctcccaaaatgttgagtttaaaagtgttagcccctgcacccagccaaggwtggccttctgagctaagcccacatcttatacactggctgcttaaggtcgtgctgtgctctctcgtgtccctgagctctggctccgggccagagcatgtggagctgtgttggcccacagggaggagttatctcattgacaaactcatccctccatcgtagtgggttctaatgtagcccccagaaagacagggagtcaggatggtgggtaactgtggatggacctagaagagaaagtctggaaggactcctagggtcaggagccaggttaacactgggatcactaggtctggagattgtaaaaatgtgcagaaatgcctgagccttctttatcatttaaagataccaaaatgcttcctttcctaatccaagctgccaataacctcttacagttggatcattgtttgaagagagatgggtaagagttgattctgatgtcccagtataccaaggtatgataggaaaacaagtaccctccaggacatccctagcttttttatttccacacagtcatattgtgactgtcccaagctgtacaaagaattgtctgtaaaatactgaacygtcaaaggatgatctaaatttttacatgggatgatccacaatgagccccaaaggaaaattctgggaagagggcagatacacaagtggtttctgcttttcctaatttgcctctttagtattattttacattgattccccacaaatatcacttctaaaaaagtctcttttaatctccaaatcttggtattagagtattccttccaaaagccttttctggccatatcatgaggagtatgttgggttttattgatgtaaatatcatctcaaagaggagcaatctgcgtaagcttatgaggagaaataaacctgagcggccccactatgcaggccttgaaggagcagaatttgaaagagcagaattttctagggtttaaggtttttccactttctctggaaatataaaatatcaaggttacttcacaggctatcagaaaaagactcagttccatcatgcgtggtccatacccactggtggagtgaaggagctgttaaaagaaaaacttcagccaaattaaatttaaaggagtttagctgagcaatgaatgattcgcaaatgcggcagcacccagaatcacagcagattcagagactccagcgcagccatgtggtggaagaagatttatagaccaaaaaaaagggaagtgacgtacagacatcggaagtgaggtacagaaacagctggattggttacagctccgtgtttgccttatttgaacacttgaacactggacaatggatgaatggttgaagtatggctgctgggattggccaagacccagctattgttacaggtgcatagtcctaagttagggtttcaatcttgtctatccattaagttgggttgcagtccgtccacaaggactcacatgcagaaatatggagtccttctcaggccatatttagttcgctttaacagagctttcatgaatcaaagcacagaaacacttggcgttttatttacagaactctggaatagatwttggagacgtttcttccagaatggcactccgggaaaaactgaaatgtaaaacttttgactggtacctgaaaaatgtttatccactcttgaagccactccacaccatcgtgggctatggaagagtatgtattatgaaattgcactttggattttaaatgtttgactgtgaaagacaatgcggcctgaatctcgtgaytgcctgtcctgcccaagacgcccttcctacctcagctttctactcagctcttcgccctcaaccctctcagtttccttttgtcccttgctccccgatccccatctcttttccttctctctgcttctactccccttgaaaactrtagctcttgcctggactcccccccgccccgcccccgtttctccagcagctgcagcgattggccttgtccgcctgaactccgcagaggcgcccctccctgtgtgtgtggtgatgggctgaggtgatgggtgtttcccggatgtgggcagcgcagcagcgcctcccttcggcgctggtctgtttcccagtgcttagaaaatgcctgccgggatcccagccctctgctcctwgtggctggtcgttcctggtgtcctcggtgtgttggggaaaatgtaggccctgggagggatggcgcctcattctctgtcctttctaacagtgttgccgtgtgttttgtccccttcagatgaaaaacctattggatgaaaatgtctgcttggatcagggaccykttccaggcaacacccccatcatgtattactgccatgaattcagctcacaggtatcttccacaatcttcctggccctgcctgggcaagtctgtcgtggctcagcccctggtaaccattgctgggtctggactccgtgatacgtgatggggaggcaggagcggagcatcctgggtaagggtgaaatccagacctgcacttgtaactgagcacgtcttagtttcttcagaaagccgtggcaacgtagttccatttcagttacagggaggataggtagaaaagctatgctctgtcacattcattctgcatggtgatatttgcattgacaatcacctctggtcccttccttttcccctcctcccactgctcccgccatcttctcactgctactggaaagcctgggaaagtggacaggtgaagccacctgtgcttctcctatagcgaaggaagcagagctagagaggatagaggctgagcagacgctcctccaagggatggaagggccctggcaccatgtggaaggtgcagtcaggggatttttttttttttttttttttttttttttttgagacagagtctcgatctgtcgcccaggctggagtgcagtggcgcggtctcagctcactgcaagctctgccttctgggttcacggcattctcctgcctcagcctccctagtagctgggactacaggcacctgccaccatgcccggctaattttttgtattttttttttttttagcagagacggggtttcaccatgttagccaggatrgtctcgatctcctgatctcgtgatccgcccaccttggcctcccaaagtgctgggattataggctggagccgccgcacctggcctggacattttttttttttttagggacaatattcacatctgtcttcttactttgcatgctgccctcatagcaaccttttgaggcatgcacaatagatatcatttgcacttagttgaaaaaatggagacacattaataacctacttgtccaagctcactgagcaagatagtgtcagaccaggaatttgaaaggttttctgacaacaaacccatagctgaggcctgcagtgacagattctggagttcagttttgttttttcttcaaagacaagcttcttcatccatgtaagctatgattctgttggaaccctcctaggcctggccttctccctggattcaaggagagactaaggagaaggaagcagaggttgcttcatgttgtccaggaaggttcagtgctcttggtgtgactgggtgtctaggggccccaagatcattcttcctgctgtccctcgggctagggtctcctgctggctgacaatgcctatggtgagccctctgcttttttttttttttttttttttttagaatgtctactatcacctaactggggagctctatgtgggacaactgattgcagaggccagtgctagtgatcgctgcctgacagaccctggcaaggcggagaagcccaccttagaaccatgctccaaggcagctaagaatagactgcatatatattgggattttaaaccggtgagttatgtgtttttgtttgttggtttgtttgttttgttttgttttgttttgagactgagtcttgctctgcagcccaggctagagtgcagtggcttctcagctgactgaggctactgacagaaaagagatttgggttggctgtgagatctggaaggcaggacatccagggaaattctgccaaccattctaacctacagtctgggtccatttctatggccactatgtcaagaacacaaaaattgaaaagggaggtgatcatgtaatttctggtgtgttacctaatattgcagtcttggctcactgcaacctctgcctcccaggtcctggttcaagcaattctcctgcctcagccttctgagtagctgggattacaggcacatgccaccatgcccagttaatttttgtgtctttggtagagacggggtttcaccatggctggtcttgaattcctgacttygtgatccgcccgactcagcctcccaaagcgctgggattacaggtgtgagccactgtgcctggcgagttacatgttttttaaakgataggtatatgaaaggttcagatttgatttgatagtgttttaggagaattacttcttgtggccccgtgtagggaaaakattggaaacagggaactggtaagaaacactgagtctcttgactaaggcagggtggttaaggagaagaaatattggagtctgttgtagctgaacggttgagagtttgggcacaagtcctagctcagtatagcaatttccttaccctctctgaagctcagtttcctcattataaaatgatggagatgataatatcttctgtatgcgacttttgggaggattaaatgagatagcgtgtgtaaagcatttcacgtggtgcctggagcagaagagtgttcaatackcattagccattgtgatccatttattattaatgattatcagagggtgtggaatactatgctgaaatctgacagaggctaatgtagaagctctgcctttaacttcaatatcaaatgaccaaggacagggcggagggaatctggcagaattcatgtgatgatgacgcgagggtcttggctgacaacagtctgtggggaatttataatggatgggcttgctccaaaagcttctgcactcttgggccaattcattaggaaggggcagtacctcctggagggagctactgctctgtctctgactgtgtctctgaatgcggtactatgcttggttcaggtgccacacggacaatctagttcaacagtttctaacttttcaaagttaatgacccctttgagaattcattgctagctatggagtctstctccaggaaaacatacatatgacctatgtgcaagatttgcttacagtttcagaggttttttgcatcctagattaagcttccctgaactagacaatatcaattagaaggaggagggtaatgtcttctcagtctctgatgtctcactttaagctccaattctatggaactacatgtaattcagtgaaaatccaggttccctctgaccttaggcctttctgcaggtattattccctcccctcccgcttcttcaccaggccaactacaaagtgttcccctggccttagacatcatcttccttgggaagctttctgtgaccccagaggagtcggttgggtggttcctctaattgctctcaggggtgcttttgtagccctggtctcaccatctcttgcaattgtctgctcacttttttcttttcatcatttggctgtgagctggaggccagggcctggggtttgctgttttttctctagcatctggcacaacccctagaacatggcaggcactcaacaaatggttgcagagcaaatggaagattggcaggcctggagatattagcttgaaaggcttgttaggcttatggatagagaaaaggtgatgctgtctttgtgaggaagagggagcagatttgtttaatgttgcaggagggcggaactgagacccacagataaagattaaggaggcagattttgacttaatgtaggagcaaggggaggacttactaaaggccttacagcttcaggtttcctacagaagaataggctgctgagcatagtggtgagttctctgtcaatggcagtcaccaagcacagcatgtctgagcatctggcagacctagggtgctaaatatgagtttttgatggccttaatcatatcttttttgttcgtgtgaagaaaactacaacaagttactttgttttaaaaaattaatattcattgtattcaagttataaattaaaacatttaatgagatagtgtgtgtaaagcatttagcatggtactcggtgcaaaggagtgttcaaagaatcatggtttttctttaagcttttaagttcagcttacaaattttactattttatctataagcctaacaagttttgacaatcccctttaaagaagaytttttaatttaataaattaaattccattaaacatgatgagctgtatttacaaatttaatatgttaaatttcctttcttaagaacttcaattacctgactttaaatttttcaattcttaagttctcttaaatgtttcagaagtgtttataaagtcagtaaaatttcaccatcgagtcaccaatttaattactcaaatacacattttaaaattgctatcacaagattaatctgtaagatgccaattttcttagatacaagtacttaaaaatagtaaatatacacagaatctttggcaagtactatgtatttgattcccttaatagctatactttatcctaaacctcgtaagaattaaagatacaatgtattctaaagaaataatatttttagataaaattttattctcattttttcatatcttttttttgtgttttttcttttcatgataacagcctaccattactaaataaataattatgcattccaaacattttgaaggttgccttgccaagaaaattttggatgatcgccttctcagctgactgaggctactgacagaaaagagatttgggttggctgtgagatctggaaggcagaacatccagggaaattctgccaaccattctaacatacaggctgggtccatttctatggccactatgtcaagaaccacaaaaattgaaaagggaggtgatcgtgtaatttctggtgtgttacctaatattaagttagtgttgagtgggttcactccatctaatccttttccatccatcttacctcttaggtctataattctttcagatatgaaaaatgatacttgattgaatgttgggctcttctggttctcactttactttgtagacacaacttacaaattaatttactaaaaagttaccaaagaaattttccaaaattgagagggagatgagactagatcatcccttcgttttctttgatttcatgattctgtgttttgggtgtaccagaggaggctatgacccttgtgactcacaagagagccagtgatggggtggggacccagttcaagaagagaagggctagtcagacacatggactttaagttgaggagcacagcgttaagatagtgtgccactgaaataagggggcatttggagaaggtcatccatcttcggggtgaagcaacagctcacaatacaaagagggtctctgtgaggagtagtgaggaatagtgaggaggaggagagcactcgtggtgaggggttggaagtttggggaaagaggaagtggggagggagtgctcccacacaccactggtgagcatggagactggcacggctccagaagcaacttgcccacgtgtaggaaaaccagacactcctcagaacccaaactaactacaaccctttttaaggcactgattcttttttaggacaatatcgttacttaaagaatagtacagaacataggccaggattaatgtagaaaatatcttaatacttatcacagtgaaacacaaggaaaaattaaatgtccaacagcaggggaggttttgctcatctcttgaactgaatattatatagccattcaaatgatgttctcaagaaatctatttcaaaaaattaataaaattggaaaagatgtatatagaatgttaaatttatataaagaagcaagatgtaaagaccacatatacaatattatcttgttatgagtgcttttatatactttatatataaaatattttaaaatatattttctataaatacacttctagtcaatcatcccctcccctgaaagccatcagcgatcctgaggacatgacctcatggatgatctcagaggagctgctccatgcccgcctcacctgccagcagcccatgtgccctgagccctgaccatttattttaaagtattttatatactttaaaaatgttttccaagttaaaaaagaagcatctattacttttgtaaaagtgaaaaagaaacaaaaagagaaatccttttaaaaactctgacacgcagcaccccaaaataaaaaccaaaatggccgggcacggtggctcacgcctataaccccagcactttgggaggccgaggcgggcagaccatgaactgaggtcaggagtttgagaccagcctggccaacatggtgaaatcctgtctctactaaaaatacaaaaattagctggtygtggtggtgggcgcctgtaatcccaaccacctgggaggctgaggcaggagaattacctgaacccgggaggcggaggttgcaaggagccaagatcatgccactgcactctatcctggacaacagagcgagactstgtctcaaaagaaaaaamaaaaaacaaaaaacaaacaacaaaaaaaatcaaacccaaaacaaaaatgtgtaagatacagatgaacacaatttgaaagaaactagaggatgtgtggaacactgtcaaagctcatgtcatgtggaagttgagtggaaatagaaaacagaccactgactttgtctaaaaggtcacaataaattattggtcacaataatttattgtgaccaataataaattattgtgaccaagagttattgaatacatatttgcaccatgcattgggttaaacattttctcatttagttcttataaaacatagtcttatatgagaagtgtgatcactagctccatctcacccatgaagtaactggggcactgaggagtccaattatttgctgagggctacacagtgtagtaaatgcccagcactcaaacacggaatcttaaccactgtgtgctattgcctcgttgcttgggaatttgattctgaaagggagagaaactgaatgtttgttgaaagggatagtagagttaaggtctgggtttattttgtccttctaatatcgtgacatttggacatgtttaaaggcagtagaaaaggaatctgcaaagagggagaaataaaagatggatgttaggaatagtgtttctctagcatcgaggatggctggggctcagggaacagaggggggctgctggcgggtgaggcgggcatggggccgctcttttgagatcatctgtgaggctgtgtcctcaggatcgctgatggcttgcaggggacgggaagattgaataggagtgtggtgttcttgacatttagttaaagtgagtgccaggtgggggctgacagacgaagcatgctgaggaggcctggaagaggaaccctgaggagtaagctgagccctggggccaggctgctgtgggcaggtttatgagccaggcctgctcagttggcagaccctgtccacaagcactctgtggtctggaagcaaagagagaggagtggtggcagtggtggaggagaagttccagaatctgaagcgttgccctgaatggccaatgctggatgggtgcccagaggaggaaagggtggttggggctggggggagtccagggacaggcaaattttggggggagcaagggctgttagaggcagtttgtgattggaagagatgagaggcagggaggtgatggtgagagaggaagcagaaatttggagatgttacagctgcagtcagtcccacttggtgctcaagaacttggtggcagtttgtctgaaggggaacagtgaggtcagggtttctcactagccatcagaatgaatgttatgcaccctgaggatgatagcagagtgcagggcataaaaaggaaagagcctgacccaggcagtaatgtagatcatgtgagtcctgcaaagggtggagagggaacgtgggagagagagggccgggagcagagggcaggaccaggagagacggtagtttggacagatggcaggagtgtcagttgctgagatatgaagataagggggaagacttggagagattaggtaatttgcccaagcccacacggttcgtatgtggtagagcaaggattcagccctgactttgtagcactaaagcctatcatgttcccagttataaaccttagcgaagtcccctcaataggagaggcgggaagctgcctcagaggctgagattcctgactgtagctcctgctccaggcccacaacacagtttccctgaagagggagagaagcacaaggtgaaggtgaccctgatgggtctcatggggtcaggggtgaggacgtggagaggagggccaagttgagaaggcccacggttctcacagatgccttcgttccatggtagtcagtactgacccaatgcttccatctcaggagaggctgagggcatcacacgaagccagcgcaacatcgcctggttagtcagtttgccatggggctggtagaggaagcacggggtgatctcatcctacattctgcttccctttcttccctggatgacttgtggagcactgaggggtccctcaagaatgtggctgagcacagcagggagagcagggctagaagagatgatgaattactgaggcatttcagcaccttggctctgtctctcttcccctccagggaggagctgtcataaacagagataccaagcggtgtctggagatgaagaaggatcttttgggtagccacrtgcttgtgctccagacctgtagcacgcaagtgtgggaaatccagcacactgtcagagactggggtcagaccaacagccagtgatcytcagatggygctggatctgggtcatcaattcttgcaagtggaatggcttctactcctaacactcccagcttctttctcaatgagaaagaaagcatgtgtatgtcygtttatggcgacttcaggtggggcctgtgcgtgtgccggggtgtctctgttggagagaggagaggaagctctgatgcctcgtccccagcttccctgggaaggtcgtgatatatatcaaatgccattcttggaaactccttgaaataaccagcatcttttggctgttacrtggggagagaaggaggaggttggaagtttatctttgacttctgcccacgatgtttagccttccttcccgacagctactgtcgccatctgccccacacctcctccccagctcatctgcttggggactccccaggctgccgggggccattccacgtgagaggctgggccctcctcaggccggcagcatgacacctcttcaggtagcactaattctccctcctgcctggactgtcctgagagatgcagaaaatagataagtgacttttaaacattcctccattcatccttccatggcagttttatttggatgatcagtctctcccacaccaaagagattctggaggctgaggggaggagagaaggcacctcgactcatcacagctgtccaggggacagtgtgttgagaagggtaagaaaatccagggccatcaaagcctttctcttagtaggtcataacatttaatgacttaattacctattccctcctcctactcttgcaaattatggagaagatgaggcttgaatcagaggggcatcgcttgttgtgggcaaagaagagattgcaggcaaaatcttaaaaccagggattctacggctgcccactggataaatattttctgctagttggtgagttgggaagatatagctcagcctgccaatttttggcaaggtcttggaggctggtgggaccaggcaccatggtgggagaggaggtaggatggtcctgtgcgtgtggtgtgttgtgggattacccttcaagcatgtgctcccagaaccccttcttcagagggccacttttctctcttagtcccgtgtcagggctgcctggaaatgatttggggaatcattaggttttcttcaggccttaggcaagcaggacagtgataatttggtacagaatttaatcaattaaaacttataaaaatgaacttttaaaagtgtacaggttatagatagcttgattaaaatttcactatgaacactgccatatcaagaactaaaactactgcagatacgattttattatgaaaaaatcaagggacaagatgaatgttaagcaaatgtataacttctagcttctgcctggcaaattgaagggaaaatgcagttcacagcaaagtttcgaaaaagcatgtacccaatagaaagttggataaaagacacaatacttaaacatatgaaaagatgtttaacctcattcgtagttagagaaatgcaaattaaaactgtattgagatacttttcacttaaattggtaaaaattaaaaagtaagacagcacattcttttggaagggctgtgagaaacaggcaatcttatacataaggcaaactggggatatttagcaatatctaaagaaactgtatgtacattttctatttgtgccagtaattccacctctagagatttaccttaaaaataagaaaatacttagcacaaagtgactctttgcagtattcattgtaactgagaaatgttgaaaaaaaaaaagatgtggctgaacatcagagaataattgaatacctccatataatggagtactatgcagctatgataaagaacaaagactctttctctgaactgatatggggtgatttccagtatcttttgttaagcgggaaaagaaaaatagtatctatactatgtaccttttaggtaagaaataagagaaaaatatacctgcatctgttcatttctgcaaagtaaaacataagaagaataaataagaaaataatgagattggttacaataggtggtggtggttggaaatagggcagaaaaaattgggaataggaacgggatagaagggatgtggggagagtgacatttctctaactatattttctatagttttgacttctagaaccgtgttatgtttcaaatgcttaaaatataaatctataaaatcaataaagatagaaacccaaaatggagtataaacaaaaataagtgaacctaactatatttccatattgtaaatgaacacatacacactcactcatgcacacacacattgatcacacctaacatgcagcacgcagatcttgtttctaaatattttccagtgaaaggaattacaagcctttggagaaatagctaattttagggctggggctgggatatctttctattttagaaagttataaactgctcagaaaattatggggacctgtcacaaaccacaatggtcaggttgaaggggcttccactggccaaatctgggacaatttgagtattaaaataaataacggtaattttaattgagtgattggcgttaacatcatcagttgtcggacaaacggatatcatgggcctcctgatataatgcaagaagaacacaatatcacttctatggttttcctgccaaaatacagaacctgaacctataatcttgaggagacatcaatcaaacccaaattgagggacattcttcaagagaaatggtctgtatgcttcaaaaatatcaactcatggaagacaagactgaggaagtgttccagatttaaggggactaacgagataactaaatgtaatgtgtgatcctggattagatcctggacctgagggctttttccccctttgattgtaaaggacagcagtagacaataggtgaaagttgaagaaggtttgttgattagataatagcattgtatcctgattttgatcattgtactctggctatataagagaatgttctttattttacaaaatagtcactggatggagttgaggggaagggacattatctctgagattttatatagatagatgatgaaaggatggatggatggatggagcagtagacagatttgatggaggagtggatggatggagatagttagatagatagatagatgaaactgggaatgatcaagcaaatgtggaaaagtgaatctggatgaacagtaaagggtttgtttacaagaattctttgtactatgtttgcgacttttctgtacatctggaattgtttaaaaataaaaaaaattaaacaaactcaacgcctatctagatagacactaaaaatctcttcccttttaactgcaatgataagcaatagcagcttaattcaagtttggtgtactttattctttgagggaaatctgtgattctctcacacttacagtgaggatacagaaagctgcttaggctccccagcttcccagaggtcctgagcttccgccagcagctctgttctcgagggtagcctgctagttatgacaaagaaggtattgatttgcttccttggccctaaaaccacctattcattccttgtcctaagatgtacatggaattatgtgtatctggtcactgtctacttccagccttcattggccaggacacgtgaaggttgtctcagcggctgtcttcagtccactcaggaagctgttcccttggcaaccaagttaattatttattgacccctctctttctgatttttgggaacattggagctctactgtaagtcagtgttaccttgtaaacaacagttaatatgacgagtaaactagtcgatgaccctggagtatgaaaggtcaccaaaactccaacagagaagtctatgtttgattctaggagttggatatctggaactgtggacccgtcattcattccctttctttggctcagaaagtgaaaatctctggggcatcttgcaaatggccattttctccccatcccacattacctctcaatttccagatggccgtacccaatttatccccttatgggaataagccacactagaccagccttaaagaaccacagtttactgttacaaaatgctcctctcttgttggccctaaagtaacaggcttattcctcttgtcattccacctatccaaaactaaaattacaaggcagctttgcttgttcttctccctacaatgccagacttcaaacaaatcccaggaatgcagcttggatctatcctactctttattgcagcctctgcttccctaggattctggcacttttccaaagggagcagggccttggagactcaggggtcactgccatcatgtgcctggttgtttctcttctccaggccctaaacatcacctacatgaggcttgagcatcccgattctctcttcagagggagcaacttcctcatctgtgtaagacctaaagggtacagagctgtgagccatgccataatgcattgacattctagaattttaaagttaatctcttacagagttcccttattttacatgtaatacattttaacaataggaaatgtccttttagctaattttctaaatttaaagaaatttgtgaagtccttttataaagattaaatgaaatagagtgaggtctgtaatgtcaggttgagttaattatcactaggattaaagggtaaaatcaactgctcatgacttgaagttataattttaacaaacacaattttttcccacaaacattttatgtctcaagattccaaatctaccatctccttggaactataaaaaccaaatctgtcaatatcaccagaaagctctttggcttccatagcaaaaaaaaaaaaaaaactaggaagaaactcaactttgtataacaaaataagaagtaggtatagttttaactttaactaatgaaaccagatatgtcaacattccctaatgttagtattttccttctctgtcttataagtcacaaaagctaagtcaggacttgtcctttcaaagtaagttgtcaaccttctttcactctttgaaggttcttcattaactgctgagtgaggctggtggttctgcttccagggcattttctagctgagactaaattgatgaaaatgggcttgtgctttactgttgtcacaaggactttgtcctggagcccctgagtcccagctattcccccctcatcaagctctctactctgctttccagagagcctgcttgtgggccttcctgatgggtctgcagtggatcttgaccaggttttccatatgggaatcccttcctagcattgctcaggaaattctgctttttccaaatcccaaattcaaagaaaaatcagttgaaaaatgggggaaacagaaaagagctttataattctccagtgagaattaaagttttgcaagcgacatagagctgttactggtttgatgaaaccattgatgtccaatggaacgcaagagcagaaaacacagacacagtccaagattaaggttgatattttcgaaaaccaggacaggagtgcaaagaaaaagaaaagcagtcatgatctaatcagtttaacatccttatatgtagcaatagccatgttataaatgtgtttgtgatttgtctgcttgtaatgttgagtaattgttgcaagtaaaatacatgttagtattttttatgcatggtatattttatgcaaatattcatacaaatcttatgaaggatattgtaagaaatatcaagttttggaagcgaaatatgttcttaaactggcagtttcaacctgtgagtctatctagtgctgctagccttactagggtacctgaatgttacattatctgaatatacacaataatgtttgctggaatgtcccagagtttgaatatttgctacagaccatagtttttataaatgttattgaacttaatatttcttatttatgaaataacttttagatatccaaaacaatgagtaaagagtataattaattttagaaatacttaaagagaaacttatgatttggagaattcctgaaagttttgatttttttactcctgagccccaaagatactatctgttgggaattgttgaaaatcctaccctaacattgcttaaacctaccaggctgtctccttcaatttactgctctgggttcaccattaaacaattaaacacgaatcctt

SEQ ID NO: 95231 - DNA, 30381 bp, Homo sapiens
ccccgtctgggaagtggggagcgcctctgcccggctgccccgtctgggaagtggggagtgcctctgcctggccatcgtctgggatgtgaggagcgcctctgcccagctgccaccccctctgggagccgccccatctgggaagtgagcatctctgcccagccgccccgtctgggaagtggggagcgcctctgcccagctgccccgtctgggaagtggggagtgcctctgcccagccgccaccccctctgggagccgccccatctgggaagtgagcgtctctgcccagctgccccgtctgggaagtggggagtgcctctgcccggccgccctgtctgggaagtggggagcgcctctgcccggccgccccgtctgggaagtgaggagcatctctgcctggtcgccccatctgggaagtgaggagcacctctgcccagccgccaccctgtctaggaattgaggagcgcctctgcccggctgccccatctgggaagtgaggagcacctctgcctggccacccgctctgggaagtgaggagcgcctctgcccggccgccccctctgggaagtgaggagcgcctctgcccggccgccccctctgggaagtgaggagcacctctgcccagccaccccgtctgggaagtggggagcgactctgcccagccgccccgtctgggaggtgtacccaacagctctgaagagacagcgaccatcgagaacgggccatgatgacgatggcggttttgtcgaaaagaaaagggagaaatgtggggaaaagaaagatcagattgttactgtgtctgtagaaagaagtagacataggagactccattttgttctgtactaagaaaaattcttctgccttgggatgctgttaatctataaccttacccgaaccccgtgctctctgaaacatgtgctgtgtcaactcagggttaaatggattaagggcggtgcaagatgtgctttgttaaacagatgcttgaaggcagcatgcacattaagagtcatcaccactccctaatctcaagtacccagggacacaaacactgtggaaggctgcagggacctctgcctaggaaaaccagagacctttgttcacatgtttatctgctgaccttctctccactattatcctatgaccctgccacatccccttctccgagaaacacccaagaatgatcaataaatacttaaaaaaaaaaaaaaaaaagaaaattcatacagttaaaaaaaaaaaaaaactttcctgaaaatcagaaaactagaatgacagtttttttgcaaactgacaggtcaaagtaggtgatgtaaaaaatttcaaattatatacaatcttaataaaatatggcttatggagcatttcacttaggtaaatgtggttaaaagttaatttaacctagtcttttagagaagggtctcatttgttcactatagagtaatacaagattctgacatctttcatagtctttaagtcaaagaaaaacaagtattaaaatactatttctctagcaataacttggagaagggaaaaaagaaaaaagaaaatgctatcaagcaaaccccgaaggtattttcttcttgctgtgttggcaaaggctttcaaattccttcaaattagctttcgcctacagacttttctaaatcctttttaggaattctagcaaaatctacattattttagtatattttgttgattaagacttgctagaatctactttaatagctattggagaacccagattatacaagatattatttggaaaaatagagaaaatgcatgttaggcatcgtaaatggaccagtgtgatgatatgttttttaataggcttatatttatattttttcagtcctataaatgttcattttgttattgctaaaccaaagaagaattaggaaagcacactggagtagatcacagacacgcttaaacttttattaaatttcatttactccatgaaagtctagcatcaagttaaaacatgcatcccatacctacatcctcagtttcattggtccccattcttttttttttttttttttttttttttgagatggagtctcgctgtcacccaggctggagtgcagtggcgcgatcttggctcactgcaacctctgcctcccaggttcaactgattctcctgcctcagcctcctgagtagctgagattacaggtgcatgccaccacgcctggctaatttttgtattttcagtagagatggggtttcaccgtgttggtcaggctggtctcgaactcctgaccttgtgatctgcccacctcagtctcccaaagtgctgggattacaggcataagccaccacgcccggctggtccacattcttatacccacgtttcattccaaccaaactagaggtagagtccctcaaatgttcctctcaggctatgtttattcttgtagagccctctgtctgaaacacctctcgtgctttaaaaaccagctcctgtcagtcaccattcctcttctatcccagtggcccttcacccccagcttagttagatgtcccctttatactttcttctgcatgtctctacatcacagcatttttcattaggaattttaaacataagctttctcatttctcccagtagaaactggtttattaaatttttaaatttctggattttccagcactggacctggcacactgaatgccaacaaataaatattaattgagtgaatggaagctcattatgtcagagccccaagtacttacattttacccagtaaaatacaagtttatcttttacaaatggagaaactaaggcagaaaggagtttgtaacaatagtatcattaacaaagattaataaaaaaatgaactaatcttttacttggaccaattaacatcctagctacagtctaaagagtagaacaggccaggtgcggtggctcacacctgcaatcctagcactttgagaggctgaggcgggcaaatcaaggggtcaggagttcgagaccagcctggccaacatagtgaaactccgtcactactaaaaatacgaaaattagccgagcatattggcgggtgcctgtaatcccagctattcggaaggctgaggcaggagaattgcttgaacccgggaggcggatgttgcagtgagccaagatcacaccattgcactccagcatggacgacagagcgagactccatcacacacacacacacacacacacacacacacacacacaaaatagagtagaacaaatgagtctctaaatcataagaaataaacaaactccaaacatcaatttcctatcacagaggattagcttttccttctttctttcttttctttttttttttttgtttgagacggagttttgctcttgttgcccgggctggagtgcaatggcgtgatctcagctcaccgcaacctccgcctcccagattcaagcaattctcctgcctcagcctcctgagcagctgggattacaggcatgagccaccgcgcccggcccggatttagcttttattaaggattcaaaatcattaagtctaatcctctctcacataccacaaaactctggcacagccatggactaacctaaaagcccactgttagagacacaaagaactttctttcagttatgaaaatcttcatttctagctgcccttgtcatagttggctaatagttttgcacaaattaaactagatgatgagtatttttcaaattagaaacaaaaagaggacctgaccctgccaagctttaaccacctgggacaacaaacttgttcttctccagcatcttatactttacacagtaccattggcctcccaagtcaccagttcatgctccatcctcatgcaaagacagcaatattgtattggagacagttagtccaaaggtccaagtgcagctggagctagttctctaagcaaagaacctctgcttccatgcatagatcttcttcactacccaaccagttcctattagtggaagagtgctgggagaaagagagtaaggaactcattagagtataaagctaattcaaagaggcagaaataggaaaaaaaggaagcaaattacttctgggtaatgtttagaaattccctaacagatggtatttttctcttgaatagatcaaaacgtttcagataaatcatatttctatgaaacaaggataagattcgtctgttacgtatgaaaaaaactaatgcaggattgagtttacgttaagtattgagacccagaactctgcctcttgggcaaagccaagcataaagcagcaagccctcccagaattagacggctttccacggacaggagaacagatacagcagacacagaatgactacagaaggcgaaaacaagcaaaaacaaatgtcactccatctggttttaagccaaataagccctccaaccctaaccaaggcaaaggagaactgcctttccacagaacacacctgactggtttcagtacttgttttcccacgagtacccttgaaactcattttaatccaaaaatgaaaactatgggacaagcacggtggctcatgcctgtaatcccagcacttgtgggaggctgaggcgggcggatcatctgaggtcaggagtttgagaccagcctgaccgatatggcgaaaccacatctttactaaatacaaaaaattagctgggcgaggtagcaggcgcctgtaatcccagctactagggaggctgaggcaggagaatcgcatgaacccaggaggcggaggttgcagtgagtcgagattgcgccattgcactccagctagggcaacaagagcaaaacttcgtctcaaaaacaaacaaacaaaaactagtattttgtgatacagccagaactatcacaaggaaaagactcccagtactgtatcataatacttccacataaaatacctcctttagggatggggtcatttctcccgggataattcaattcaatgcttaatttttgagaagggctgcatgaaggagagacttgtagttaaaaaaaaaaaacgggtctaatttctggttctggtacttactagctgggttaccttatgcgagaattcttaatttcctagtcttagtttcctcaccttcaaattgagactaataactactttgtaggtctctggtaagagggagagagaaactaagcggttggaacaccatgggcactcaataatagctatcatttacataatgagtccctactaaatatggatgctgggttaggcgctgccgagatacaaggtgaaagttctagctgcaaatggcaaaagtcctgaatgttcttggatttcaaaatgctttttgtatatcgcctcttttctgcccgtgaggaggacaagggcaaacaattaaaataggaaaaatgtggggagcacttcatggtttataaaacgtttttctgcgtgccaacttattttaatgtcttaactttccagatttgaaaacaagtcctacaccaaataaatggtagagggacacaaactggaacccaggcttcctaaccgccagagcgaccttcccgccgcccaatgcctccctgaggtgctggtcggctgcttctgcccggggtacccagcagtcatcctactctccactcagcaccaccgcacgtcggccgcgcgccacgctacccgccgggttactgggcgctggtttggccttcggaggtcgaggctctctgagtgacctcctgaactgggctcactcttacttagcctcctctctcgaggcagcaccctcctctctacacgacaactccatcattcgcagccccacggtgttcccggggagcgcctcccgcccccaccggcttcgcctcagcttgtcctcgcctttcccgccctcagcatccgcggatacccgcgctcgccgggcccacgcggaagcatccgcagactgtcgcaaggtcccaccgtcttgctctcattgggcaaccttaccctttccccgcctcaatgtttttgcttcctcagtgattggacctgggcattgtccattccagctcccaggcaccgccctctctccacccactagaaagccacccgggttctccttcatccccaacgctcctcacctagcccctgtcctgagggtgcccctaaccctggagccagctttaaaggggcaggccccttctcctgccccagccccagccccacccaccgggcccacattctccgtcttccaggtccagcgctccctcacagaactcccccgcaccttgtctcgctcgctccgcccctccttcccagccacagctagaggtcccgggcgcacctgcagagccggaggcttgctggggcatgcgctccatgaaggctctgcagaaggccctgagccgggctggcagtcactgcgggcgaggaggctggggtcacccgagccggagccccctccttggcgggggcgtccggcaccacctcagtgaggcygcggcgcagggcagagagacgccacacagccaccagccgcagcaccaggatcagtaaggctcctgggacagggcaggggacgggcttgcccccactcccactgtggttctcgctagttcccgagtgcccttccaaggcagcgccgctcatctcccctctcctcgctcactagccctcggtgccttttcctttggatgtggggctttgggtgcgccgcgctcgggcggtaatctgccgtctgcctaggagtgcgttcgggcaagcgggtcctggggatggcgcctgtccaaggtgcgcacttaacccggatcacagatgcgcgccgagtgttgcttggctcacgtgtctgagtgcagggccgggctcacgccgccagtcctcaccttccctagtcctcgtgtgtattttaggagatgcgtggrtgtggaacagcctcctgcctccggtccaggtgtactggggtctgtgtgttgtgtttctgcgtgttctcggcaggtaatgtgtgatgcgcgtgtattattggtgcgcaggtacgtccataagtgttgggtgtgtgcgtagcagtgctccctgaacagcagaatgggggggaatttccaaactggttgttgaatggggagaatatttgtaatggaggaaaggtctttaagacgcagatttcccaaaccagagccagtcagagcctttatttgtgctgcccaggctccagaatctaaaacgttctcttcctttgggtgtttcttccacccaggatgccaaacctttatcttccccaccgcctaggacacacttggtggctgagcctttttctctgagacccagacggtgctgagcaggaaatcttgtcctccccagagggccagcatagacactgtccaaagagcccctgctctactgtagcaggaacaggaaatgggccatctccctcgtcgctgccatctccctgatgacactcagaaacatggacaccatcagtaaagtagccagactgacacaacactacctcaccactactcgagtctctgacacaacactacctcaccactactcgagtctctgtcgtaagggacaccaataggtattatttattattaatgacatyatgcagtacttttatttctttcttttttgagacggagtctcactctgtcacacaggctggagtgcagtggcaccatctcgactcactgcaatctccacctcctgggttcaagtaattctcctgcctcagcctctcgaatagctgggattacctcgagtagctgggattacaggtgcgcgccaccacaacccgctactttttgtagttttagtagagacagggtttcaccgtgttggccctgctggtcttgaactcctgacttcaggtgatccgcctgcctcagcctcccaaagtgctgcgattacaggcatgagccaccacgcccggcccttttctctttttcatagtcatggtgtctgcttatccatattacacagtactttcccatcagcttcttcttaaagagacacagaacatttaaaggataagccctctccctcctgttctagtctccaccccaacttccccccaggtattcaccatgggagaaataatggtgggatacagcaaaggctgaacttccctcatctgtccgccttctgcagagtagggaactagaggtatccctggttccccacacacacacctccttatccagtggagtctggtgatggaagtgtttttaggggaccttgtttcttctgcccagggaaccccctatcatatcctcggactggtgctccccaggcagaaagggttgagagcactggagagtgatgtgctctggcagtgtgacaccatgatggggtggggttcctgtgtttgggggaggaaagagagcagcaaagaggaaatgcgctgttattcaggttattgtttgtttaatatttagctatttagctgtatttatgactttttttttttttttttttttggagacagagtctctttgccgcccaggctggagtgcagtggcgcaatctcggctcactgcaacctctgcctcagcttcctgagtagctgggattacaggcacccaccactacgactggctaatttttgtatttttaatagagatggggtttcaccatgttggccaggctggtctcaaactcatgacctcagataatccacctgcctcggcctcccaaagtgctgggattataggcgtgagccaccgtgccrggccatatttatgactttaaaagaaacacaagagtatcaagaggaaaatatcccaacacaaagaaatgataaatgtttgagatgatggatatactaattacccttatctgatcactataatcctgtgtattgaaacattgctatgcatcccataaacatgtgtacaattatgtttcaattaaaaaatatataaatttagagccaggtgcagtggctcacacctgtaatcccagcactgtgggtggccaaggcagggggatcacttgagctcaggagttcgaaaccagcttgggcagcatggcaaaaccctgtctctgccaaaaaaaaaaaaatacagaaattaaccaggcatggtggcgcatgcctgtagtcccagctacttgggagattgatgtgggaggatcacttgagccctgtaggtcgaggctgtagtgatccatgattgcatcaccacactccagcctaggcaacagagcragaccctgtgtcaaaaataaataaataagtttattacttaaaaattttaaaaagaaatatcccagtattagagataaccaattaatattgtgatatattcatatatatcctatatatgtatatgtaatttaacaaaaatgggataatagtcatattcttgaacttatctttttcatttatgaacagcttttaatatcatcgaatgtgtatgacattgtcatcttgtcattttaaaagattccattgtttgaggtatcatagtttatataaccagtcttcaatttggttactatatagtcttgtacacttgttcaattatttcataaattccaaggaaattttgcccccagagataatttgatgtcattaatatcatgtatagtcttctagagatattttatgcataaaatacatgctgatactactttacctttttttatacaaatggtatcctataaacaatgttcctataccttgcttttttggtatcatactatacacattgctgttgtacgttgcttgttttccctcaacattacattggtgatccatccatatctgagggatatgcagtttttttaggcttgtgatacattcagtggtatagcattatttcctgtcttctgttggcttccaggcagagtcctgccttcagagtgttcctatgtactttccttcttgagttatccctcagatagcttttttcctcctctcccccctataggcattagcttcattgtgacaaccggatttccccagaagcaggaaaactcttctggtattccctcttctggtactcctcctgactccaaacacacacatgcctagtctatgccaagctgtttgagtattattttttaatccattgtttcaatagataatatattccatatggttcaaaattcaaaatatacaaaagatagtgaaaagtatcctcccatccctttttcytggcacctatgtcatctctgtagaaggagatgaatcaatcttacctatttatgtatttatgtatttgagatggagtctcgctctgttgcccaggctggagagcagtggcgtaatctcagctcactgcaacctccgcctcctgggttcaagcgattctcctgcctcagcctcctgagtagctgggattacaggtgcgcgccaccacacccggctaattcttgtacttttagtagagatggggtttcaccatgttggtcaggctggtctcgaactccttacctcatgatccgcccaccttaggctcccaaagtgctgggattacaggcatgagccaccatgcccagccagtcttacctatttctacctaaatggtcttctagaaatatcctgtgcctgaataagcaaacacatatatatttttcccttttaaacctgtgcttcaacctgagaaaactgatataagaaaaaaaagaaaaaacaaatgaaaaaataaagctagcactaaagaacttactcatgtaaccaaacaccacctgttccccaaaaacctattgaaataaaaaaataaatttaaaaataaaaataaataaaactgggcatggtggcatacacctatagtcccagctactagggaggctgaggcagaaggatcacttgagcccaggagttcaaggccagcttgagcaatacagctaaaccccatctctaaaaacaaacaaacaaacataaatactaccacacgcttcttttagttaatattatactgttctacagcacgcttcttttagttaatattatatcttagagataattccatatcaattcttagagcacaccccaatttcttttttttacactgcataatattgcattatatgaatataccataattaatcagttccctattgttgcacatcaagttgtttctaatcttactattactaacagtgtgatgagggccgggcgcggtggctcactcctgtaatcccagcactttgggagggggaggcaggcggatcacaaggtcaggagttcgagaccagcctggccaacatggtgaaaccctgtctctactaaaaatacaaaaattagctgggcgtggtggcacgtgcctgtaatcccagctacttgggaggctgaggcaggagaatcacttgaacccaggaggcagaggctacagtgagccgagatcacaccattgcactccagcctgggtgacacagcaagactccgtctcaaaaaaaaaaaaaaagaaagaaaaagaaaaaagaaaaaacaacaatgtgatgaataattgtaaatatgttatttttgaggtgtgtgagtatacctgtagaataaatcactgaaagtcaaattactgggtcaaagatctttgaagggtcttaatcgcaactagctgtcatatttggaaataatctgataaaataactctgcttggctgggtgcggtggctcacgcctataatcccagcactctgggaggctgaggtgggaggatcacttgagtccaggagtttgagatcggcctaggcaacatagtgagaccccttttctacttaaaaaaacaataactcttctaaatattttaacatattaatggaaatcttgaaaactaagaagtcttcagtacctggaattttaggtgttataagccagagagatactttgggacacagggaccttgctagcaatacaacttagtaattcttatcgaagacccactgtgtgctagggactttgctgagkgctaggaagacaaagatgtataaaacacaaagacctaactgtggagcaagggagattcttctgtcagtaagatggtgtgttgtgtcaaaccggcagcataagcaatatctggaggtttggggaagcctttacagagttggtgacatttgatctggactttgaagaatgagcaggaccatactaagcaaaggtccttctatgcagaagttacagcataagcaaaggccaggaagcctcacagttcctggcccattttggggaaccatctatattgcctgttatatctggagtgtgggcatgatggggaataggaaagttaagtgggcaggttttatttattttactttattttttttttaaacaaagtctcactctgtcacccaggctggagtgcagtggcacaatctcgactgactataacctccacctcccaggctcaggcaattctcctgcctcagcttcccaagtagctgagattacagaagcccaccaccacacctggctaatttttgtatttttagtagagacggggttttaccatgttggtcagtctggtctcgaactcctgacctcaggtgatctgcccgccttggcctcccaaagtgctgggattacaggtgtgaaccaccatgcccggccaattggcaggttttaaagagcttttgatgtcctaccaagtttttgtttgtttgttttgagatggagttttgctctttttgcccaggctggagtgtaatggcgtgatctcggctcactgcaacctctgactcctgggttcaagcaattctcttgcctcagcttctggagtagctgggattacaggcacatgccactatgcccggttaattttgtattttttaatagagacagggtttcaccatgttggccaggctggtctcaaactcctaacctcaggtgatccgcctgcctcagcctcccaaagtgctgggattacaggtgtgagtcaccatgcccagcctacttcttatttcaagtgcttaaatctgtaggcctggggagctaccaaacttttttgagtatagaaattacatttgagtttagaaagatcactggcacattttgactgggcgtggtggctcatacctgtaatcccagcactttgggagactgaggcaggcggatcacgaggtaaggcgttcgagaccagcctgaccgaaatggtgaaaccccgtctctactaaaaatacaaaaaaattagccaggcgtggtggtgcacacctgtaatcccagctactcaggaggctgaggcaggagaatcgcttgaacccaggaggcggaggttgcagtgagccgagatcgcgccattgcgctccagcctgggcgacagaaccagactccgtctcaaaaaaaaaaaaaaaaaaaaaaaagatcactggcacattttagaaggtggattgaggcaacaagagcaaaactctgtctcaaaaaaaaaaaagatggattgaaagtcaagagagtgtagtggcaattaggtaatagggaataaggagctgatgataaacatgatttattgaacatttactttgtgtcaggcagtttttcacagaatattatcttaagcctcacatcacccaggtgaagtagacattactacccttgtattacagataggaagcaagttcagcaatattaagcgacctgctcaagatcacacagctattaaggggcaaactctggtctactacaccatgctggcacagggaaaaggaggagagggtggatttgagacattatgaggcagattcatccaatgttggtgaccaactaagcatggacttaaggtgtggcaactatcaaaatgatgccacatttccagcttggcacccaggtgggtggtaatgctgttaacccaggtgggaaacaagaggagaagaagagggaaggaagtgagatgactcaggtttggacatatttttcagtgcttgtggggaacctataggtggaagtgtgagaagggagctaaaaataaagatctgaaggtcaggagtaaaagctagagaaaagatctacaacttcttaggacagacatgaaagttagatttatagggatagatcagatggcttaaggaggaggcatagaatgaggacactcacctacttataagcccatgttgcagaaggaggagcaggtagcagttctcaggccccactttcctccccattctctgcccccaaacagtgattcatcagaaagtggcatgctgtcccgcctgggtgatttgctcttttacactattgctgaaggacaggaacgaatccctatccacaagttcaccactgtaagttgccctctacctgttcaggatcctaattccttaagatctctgaaaagtggggaaaggagggtatgacaagtgcagggcagctaatgggttgctacatgagggtgaagcatacagatggatgagaatccagatgtctaggctgacaagacaagcccatccctgccccagggtcagaagattaaaccctctggaaaaaggacaggaaacccttgttagccttcagagctactccatcccctcctttcttattctccaaacccatttgttccacctattgtagtggttggggttcagctaattgggtatccagtgggaaagattatgaggagtacatcactgtccttgtagctgacctttctggcctcttctttcctctaaaggcactaaaggccactggactgcagacatcagatcctcggctccgagactgcatgagcgagatgcaccgcgtggtccaagagtccagtagtggtggcctcttggaccgagatctcttccgaaagtgagggccccagaaacaagggcactgctctctgaaaactgtcctgtggacatagactctcagagcagggaggaatttgggaattgtatagttcaattcctcattttattttattacttattacataagttatacatgaatactcatcataagagttcaaacaatatagaaatacatgttctcctttccctccctactcaatccctgtcctcttttcccagaagtaaatattagcagattagtgggtatcttctagataatgtcctatgtactgacatacatacatgaatatatataaatatacttttatgatttaggattttttaaatatcaaggtaacatacatacatattattctggtatttattttttttctcatatcccaagacatagtgtctttccacatcattaaaacccctcattttagaggtacggaaactaagacctagaaaggtaaactgatttgccaaaggtaacagagctgttgatcccaaacctgaagaccactcaaccttctttattcccaatttccgtggctccagagtgagtcccagctgcatttctctagccccctaatccaatcgtgtctgggatccaggtgtgtgagcagcaacattgtgctcctgacccaggcattccgaaagaagtttgtcattcctgattttgaggagttcacgggccatgtggatcgcatctttgaggatgtcaaagagctcactggaggcaaagtgagagtcaggggactaagggaggggtcagggacctgggccagattttttttttttttttttttcctgagacagagttttgctctgtcacccgggctggagtgcaatggtgcaatctcagctcactgcaacctccacctcccaggttcaagcgattctcctgtctcagcctcccgagtagctggcatacaccaccatgcccgactaatttttgtatttttagtagagatggggttttgccatattggccaggctggtctcgaactcctgatctcaagtgatccacccacctcggcctcccaaagtgctgggattacaggcatgagccaccacacctagatatacctcgcttctcagagatttcctggggctgggagtcctatgaatgagagatgagaagcagaacttctgtaaatggtgacatggcttcatgtgtttctatacacgattcctagagcaggtgagggaatcaagatcgaatagagccttcaaagggatttatagggtaactgagcctaagaaccaaaaggggaaggttgcctcagaattctccttttttaacttccattggctttactgctatctctacaggattgcggatacacaaagatatggccttctaggacttaaggctcgggcatttctgggagcaacaggcaggagggaacccctctgccctatagaagacagaattttagcttttatctaaaagattctcttgaccctcaacctcaactctgttcctcttctccacatccatctcccttttctctacccactcatgtccaggtggcagcctacatccctcagctggccaagtcaaacccagacctgtggggtgtctccctgtgcactgtggatggtcaacggtgagatgctgggcaagaggaaggggaggcagggcacaggtgccgaacacaggccaacccctttcatggcatctgtctgcctccaggcactctgtgggccacacaaagatccccttctgcctgcagtcctgtgtgaagcccctcacctatgccatctccataagcaccctaggcactgactacgtgcacaagtttgtgggcaaagagccaagtggcctgcgctacaacaagctctccctcaatgaggaaggtgagcactaccaaggctcagaccgtacttacagctgtccccttctccttatccccaccccatctcccagccttttttgtttctstgcccttcctgattagccctgtcatgcctttctccctagcagtctttcttgtctaacccacaaagtgagcgggctgtcagggaggctttgttcagtggctaagactcttggtggtttgtatttccccaggaatcccccataaccccatggtcaatgctggtgccattgttgtcagctccctgatcaaggtcagtgccaccttaaccttctgataggtattatcctctaagctcctgtgttcctgtatccctcatatttgttcagctctccagggagactggtggggctctgattcctttgagggtccccagaaggcayatgaggcacagcagggacccacatgttatgctgacaatgtcagtataagagactgcaccacctccgtcatccccactcagtactgttccctgcccccacccatgagtctagagcctagagctttctgacccttagagaagtgagcaggtcctgacccctgcctaggaccaagggccaaatgccagagacaaggggaggacagcactattgggcactgattggccacttctgggtgtgggacacctgcaggcaagggtgaatggccaggccagggcagttattcacgtcacctggaactgtgagttggccttgaacagggtgtcagactagcccatcagctgtaggtctcccagggcttgagcaagaacctgggagcagctgggcagcaacaccctggagccaatcacagcccctcctggggaaggtggtgttaggaatcctcccctcagggactcaggtatcagagtccctgtggtattgactctgtagttgacacatgagtaagcaatgagtctgggtgaggaaaagaggctgagtctctccccttgttctgtgatggctccatctacaaacctgtatctgggacctgcctcatcccattcccatctaagtaggaccttttttaaaaaatatagaggccaggcgcggtggctcacgcctgtaatcccaacactttgggaggccgaggtgggcaaatcacgaggtcaggagatcgagaccatcctggctagcacggtgaaaccccgtctctactaaaaatacaaaaaattagccaggcttggtggtgggcacctgtggtcccagctgctcgggaggctaaggcaggagaatggtatgaacccgggaggcggagcttgcagttgagccgagatcctgccactgcactccagcctgggcgacagagcaagactccatctcaaaaaaaaaaaaaaaaaaaaattgaggcagggtctctcctatgttgcctaggctggtctcaaacccctggtctcaagcgatcctcctgcctcagccccccaaattgctgagattacaggcatgaaccatcatgctggccaatgggatggagtaaagctccagcatggggtgtaaggaatggggatggagatcagggatagggtggggctaggagacaggattcgagtcaggaaaatgaacgtgggagtcagggatgagggtttggattgagaatggaagtgggatggcccagcaagctggctcatgcctgtaatccgagctacttggaggctgaagtgggaggatcgcttgagcctgggaggtcaaagctgcagtgagccatgatcgtgccactgcactccagcctgggtgacaaagcaagactgtctcaaaaaaaagaaagagaaagagaggagccaatggaagtgcggtgttttcagaaggataaaaaaagggccattataaaattgaacacatttgcagcagcaggaccagactaacactagaactccactagatccttctgacccttccctctgtcatcctcctacacttagaatgctgacatctctctctttctctgcagatggactgtaacaaagcagagaagtttgattttgtaagttcccttgctacttagcccctggctgcatttcgccatggcatgctgtcctctccagctgccccagtggctctctaaccccactaccaggtgcaccagcccatactagaagccttatttccagaaatgtggaaatctgctggcctcaagagaggaaagcctcttgacaagacctgagttcagaagggctagtcaacctgtgaggtattaatagagcttcttaaccaagtggagcctcaatgtccctttttctcttccaggtgttgcagtatctcaacaaaatggctgggaatgaatacatgggtttcagcaatgccacgtaagtccctactcagaggactgactgaaagcattgtggtgtatgtgtgtgtacttaggatggggacaagaggaatgggggagagagaatcttaggaggaagaaatcccaggggaactttggccctccwgcttcctctgagtcccttcataaacatttgtttatcttgtaaaataatttgttccatttctaattagtacataatgagagaggcagtgtgatggtttgtgcctaagccctttcttgccaagactttcaaagccaaaaacttcaccagttttcctagatgactagacagtttggggtgtttggtttgggtttactttataacaaaactatgctgagtgtttgctcaggttcagaaatttcctctaatattactgtgagaagttataaaggggttcatttagtttgtggtgtgatgtagttctgtctctccagggaaggtaatttttccccttctcccaacacccactcctccaacttcaagtactaaattgggtgtttgcttcagattccagtcagagaaggaaacaggggatcggaattatgccatcggctattatctcaaggaaaagaaggtaaccagaagaggccggaagagaaagtccctgggaattctgctgctagtggaagggcagtaggggttgggggcttcagctgagaccctgacagtgtgaaagggctgatgtcctgaagagaaatgctctcccctctcttccttgcagtgctttcctaagggrgtggacatgatggctgcccttgatctctacttccaggtaagaaaacactgctcagggccgagggaacaggacagactgtccttgcccttgccctttccctacacccgagggtcccatgtgcaggttcacgtcacatcttcacctattctttgttttcatagctgtgttctgtggaggtcacttgtgaatcaggcagtgtcatggcagccaccctcgccaacggtgggatctgccccatcacaggcgagagtgtgctgagtgctgaagcagtgcgcaacaccctcagcctcatgcattcctgcggcatgtatgacttctctggccagtttgccttccacgtgagtttctggctctgctatccatctgtcatgagcccagtgctaagaagagagaacactgactctctcaagatagaggtggaagcttgttcctgcctctcattcactaacttccaggaaggcaattaggttgagactccttagacgagtttctcaaaaacaccaagttcctcgaatatataaagagatgtctttgggaggccgaggcaggtggatcacctgaggtcaggagttcgagaccagcctgacctacatggtgaaaccccatctctactaaatacaaaaaattagccgggggtggtggtgtgcacctgtaatcccagctacttgggaggctgaggcagaagtgcttgaacctgggaggcagaggttgcactgagccgagattgtgccattgcactgtagcctgggcaacaagagcaaaactccatctcaaaaaaaaaaaaaaaagaaaaagaaaaacaaccagaggtgttgcagctcctgaattgtgcttcacattgctggctcttctccttggggtctcagcttagatgtcatttccaaagaaagacttttctgaccaccctatctcatgtggcccccctctacctctatttacagcaccctacttctcactatttatcacaattactttaaamattacgtgtctatttatttacctgtttattacctatctcctaacaccagaatggaagttcctagttctagcacagcatctagcacagaatgctgtaagtatttcaaaaaatattttctagctgaatcaatgaatttaagggaaggaaaggacaggagtaataaaagaagctaattaacaagccaaaaggttgaggtggattgtggtcatgcagtcatttgtaaacttgttaagagtacagcctaacttgtttattttctgatttggggcacacccactttatcctcagcttcagttctgttccccaggtgggcctgccagccaagtcagctgtatcaggagccatcctcctggtggtacccaatgtcatgggaatgatgtgcctgtcacccccattggacaagctggggaacagccatagggggaccagcttctgccaggtgagatgctttgcatatagtacttactatttttgaagcaataaatttgtttaatggtaccacttttactataataaagcaattttgagctcctactaagtgtaaggagtaaataaacaatatatttggcttacaattctagaagttggtgtctctcttcaatttccacaactatgacaacctgaggcactgtgctcggaagttagacccacggcgtgaaggggcagaaattcgggtaaggaaaactccaggtggcttgtaagaatatttcaaaggccaggtgcrgtggctcacgcctgtaatccctgcactttgagaggccaaggcgggcggatcacaaggtcaggagatcaagaccatcctggctaacacggtgaaacctggtctctattgaaaatacaaaaaattagccagacgtggtggcacgcgcctgtggtcccagctacttgggaggctgaggcaggagaatcgcttgaaaccgggaggcagaggttgcagtgagccaagaccgcgcgccactacacttcagcctgaacgacagagcgagactccgtctcaaaaaaaaaaaaaaaaaaaagaatatttcagagtagcacattccataacacttcagcaatacccttggactaagcatccatggaggagggtcacagggcacagctggcataggtgagttcaattaatgtcatgtgggtatgatttgtgttccagaacaagactgtggtcaacctgttatttgctgcctatagtggcgatgtctcagctcttcgaaggtaatgctactgtgaccaaatatacacaataaaatactcctggtcagagattttactaggaggcagcgtaacaaaatagttaagtgcttcagctttggaattagaatggatatagattgcatttaaatgaaatttttttwaaaaaggagattttytttwaaaaaagtaaactgtctgctctatgataattaatgttagccattgttattgagtgttaagagcagtgtcctaggaagtaggtaccctgcctcaaatgggcacttaccacaggtaggcagtgagtgatatttctggaaggatcacattcccatctctctaatatgagtataacagtctcatctggatatggaaaaaagattattcagagccaacaaatctggctataggctgtttcactttctctgaaactcatccagtctgacaccagttcacaaagaacacctgtgattccagtctgatctaggcaactctagctgctttcccactaccctcaggtttgccttrtcagccatggatatggaacagaaagactatgactcgcgcacagctctgcatgttgctgcagctgaaggtactgaagggttaaggaggggaggaggagggtaatcataagaccctttctttttcaccaaaagtaccttcattatatgtgccctcaaggttataggggcagcaactagttttatctagacacccttcggtttgcagctagactatgactgagtgctgcagggtacaaaatgggaagaggccttttcccctcccctcttggtaaagacttcagtggctaagtgtctgcaccaaagggttcaagacctgcgccttctcattttccttctgcccatattcctaggacacatcgaagttgttaaattcctgatcgaggcttgcaaagtgaatccttttgccaaggacaggtgaggaataggctaaaagtggaggagggtgggcacagcttctccacctaccctccagccaccatgcaaatatatacaaccaccactctccacgtctcctttgcctgatcatatcattattcctctcaggtggggcaacattcccctggatgatgctgtgcagttcaaccatctggaggtggtcaaactgcttcaagattaccaggactcctacacacyctctgaaactcaggctgaggcagcagctgaggccctgtccaaagagaacttagaaagcatggtatgagcacaggtcatggacagcccctgctcaagaaaaagcatgagctggccacacatgtaatccataaccaccaaaaatactatggagagctacactgcttcagtggggaccaagcagtcatttggtgacttaggctagtgctttctatgggagtcaaaataccccattccctcagcagacagagtacagagaagggcctcagaggacacctgcagtasagctatccagagagamtgggcttcaaggtacagcctaatggcttgccccactcaaaaccatcccagctcttcacccaggtctcctcttcctctccctgaagaaaccatcatgagagagatactctggtggagggactctagctaccatgcacatgtacatatccacagaatatgggaagtgggaatggctatatacatggctttagtagtctggagaaatctactccccttggccaggacatgctgctgctactgctaacagccaattttatagacagagaaagtattttgtgttcaaataaactttaattaccaaatcatttttgctaaacccagtccttctttcttccctaggggtatctagcttcatcaccatcatagaaggtagaaaaagatggaatcacagggtcaaagcacagcttctctacctaccctaccaaacagtacatattcacttaccccaccaggtttttctcaactccaaatactgctttaggttaagtgtattctgctgccaagggaagcataggtttgagtctaaacaggctctgaaacagattgtgcaaaacctcaggcctccttccttcctcgggaagttccaactgtggcagaaatgaagatggaacttctcaagaataaacagttttggccgggtgtggtggctcacgcctgaaatcccagcactttgggaggccaaggtgggctgatcacatgaggccaggagttcgagaccagcctggccaatatggcaaaaccccatctctactaaaaatataaaaatgagacgggcatggtggcacacacctgtaatcctagctactcaggaggctgaggcacgagagtcgcttgaacccaaaaggcagagtttgcagtgagccaagatcatgccactgcactccagcctgggtgacagagtgagactctgtctcaaaaataaataaatagtttctagcactcatcccctagatatcccccaagtgtctctcttcccctttggtcaaggttataactgggataatgattatgacagactggctgggtgtcagaggtacagatttaaggtagatggactcagggtaaggatagctacagctgtgtggggctgaaggtctgtggcactgagctactggggaaggagggctctgttttcattttgacacactgagttaataaagcacttactgagggagccagagcccaaactctaaatgtgctgtagaaaaagggccaagtcattgactgcaccactccttcagccagaggtagaaaggatttactcttcagcsatctggtagagccccaagaacaagttacatgtggacaaagggagggagaggtatcatggtgattaataaattcaaacaaagctgaatgataagaccccaggatggaatacagtctgagaaaggcctgggcaaagggaggcagagggactgaaggaagcaggtcaaggaagatacacccatggtagcctaggaaattggcagtagttggtgggtggggaaaaggagggtttggctgtatgcctagctttcacaagrtaggggatgaggaagatgatcatgatattgcacagaggacccaacactgaattgtgggagctagaggttgcttgaggcaaagtaaaaaggcttcggacactttcaaaaggaggctggccaaaggcgtgattagggactccagtaatggacatactagaggccctcgggcacctcaagccctgaatgggtcagcagctccccatcccagagagcaaaggcaggcaccactggaccccggaaatctgtctgtagcgtgtgaaccacagagacctggctcacatccaccaggctcagcttctgggcctcatactccagcaacagccccaccttctctggctgcccaataccctcaactggggctttctcgttggccaacatggtgtaccacttgcgctgggcataggtgaacacccaggaacgatcatcaacaccaatgcagctatcccgggacatgtccacatctgccactcctatccggaactgctgggagcgcttcactgtcacttcccagtagtgtctgccactggtgaccgctgtgtctgccagcaccactgcccactcccggaagcgctccacattcaaggccaccttggtgggctccaatcccaccaagccatatttgacacccrtatcatctctgaagagtgccaggctgctgtgggcggttttttcttccagtttgaaactgacgcctgcgggcagagcaaaaagacgggataataacaggggctagaaccctagggctggtgatatattcagatatgaggcaggcagccatgatacacgagcaactagggaagagtcagaatgccaagcgggcaagagagtcgcgaggtcgctttactacggatagctcacggagctgaaaaactcggattgagtaagtcccggaatttaaagaaaccaaatggtatcacaggtttggaatcttaagaccaaggcaggtggggaaggaaaagacccgagagggttggagttgcttctcggagtggggtctgggaataatagacggcagccattctggaggtaaaagagtaaaaagagataatcctacctctctgggcctctgtggaggcaactcccaatcgtttggctccccagcggcacaagcgcaaagaacgtgcaaaaagcagcgccatcttgcgccttggatgaaccgggcacgcctcccgcttacagacacagccatctgcccgcccgctcccctagcacgtggtgcgcgaggggcggccgcgcagtgttatgacgtaggcgacgcccgggggcgggcggccgccaaggtagtggtttctgttctgtttctgcccgcggttaatgctgcttattcagtttttctgcgtagacgaacgctgctcacatttgaactacgtaaaacttttagagatatagtgtagccagatgcttagaagtatagattttaaaattagacagtactgtaattagctttgatcccggcttcactgtgtgagtttgggcaactcactccacttttctgagccttagtgttctaatttataaaatagaaattatatacagaccttagtaataattaagtgagaataatctaggccgggcgcggtggctcacgcctgcaatctcagcactttgggaggccgaggcaggcggatcacgaggtcaggagatcaagaccatcctggccaatatggtgaaaccccgcctctaccaaaagtacaaaaattagccgggcgtggtggcgcgcgcctgtaatcccagctacccgggaggctgaggcaggagaatcgcttgaaccagggagtgggaggttgcagtgagccgagattctgccactgcactccagcctggtgacagagcaagactccatctcaaaaaataataataattaatctagatatatattggcaaatagcaaccattgggtaattcacagttgtttataattaatagtaaatacataaatactgttaatgttggttttgtatgttcaaggctaggaacggatggtttaactcagcattcagttttctgaacttaaccaagagtagcaatattttggttcagggtatgaggtaggagactatggacagcctatattgaacatttcgatctgcattccattttattttattttttgagacagggtctcattctgtcacccaggctgcatgcagcacagtggcgcaaacacagctcactgcaaccttcatctccgaggcacaagcgatcttcctgcttcagcctcccatgtagctgggaccacatgtgcacgcaccatgccccgttaacttttttgtagaaacgggggtttcgctttgttgaccaagttgttctcgaattctcgggctcaagccatcctcccacctttgcctcccaaagtgctgtgattacaggtgttagccactatgccaggcctacatttttttaatcagtccacttctcaaggttctgctggccagtgcaatagcaacatacatcccacctccatcctcctacccctcaaaaaaggattttagatatatatttttaaaatgtatattctgagacggagtgtcactctatcacccaggctggagtgcagtggtttgatcttggctaactgcagcctctgcctctggagttcaagcaattttcctgtctcagcctcctgagtagctggaattacagatgcccaccaaccacacctggctaatttttttttgagactgagtctcactctgttgcccaggctggagtgcagtggcgcaaccttggctcactgtaacctccgcctcccgggttcaagcaattctcttgtctcagcctcctgagtagctgggactacaggcgcatgccactacgtccggctaatttttgtatttttagtagagacgggtttcaccatattggtcaggctggtctcaaactcctgacctcaggtgatccacccatctcagcctcccaaagtgctgggattacagacgtgagccactgcacctggcctaatttttgtatttttagtagagacagggtttcaccatgttggccaggctggtctcgaactcctgacctcaagtgatccacccaccttagcttcccaaagtgctgggattacaggtgtgagccaccacacctggcttctggcctagatatttaaaagcctaaataactaaccaaaaattcttcctcctctcccagagtggtaactgccttgaatgatgcacatggccctagttcaggccactgtcatccttggccttaaggctttctcatttcttttatttatttattttattttattattttttttattgagactgagtctcactctgtcacccaggctggagtgcagtggcagaatctcggctcactgcaacctccactgcccaggttcaagcaattctcctgcctcagcctcctaagtagttgggactacaggcgcccaccaccacgccctgctaatttttgtatttttagtagagacagagttttgccatgttggccaggcttgtctcaaactcctgacctcaggtgatctgcccgcctctgcctcccaaagttctgggattacaggcatgagccaccgcgcctggacaaggctttctcatttcaatgtagaaatgtgagtagcttctaagctgatctgccagcttctatctgtctgcttctaattcaatgtcggcattacagtcagacatgcaacctccctgcttaaatctgttaatgtgcctgcctcaaattcccttacatggtcacaaggctttacatgatatgactactgcctaccttctttgttcgttttcacaaaacatgatttcttcaagagttcacagggccattgcagtataattcactaggtgccatgattgaagtcatacaggatgctcaggaaacaaaggagaaacctctgatttagtatatttgagagtggtgggaagagacttcccaaaagccatacctatggcttgaaaagcagaaatggttaagcaagtgagggaatctcatgaattgcaacccatattcagccagttgcccagaaaccatggagtccttggcttgtctgtctcctctcacatatctgattgtcactgaatccctatcacattccccctactcctaccagcccccactgtcaactgcatcagccgtctaacttgtctccattctccccagtgctgctgagtgaaacctatatcacccattaggttgtgaatcctttttttttttttctgagacagagtctcactgtgttgcccaggctcaagtgccgtggtgtgatcttggctcactgcaacctccgcctcccaggttcaagcgattctcttgcctcagcctcctgaatagctgggattacgtgcacctgccaccacacctggctaatttttttgtatttttagtagagatgggggtttcaccatcttggtcaggctgttcttgaactcccgaccttgtgatccacctgcctcagtctcccaaagtgctgggattataggcatgagccaccactcccggcttaggtcatgaattcttaagaaaggtgattaaatactgtgttctctttgccccagggccttagtgttccctttaccacagaatatgtgctcattaaaacgaatgagtataaaaggagagggtggttgggcatggtagctcatgcctgtaatcccagcactttgggaggctgaggtgagaggatcacttgagcccaggagttcgagaccagcctgggcaacatagggagaccgtatctctacaaaataaattttagaattagccaggtgtggtggtgcacggctgtagtcccagctaattgggaagctgaggcacgaggattgcttgagcccaggaggtcgaggctacagtgagcctgggcaacgaagtgagaccctgtcttaaaaaaaaaaaaaaaaaaaaaaaaaaagttttgttcccatattttttggactgcagtggctcattctctccaccagttttttttttttcttttgagacagagtctggctctgtcacccaggctggagttcagtggcgtgatctcaactcactgcaacctccgcctcccaggttcaagtgattctcctgcctcagcctcccgagtagctgggactacaggcatgcaccaccatgcctggctaattttttgtatttttaatagagacggggtttcaccgtgttggccaggctgatcttgaacccctttcctcaagcgatctacccgtcttggcctcccgcccggcctcgccaccagtttggagtgcagtggcccattgtctccaccaggggtcagcatggcccagacttttcagtcagctaaataacgtgagaagagagcttagagatttccttcagcaaagtcctgctctgtcaatactttgcattttggtagtaatgggaaggttccaggattgtgtttctgtaggatttcccctttggttcctgtgagagctgaagcaatcactacacatccctcacaccgtcacttaagacacatccattactttattccttattcagggaatagccttgcttgtcatctcttgtattatttaccttttacaggctgaccattcatttgataaactcaccttcctcattcagatgatttagctgcctcgttgctcattgtaattataattcttttttttttttaaacagattctcgctctgtcacccaggctgcagtgcagttcagctcactgcaaacgccgcctcctgggttcaagcagttctcctacctcagccacccaagtagttgggatcacagat

SEQ ID NO: 95232 - DNA, 20244 bp, Homo sapiens
gttgtgctgcatgggagtggaaaggcaatactcgttcccaccctacattctgagcactaatacatcccactccttgcaggaggcccaggcatatgcagatgacaacagcttattgttcatggagacttcmgccaagacagctatgaacgtgaatgatctcttcctggcaataggtaaggtcagaacatcctgaggtcctcctttttccctcgtttataggcaaaattatagctaacccaaatcaaggataggtgcgagtatctccttttgcaaaaactttaggtatggaaataccttaactttctgttatgacctccatccttggctgcagctttagctcccttgtcttcaatgtgtaagtttgccggccaggtgtggtggctaacacctgtaatcccagcattttgggaggccgaggcgggcggatcacgaggtcaagagatcaagaccatcctggccaatgtggtgaaaccccgtctctactaaaaatacaaaaattagctgggcgtggtggygcacacctgtagtcccagctacttgggaggctgagccaggataatcacttgaacccgggaggtggaggttgcagtgagccgagattgtgccactgcactccatcctggcaacagagcgagactccatctcaaaaaaaaaaaaaaagtttgcaaatagtgaaccctcccatcttcagaacattcttttaatctctcaaattctcccttttccccaattcagtagccgtttttggcgggtggaggcagaggggtagggaagtaaagtctaccatactttgttctcttctctttttatctctagctaagaagttgccaaagagtgaaccccagaatctgggaggtgcagcaggccgaagccggggtgtggatctccatgaacagtcccagcagaacaagagccagtgttgtagcaactgagggggtggctagcagcaaacaagtatggagctagcacaagagctaagaaataacckccatccctacccctcagcacacarcccctacggtaacagcacactgagccctggctcccaagggctgcctcctgacagctccgtcatggcactttttaacgcttcagcaacaaacaccaggcagctgttgccactggcctcctaccccctactctggggcttgggggtcaactccccccaggacttaccttccaaaacaaactttcttcactttgtattataggtacaagacagcgacttacgtatcttttctcctcctccctagtgttcctccccattttttcagaaaacacttctgactcctgtcccttccccttctgcttttggtcagtccctgttcttgagcctcttttctcctctccccaggatgcagaaagtggtgaacccaggaactgaggaaggaggtttccagttcatttacattaagggccctgggggagaataaagctcagagcaggagggagtaaggaaacatttcctttttgtttttatttggttggagtttctcatatttgaaaacattgcggtatccatgatttggccttgtggagggtgttcctaggtagaggtgagaatggggaggcaagatctcaggcaccaggcaggaggtgccttgtaagctaactgggcggaggtggaggtgcagtgtcaactgtggctctgtaactcttcaaaggcccagtttcccctcacgcagcctcttaggtagcgtttcccctaatcgtgggggttggaccccagagtcttccaaagaattttcactggttgcctrcrtctttggctctgctgtgatctgattggaggagggacagtttctggtacccatcctctgatttatacatatgcrttttttcccctctggcctttagatggcctcagccccagccaccatatacccctgcagtttgcactttaattgatggtagttcagttggggtacttgttttatggaagttttgattgatttacttgccctcccaccttctttttaattcaatgaaatctgaggttaatgcgaggttcgaggagaggttatagataaaactaccagtggcagctactcaagtcctatctccactgttagcttcctccaactctaattattaacctatattcttgccaagctaactattgactataggtttgcctttcctggagaattaattgagcaattgaggagtgtctcaggatagcacaggccaaggtaggggagtaaaaaggaggtcaggcaaaagggaggagttttctgtcctttcccaggtttcacactcaatttgatatccattaccatgtcttttctacttccttgtaaataggtatgatctttattcccactgtacagtctgttctatcctctgcctcccatcaggccctgtttctttgttcctttgttaatatcttgaatttagtccctccatccttaatccccccatccctccccatcatgcaaccagtggtttaatccatgtaccaataggggctagtaccacagaggcctcctgtggtgccctcgtatcataccacctgttcctgtggagagggaatgaccggcactgaaggtaccttacaactggctcatattatcagaggaccttggtcctttctaaatctctagtctctcttcatatccttcatcaggtgttttaagatgtctctgagaagccatcaaggcaaaagagaactttaagttccttgttccagcccggagttttgggaaagaaagaaaggaaaggtcacagtgacctaggattggaaccttcctgcccttttggcttgcagactgccttctatcccagaacagctgagaaatctatgaagctgagattctgaaggacccagcttaggttcttccacttaggcctcaattcccttccttttccaggggcagccttagttcccatggccctgaaacacacacatttcccccttcctttcccagaagccactggccccccatagcacccagtgcatcctttttacaagtggaagaactaggatggctttccaaagtcttctagaaatgaagttctttctctgtgcagctttcccccttggagcaggagtgaagatgtttcattatcttgggcctgggaaaccacttccccaggcttctccctccccccacccccataggaacaggatttggccttagcttytgggcstatcggctgccttccctctacttcctaccacctcttctgccttcctttgagctctgttgggcttggggatcttagttttcttttgtttatttcccagctcatttttttcttctggtcagtttttttaagggggggtgttgtggttttttgtttttgttttgcttctgagaaagcatttgcctttcttcctctcccaacataacaatcgtggtaacagaatgcgactgctgatttaccgatgtatttaatgtaagtaaaaaaaggaaaaaaagaaaagggcattggagtgttgcttttttttattttattgttattattattattatttttgctatttgtcaggtactaggaatttggaagaaaggatacccagtaatgttctactgaatcagaaacacacctttccctgcatcttgatacatctttattccctttaatcttttcttaaacatctagtttagaaaatagcccttctattgctatttaatcacccctcttctaaggccactagattgttcatcaaatcaaaccctattatatctttttaggccctcttaacagaatgtatatgtgtagggtatggtctgtggatctttgggcccactgatcagattagagagaggggtgctatttgaagtagtatacaaaaatgtatgtgcatatttctttttttttttttaattgagacggagtctctgtcgctagcctggagtacagtggcacgatcttggctcacagcaatctccgcctcctgagttcaagtgattctcctgcctcagcctcctgagtagctaggattacaggcacgcaccaacacacccagctaatttttgtatttttagtagagacggggtttcaccatgttggtcaggctggtcttgaactcctgacctcgtgatccacccaccttggcctcccaaagtgctgggattacgggcgtgagccaytgcgcccggccgtatgtgcatatttctaggatccatttctatatgtttctcaaaggggtccatgacccaaaggttgaaaaacatcactgagttagttttcttgtagcttccacctcaacgggaaaatttcccctggatctgctcttgactcctagtgtacttcaaacccttcagtccaccacagtctaaaggtcgagggaagggaaatgaaataggattatgtgtggttgcagtaggctttaaattccaaagaatctgaaggtggataggaaagaggactggtgccagacaaatctgacattctaggcctgtctctgtcaacttaaccagctgtggccttgatcaagttagttagtgccttccgcctcgtttcttcatctgtaaagtaaaagctgaagattaaggtcaattatgtaaagtatgtgtgtcacacaaaagtagatgacactattaggaaggaggcttttagatagtccctaactgacttctctgtatcttcctttggctgagacttttttttttttaggttgaagctcgctttctctctctctccctctttctccctctctctctctctctcactctctctctctccatatatatatacatatatatatatatatatattttttttttaacaactggtaggataggttgggcattagccttcttcagtgatttgattgtatacagattgaaatcctttccatttccaaacacttaagagccaaagccaacttgccaacttttcactgtcggttcccttaccttatatctcttggtaataccccccacccccgttccctgattcctggtaaaagctctagttggagagccgaaaggaaaggaaatgatctttcaaaattaaaggtgaacaccttcacttaaactgattaaaattgcagctccaccgtccggcctctagagggcagtgtatggatacatttgtccagattgggggactaggtttgataaattttgtcctgcatcaaatgacaaaagggtaataggaaatgtattatatttatgccccttactttgagataagagactacaaccttcatacttcggggtgttaagctgccattgctcttgttaaggggcagtttgttttttaagagatggggtcttgctctgttgtccaggctggagtgcagtgccgcgatcttggctcagtgcaacctcgaactcctgggcttaagsgatcctcccgcctcagcctcccgagtactgggactacaggcgtgtgccaccaaggggcgattattattttttttttctacgcaaaataaaagacggctattcagtgttgttgtttcatttttgtttggggagaaattcgactagcccaaggaatctcaaattcttggaaccactattttaggcatttctgttatcattcctggaatacgagaactaagcgattgactttgctttccctaaaagataaacagggtagttgtagttgcaacagagtagatagaggtaggtctaccctgggtttaaagtggagatcacagccggggaaaaccggactggatcccgaggcctcctccagggaggggcggcaggggtgtctcaaaatctcccacctgtcagcccaacttttggattccttgtcaccttccacactgcccgagctccggacatacagccctggtgcacaagggtcccattctttgcacaccaggggtataatggactccggactgttggcgagagtgacagcaaaaagagccagcctcttctcccaggcttcttagcaacctgcctgtctcggctccaggaggcgggttccagccaatggttgagccacccgcttccagccaatggctgagggataagctgaggggagtgagaggtcacttactgcagccggacataacggcgctggccccgccccttctcgagaactcgcagagctgggctggtaaaattgcagtgctgaagacactggacccggtaaggagactgggggtggtaaagaagctggggaggaagggctgctgagctgggcagcggagggggccttggtgtccagctgtgctccgaacctcaagggcaacaaaactatcagtacctgcctccactccttctgtctgggtgctcttgagatcgcggggtgttgccgcaagacccttttgtgcctggatgccggacgtatgttcctacctaacgtgcccatggggagtgaggggtcatcacctgcaccaacgggtggcatttctgtattacagcaaaaggctgtccctcccaaacctgggattctgggctcactgagttcacctgcgagtcagccctacctgcactgctctggtctagtayaaacaggctgctggcattgaggtaggtggcagagagagtaatggtcccatggcccaggggcaaggtgaagactgctcctattcccatctctaggtttcctttcctccctacccacgacccacccaccccagcacattggtctccagcatctcatcagcagtttagacatttgtcacccctcctcactttggccctgctgggtcagtgctctctgttcagcaatttgaggaagaaacttgcagggcagagagcagaaaaattaccttccttctccagcctgcccctgacactctggccattaactcctcaatttgctgagctcactacagtggcacagagaagattgaggtggtccgggaccctaggttggggtccagttcccagctgggttcaattttttttagggtgaatggagggagagttggggactgaaaagccttcaaagacaatgttattacagcagtctccccttatccaaagtttccttttcctgagtttcagttagctatggtcaaccgcttggaaaatagttgaacacagtacaataagatattttgaggctgggagtggtggctcatgcctgtaataatcccaggactttgtgagaccaagtttgaaggatcacttgaacccaggagtttgagaccagcctgggcaacatagtaagacctcatctctacaaaaaaaaaaaaaaaaagaccatgcatggtggcacacgcctgtggtccccgctactcaggaggttgaggcaggaggatggcttgagcccagaagtttgatgctatagtgagctgagatcacgccactgcactccagcctgggcagagcaagaccctgtcaggggcagggggaggggaggggaagccggacagtggctcatgcctgtaatcccagcactttgggggctaaggcagcaagaggccaggagttcaagaccagccctgacaacatagactcccatgtctacagaaaaattagccaggcttggtgacacacacttgtagtcccagctgctggggaggctaaggcaggaggatggcttgagcccaagaggttgaagcttcagtgagccatgatcgacacttgctccatcgcccaggctttttttttttttgagacaaggtcttgccctgttgcccaggctggagtacggtggcgccatcataattcattgcagtctcgacctcctggactcaagccatcctctcatctcagcactcctctccccaccaccccggtagctgagactacagacaggcaccaccatgcccagttaatttgtttttttttttctagagacacagtctcactatgttgcccaagctggtcttgaactcctggagtcaagtgatcctccttccttggcctcccaaaattttgggattataggcatgagccaccatgactggccaaaaaaaagtatattttgagagagagaccacattcatataacttttttttgtttttgttttgagacagggtctcgctctctgttgcccaagctgaagtgcagtggcacagtcagctcactctgtaacctcaaactcctgggcttagatcttctcagcctccagagtagatgggaccacaggtgcgctccaccatgcccaactaactttttattttgtagggacggagtctccaactcctggcctctagcagtcctcctgtgtaggtctcccaaagtgctagtgtgtccggaattggtgggttcttggtctcactgacttcaagaatgaagccgcggaccctcgcagtgagtgttacagttcttaaaggcagcgtgtccggagtttgttccttctgatgttcagatgtgtttggagtttcttccttctggtgggttcgtgstcttgctggctcaggagtgaagctgcagaccttcacagtgartgttacagctcataaaggcagtgtggacccgaagagtgagcagcagcaagattcattgtaaagagggaaagaacaaagcttccaccgtgtggaaagggacccaagcgggttgccactgctggcttgggcagcctgcttttgttctcttatctggtgccacccacatcctgctgattggtagagccgagtggtctgttttgacagggtgctgattggtgcgtttacaatccctgagctagacacaaaggttctccacatccccaccagattagctagatacagagtgttgattggtgtattcacaatccctgagctagacataaaggttctccaaggccccaccagagtagctagatacagagtgttgattggtgcattcacaaaccctgagctagacacagggtgctgataggtgtatttacaatccctgagctagacatgaaggttctccacctccccaccagactcaggagcccagctggcttcacccagtggatcccgcactggtgctgcaggtggagctgcctgccagtctcggtgccatgcgcccgcactcctcagcccttgggtggttgatgggactgggtgccgtggagcaggggtcggtgctcctcggggaggcttaggccccacaggagcccacggcgaaggggggctcaggcatggcgggctgcaggtcccgagccctgccccgcggggaggcagctaaggcccggcgagaaatcgagcgcagcgctggtgggccggcactgctgggggacccagtacaccctccgcagctgctggcccaggtggtaagcccctcattgcccggggccggcagggccagccggctgctccgtgtgcggggcctgccaagcccacgcccacccggaactccagctggcccgcaagctccgcgctcagccccggttcccgctcgcacctctccctccacacctccctgcaagctgagggagccgactctggccttggccagcccagaaaggggctcccacagtgcagcggcgagctgaagggctcctcaagtgccgccaaagtgggagcccaggcagaggaggcaccgagagtgagcaagggctgtgaggactgccagcacaatgtcacttctcactaggattataagggtgagccaccacacccagctcttttattacagtataatgttataatttttttctttttctttgttttttttttgagacgtttgagacggagtctcactctgtcgcccaggctggagtgcagtggcgcgatctcggctcactgcaacctccgcctcctgggttcacgccattctcctgtctccggagtagcagggactacaggcgcccgccgccaagcccggctaatttttttttttctatttttagtagagatgaggtttcgccgcgttagccaggatggtttcgatctcctgacatcgtgatctgcccgtctcagcctcccaaagtgctgggattacaggcgtaagccactgcgccgggctaatttttctattttgttattgttgttaatctctcytttttttttttttttttttttttgagatggagtctctctctgttgcccagrctggagagcagtggcgtgatctcagctcactgcaacctccacctcccaggttcaggtgattctcctgcctcagcctcccgagtagctggggttacaggcacgtgtcaccatgcctggcttatttttgaatttttgtagagacaggttttccccattttggccaggctggtctcaaactcctgacctcaggtgatttgcccgcctcagcctcccaaagtgctgggattacagacgtgagccactgcgccgggcattgttgttaatctcttactgtgggtaatttagtaattaaactataagaggtatgtatgtatgggggaaaaaacagtaatatagggtttggtgcaatctgtggtttcaaacatctactgggggtcgtagaacatatccccagtggataagggggtactactgtacttgttgrctcttcatgttagctctgctaggcagatgtcatttcagagawgaggaagcaagttcagaacggcttggaatcttgctcaggaaatcgggctggttaatgaataacaagagatccagtttcacaaacccaaggcattttgcccccagaatctgggcttcttcacccatttaggctgtcactacttttttttcacttttttatccctgtttaagtcagtctgacccacagttgtcctctgctgacttcagaaataataatctggccagtagacatttggtttcggtcctttaggcccttcgccccaggcatcrttctctatggtggacaaagttcagaatggaagatgggagaaaggtgattctgattctagaagcacccatccctcctaccccattccccacccgcattacctgccatcctgtcagcacagtctgtctctgaagtgctccaagttttctctaagggcccatttggactcccactctcaagactcctcacttgcccagaaagctccttgctgaccttctctgtgtcttcctctcacccattcccttaggcctccctaatatcccctcccagggtctccctatcttgatcccagaatcttccttctacaggtctgctacaatgctgctgctgcacagagctgtggtcctcaggctccaacaggcctgcaggtaggccagcccatcccaggacttgcctcctagcccctatctgccacccttagtgtcttttacaatgtcataccttgcaaataagacagttgagagagtgtgtccagggaggacagagaaagccagatcccacttttcccacctatccctggagaaactaagttccaacttaaggaaccaatggccaaccagggagaaagaagtagaccccaagccttcactagccctttcacatgaccatacgtgctactaagaccgacctctcttccagactcaagtcaatcccctcaaggatctgcattcaggcctgctccacaaatgattcatttcagccccagcgccccagcctcaccttctctggtgataactccagcacccagggatggagagtcatggggaccctattaggtctcggtgcagtgttggcctatcaggaccatcggtgtagkgtaagtagggaaagtgcttcattgtcagaacagactgggtgcagtggctcacgcctgttatcccagcactataggaggccaaggtgggtgggtcacttgaggttaggagtttgagaccagcctgggcaacatggcaaaaccccatctctagtaaaaattagccaggtgtggtggtacatacctgtaatctcagctacttgagaggctgagacacaagaatcacttaaacccaggaggctaagtctgcagtgagccaagatcaasatcrggccactgctctccagcctgggtgacagagtgagactccatctcaaaaaaaaaaaaaaaattgtcagaataaaggaatcagtcctagtaaactccacaggcaacccaggctgtgacccatgttcttgtagttaccacagagttcacagtgacgcagtcttcatgcacagtggagatgaaatctgctaatctgctaccttcgcttcccagtggccaacaccgtgggttgggtcagggtgagctcaagtgatttcttcttattcttcttcattttttcttttttttttttttgagatggagtttcactcttgttgcccaggctggagtgcaatggcatgatctcagctcaccacaacctccacctcccgggttcaagtgattctcctgcctcagcctcccaagtagctgggattacaggcatgcaccaccatgcccagctaattttgtatttttagtagagacagggcttctccatgttggtcaagctggtcttgaactcccgaccttatgtgatccgcccacctcggcctcccaaagtgctgggattacagttgtgagtcaccacgcccgaccaagtgatttcttcttaatagtctcttcccttttatcttactccttccctgccaataggctgctcaggagtcaacacacatatacactaaggaggaagtgagttcccacaccagccctgagactgggatctgggtgactctgggctctgaggtctttgatgtcacagaatttgtggacctacatccaggggggccttcaaagctgatgctagcagctgggggtcccctagagcccttctgggccctctatgctgttcacaaccagtcccatgtgcgtgagttactggctcagtacaagattggggagctgaatcctgaagacaaggtagcccccaccgtggagacctctgacccttatgctgatgatcctgtacgtcacccagccctgaaggtcaacagccagcggccctttaatgcagagcctccccctgagctgctgacagaaaactacatcacacccaaccctatcttcttcacccrgaaccatctgcctgtacctaacctggatccagacacctatcgcttacacgtagtaggagcacctgggggtcagtcactgtctctttccctggatgacttgcacaactttcccaggtacgagmtcacagtcactctgcagtgtgmcggcaaccracgctctgagatgactcaggtcaaagaagtaaaaggtctggagtggagaacaggagccatcagcactgcacgctgggctggggcacggctctgtgatgtgttagcccaggctggccaccaactctgtgaaactgaggcccacgtctgctttgagggactggactcagaccctactgggactgcctatggagcatccatccctctggctcgggccatggaccctgaagctgaggtcctgctggcatatgagatgaatgggcagcctytgccacgtgaccacrgcttccctgtgcrtgtggtggttcctggagtggtgggtgccygccatgtcaratggctgggcagagtgagtgtgcagccagaggaaagttacagccactggcracggcgggattasaaaggcttctctccatctgtggactgggagactgtagattttgactctgctccatccattyaggaacttcctgtccagtmbgccatcacagagcccygggatggagagactgtagaatcaggggaggtgaccatcaagggctatgcayggagtggtggtggcagggctgtgatccgggtggatgtgtctctggatgggggcctaacctggcaggtggctaagctggatggagaggaacagcgccccaggaaggcctgggcatggcgtctgtggcagttgaaagcccctgtgccagctggacaaaaggaactgaacattgtttgtaaggctgtggatgatggttacaatgtgcagccagacaccgtggccccaatctggaacctgcgagrtgttctcagcaatgcctggcatcgtgtccatgtctatgtctccccatgagcatggaaaggagccacctccacccctttccccacccattagcctcactgcttcagaaaaatctttcccacctttcaacttcttggatcacaactctggccttcctaagccatacccaagtacacatatagcacatttcacccaaggaccttccctctttggacactatgttacatacccctcttggcctttgaacctgtgccaggaagtgtgagctgttacagcaaggggctagaagtgaaaaaagtaattctggagacaagcactattttctcttcctaccccacctccatttctaatgcctactgccatcaaggccttgttttgcttttctttttggattgttcagagaaatgtgtgtggcatgtgtaagaaaagtgtatatactatcttatactacctctccaggttgccagagagttgcgaggagagcaaggggcacaaccgtctccctttatagttctacttttctaataaatagtctgtttaagatcataactcttgggcctggggagtgagcctattgcaggaggaaggatgcatttgtactgggatgtataatgagattagaccaaaacaaacaaaactggggaggaagacagagaggaagtaggcttgtaggttaagaagtagggcttccggctgagcacagtggctcacgcctgtaatcccagcacttgggaggccaaggcaggtggatcacttgaggtcaggagttcgagaccagcctggccaacatggcaaaacccagtctctaccaaaaatacaaaaattagctgggtgtggtggtgggtgcctgtaatcccagctacttgggaggctgaggcaggagaatcgcttgaaccaaggaggcagaggttgcagtgagccgagatcacacccactacaccccagcctgtgcgacaaagcgagattctgtctcaaaaaaaggggggcttccttctctgaggtttggcagtatctgcagggacacctaggtgattgacctcaggataccatgaagagaggagaggtgacaaaaacatgtaccctccaactcctttccccaacagttccaatgcacttggcaggaaaggcaaagggtgctaggagtttaaaatcaatattgtcttaggaggtcgtgaaagcaaaataaatcttgaggccccagaatcactaagctaaagggaaaagtcaagctgggaactgattagggtaaacctgcctcccattcaaagtcatccctctgctcactgagataaatgcatacctgattgccttctttgagtggaatacaaccatttgcctcttttttttttttttttttgtagagacagagtcttgctctgtcacccagactggagtgcaggagtgcggtggcacgatctccgctcactgcaacctccgtctccggagttcaagcaattctgtctcagcctcccaggtagctgggacgacaggcgcacaccgccacgcccggctaatttcttttgtattttagtagagatgggtttcaccatgttgcccaggctggtctcgaactcctgagctcaggcagtacgtctgcctcggcctcccaaagtgctaggattacaggcgtgagccaccaagcccggcttttttttttttttttttttttttttgagatgaagtctcactctattgctcaggctggagtgcagtggtgcgatctcggctcactgcaacctccgcctcccgggttcaagcgattctcctgcctcagcctcccaagtagctgggactacaggcgcgggccaccacacccggctaattttttatttttagtagagatggggtttcaccatgttggccaggctggtcttgaactcctgacctcaggtgatccgcccgcctcggcctcccaaagtgctgggattacaggcgtgagccactgcgccccgctccatttacctcttatctacctatgacctggaagcctcctcccagcttgagttgtcccgcctttacatatattgattgatgtctcttgtctccctaaaatgtataacaccaagctgtgctccagtcacctagggcacatgtcgtcaggacctcctgaggctgcgttacgggcgtgcgtccctaactttggcaaaattaagttttgccaaaaacttcctaaactgagacctgtctcagatttttgggattcacaaggtacagagggaaaacttggctctagggcctgacgtgccaggccacatcgggcgtccagcgtgtgcttagattgcaaactgggtgcagattaaaggctagtttttgggttaccttcggcagacgatggtgcctttcggatttgaatctttcggcgctcggctactctcccctagctcctctcccattttcccccagcagtctcccgggcttggggacgctcggtgttcggccacgccgcctgtcgcctggtagtgggaccggaagttgttagggggagggggacggctgtgatggggggggatatttgggggggcaagtcccttctcaggtgaagctgctgatggagatggagccgccgccaccgccgcctctgagcgcccgggtcctggctccggcccggcgactgccgccgcctcagtgaccccactccccccgcactgggccgcccgggccagagtgggggacccccgccccctcgcctccctctcccccaacactgtcccctctccccaacccctcacagcctgcgcgcgcgcggagacacctcaggtgagtgaggggcggggcttggtgggggtaaagcgggggcggggcctcggtagccgggggcggggcctgaggggctctggcgtgaaggaggggggagacgtgggcgggggaaggggccaggctgagagagggtcgcgggttgggctggggccggagggttggaagatggccgggggagtttggcccgaggccccagtattaagagcgaggtagcagggactcgggggtcctaaaaaggcgggagacagatcaaggcaaggggccgaggacaggcaggagctgccaggcgcggggctcctccgtggggatgtggcttgggtatacagcagaaggacagcgaggagaaaggagcagcaaagagggtatctgaacaaaaaaagcgagggacccgggtgttgggtcgaggaatgctgaagacaggaatctggggataaagacgtaggcctaggtgagatctgggaggcaatgagcatattgggagaaacatgtagagaagaaacttaggatggagtgagaagtgcacagtgtagggtgagaggtgtagggaacttgggaagcaaggctgggaaagaagagattcactgcttgagagccctaagaaagaaatgcaacagaggaatccccagggcagacatccagacgggagctgcaaacttgggaagcaggctgcctgctcctgtgtaccgaaacagccctccctgtacctcctcacacaaaccccatcccgttattttcttacctcatggctgctagagttgtaggttctcactttttaaattttctatattatttctgtgcctttaaaaaaaattatgactagtcctttctgggaacagtggagtgtttaatggaacgtggacctttcgatatgcttatgaaatattgtaccccaatccccatccaaggtcaagaagttacgaactctgcttccaggaaatttttttttttttttttttttgagacggagtttcactcttgttgcccaggctggggtgcaatggcgcgacctcagctcactgcaacctccatctcccaggttcaagagattctcctgcctcagcctcccaagtagctgggattacaggcacccgccaccacccctggctaattttttgtatttttagtagagatgggggtctcaccatgttggccaggctggtcttgaactcctgacctcaggtgatccacccgcctcagcctcccaaagtgctgggattacaggcatgagccaccgtgcctggccagaaaattttttgcataccttatttcgccccattcccttctctcatgaacaaaactgtctattgttgttactcttgtcaaccctcgcttatatgtctaatagttcctactgtgcctgtctccccagcctgtgccctcgaagcatcaatggtgggcatggtatgttcctgacatgctcacatgtcagctttagatgttccaacgtcatggtcaaccagatgaccattgaagcctgtctccccttactgatacttgctcactttgcctgggtgaagatacatgttcatatccttaaggaagcatgaaaatgttatctgactacctagaatatttccacttaacgataactcagattctgaggacaaggccagataaaaggccaaatcagacaatctttgaaagcatagtgtttcgtttggttggggtgtatggtaatccctcacctccccatggacctgccagtaggtccgtgaatcttgctttatggtttgcaggaggacttcagctttccctactaacagcctaaagccagagaatccagacagacccttgggtcatgagaacagtcagatgagtagctcctgagataaaaataaaatcttaaaagaagaaaatagctttaccattgggaagcaagagaagtttcactggagcttctggggtgggcttcagaatggtgagagctgccctcattttggcagcttcagaattataccttgccctagtcaatagaagttgatgtctcaaacacaaaatataatgtctttgttgcccactgagtgcagttagttagttgaattgtagcttctgggcaatccccttcctctgagtaggttaagggtaaggcatatttcaggacttggctcagaaataagtcctgacttttttccagtgaaaatgcaactgaaagtctctttatgtcctcttagtttgaaatctgcagcttgaacttcccagcatgggagaaacttatcccacctttcaccgtaccccctgcccccccacacacagtagtatccacaaaggaattattttttttccccaactggccatctctctctctgtctctctctctctctcgccacacacacacacaccaaagaaaaagaaagataggtatttctagcctcgttttactctgtaggaacaaataagagtgtgggaccctgtgagtgtggacaatgccacaggcaaagggactccctttctttattggtctgttgactctgctgaagaaagctttgaattccaggctttgatttgcttcctcttcttagaagagttatggactctgttctggaaacagagagataggttcaaagtttatcagacaaaggcatctaagaaagggtagtgctgatatgaatgacctggtccagctgcggggaggatccacattgtaggctctgatgcaatacctatgctggggtagtcctcaagctaagaggccgtttctactttagagacttaatgaccatctagtttggtgttttcctcaggtccattatctctgaaaagagacataggaggaagaggattatttatcctcccatccataagcctgtgtttccagttcaaggatttaggtcagcaagacgcagacccaaaaaccattcatttaataacccaagaaagaaggcaagcagggtggcccaaatcttccaactggggcaagatttaatatagtgttccagtggaaagaatcttctaatggtaacttggactctacatgtcctaattctgttgttaatgagattgatgactctgggcttagtttcttctgttaaaaactaggaaattgtagatcatctctcaactccatttcagctccaggatttctcagttcctggagtacccctgccctagaccctccacatgaagaagagagtcttaccaaattggattatcagagcaagactattagcagagaagcctgaaaacatctttctggcccaaacaacagtgaacttttttgatcagcatgtattagggacttttgggcacaattgcaatcaaaggcaattgttcctgtctcttctacattttttttgctactgtaccctagtcagaatagttcactgagacttccctgtaatttcaaacttcacttgagagtgctaaccctgttttgggcatctttggctttaaaactgattattataaaactcaaattgaatttccctgctctactttctccacccctgcccaaacataccactgaacagcagtgattttgtgaggcctttctataaacagagagctatacttgggggtacacccaaaaaccccaaaaagtatcatctcctatgtatcatatctagtgatttaaagtgtttagtttggcccttttccttagttccttatgtcctgaaatgagacatgggagggataggattgtttcttctcccactcataaaccttagccttctctctcttctgcagtctacatggggaggacagagaagcgcaaagaacaagagaaaagatgcatccatctgagatctaaaaggagacaatgaggtgatattttccccctgcccaggtgttgt

SEQ ID NO: 95233 - DNA, 19901 bp, Homo sapiens
  misc_feature (1)...(19901): n = A,T,C or G
tctctgcctggccgcccatcgtctgagatgtggggagcgcctctgccccgccgccccgtctgggatgtgaggagcgcctccgcccggccacgaccccgtctgggaactgaggagtgtctctgcctgaccgccaccccgtctgggaggtgaggagcgtctctgcccggccgccccgtctaagaagtgaggagcccctccgcccggcagctgccccgtctgggaaatgaggagcgtctccacctggcagccgccccgtctgggagggaggtggggggcagcccccgcccagccagccgccccgtccgggagggaggtggggggcagcccccgcccggccagccaccccgacttgtactttatataaaatatcacttggacaatctgggtctcaatcaagaaatacgtaggaaaggccggccgccgtggctcacgcctgtaatcccagcactttgggaggccgacatgggcggatcacgaggtcaggagatcgagaccatcctggctaacacagtgaaaccctgtctctactaaaaaaaatacaaaaaaattagccgggcgtggtggcgggtgcctgtagtcccagcgactcgggaggctgaggcaggagaatggcgtgaacccggaggcggagcttgcagtgagctgagatcgtgccactgcactccagcccgggcaacatagcaagactccatctcaaaaaaaaatatgtaggacaaaaacatgttacaactctaaaatagattacattatttattcagaatgctggttaaggcatatctcaatctgagctaatcaagcttattctattttagacattattacttatattaataaatttaactgatttcagaggagagggagaggaggttgttaaaggccaacattgatagcaacagagtgagaaaaattaagagttcacaaacttcagcttaatggtctcatggagaaatagctcttttttacttttaacttttttttttttgagatggagtctccctctgtcgcccaggctggagtgcagtggcgtgatcttggctcacagcaagctccgcctccagggttcacgccattctcctgcctcagcctcccgagtagctggnnnnnnnnnnnnnnnnnnnntcccgagtagctgggattacaggcgcccaccaccacacctggctaattttttgtatttttagtagagatggggtttcaccgcgtaagccaggatggtctcaatctcctgacctcatgacccacctgcctttgcctcccaaagtgctgggattacaggcgtgagccaccatgcccggccctttttttttttttttttttttttaatagagacggggtctccctacattgctcaggttggtctcaaactcctgggctcaaggaatcctcccatcttggggtcccaaagtgctgagattacaggcgtgagccatggagccccacctcattaacactgaaagcatttagcattgcaatgtgataaaaaggtttgttgaatgaataaccctaatacccaagaaaagttaaattacttggtaatttgataagaggacaaatgtgtgatacatttcaaaaagtgatgatcttcggttacctggtatgaatgtttttcttagaaacttggattaagaaatgtcaccaggcgcggtggctcacgcctgtaatcccagcactttgggaggcctaggcgggcggatcacgaggtcaggagatcgagaccatcgtggctaatatggtgaaacctcgtctctactaaaaatacaaaaaaaaaattagctgggtgtgtggtggcaggcgcctgtagtcccagctactcaggaggctgaggcaggaaaatggcatgaacccgcaaggcagagcttgcagtgagccgagatcatgccactgcactccagcctgggcaacagagcgagactctgactcaaaaaaaaaaaaaagaaatgtcaaagtaggccaggagcaatggctcatgcctgtaatcccagcactttgggaggccgaggtgggtggatcacgaggtcaggagttcaagaccagcctggccaacatggtgaaaccccatctctcctaaaaatacaaaatattagccaggtgtggtggtgtgcgcctgtaatcccagctactcaggaggctgaggcaggagaattgcttgaacctgggaggcggaggttgcagtgagccgagtttgtgccaccgtactccagcctgggtgacagagcaagactctgtctcaaaaaaaaagaaatgtcagagtaggcagggggcagtgacacacgtctgtaatcccaatactttgggagttccaggtgggcggatcacctgagttcaggagttcgagaccagcctggccaacatagtgaaaccctgtctctagtaaaaatacaaaaaaattagccaggcatggtggtgcgcacctgtagtcccagctacttgggaggctgaggcaggagaatcacttgaacctgggaagcataggttgcagcgagccgagatagcaccattgcactccagcctgggcaacaagattgatactgcatctcaaaaaaaagaaaaaaatgacagagtaatgtgtttaatggttaataatactctaattttgccaagacccaaattggtgatacaaaaccaaagttctcaaatcagattaagtcttgctggaaaggttgggagagggaggaagtcttggagcttcttcacttttatataaaattatctctttttttttgagatgggggtctcactatgttgcccaggctggagtgcagtgtcgcagatattggctcactgcaacctccatctcttaggctcaagcaatcctcccacctcagcttcctgagtagcctcctgcaatggtgcaatcttagctcactacaacctctacctcctgggctcaagccatcctcccatcttagccttcccagtagctgggaatacagacatataccaccatgcctggctaatttttgtatttttgtagaaacagggtttcaccatgttgcccaagctggtctccaactcctggactcatgtaatgcccccatatcagcattccaaagtgctgggattataggcgcaagccaccatgcccagcctgtaaaattatccttgttcaggtcagaaacagatgaggccatagatatgatataacaggctcacaaatgacaaaaggaatctttattttgatttctttttcatctctgctttttttttaagcaacccacattgtctagaatttaaaaaacatcctcaacattatttgccctatattactttttcaagggcattatactaaacagactctgctcacaaaatgtatgagaggaacaaattattgaatggattggataggataacattgacattagtcaatagtaaacaaaaataataatatcatgtatatatagggctaattttgtgccaggcattgttctcaatgcttctttcttatattagtctacttaattctcaaaacaatcctaggatataatccccattgttagtagtagtatcccttttatggatgaggaaactgatgtaaagagattaaataacttgcccaatgacagctagtgagtggcaaacacaagattcccagcctggctccagtggcaatatgcaatattctctttttttttgagatggagttacactcttgttgcccaggctggagcgcaatggtgcaatctcagctcaccgcaacctccgcctcctgggttcaagtgattcttttgtcccagcctcccaaataggtgggattacaggccaccacacccagctaattttgtattttcagtagaaaccgagtttctccatgttggtcaggctggtcttgaacttccaacctcaggtgatctgcccgccttggcctccctaagtgctgggattataggagtgagccaccgcgcccggactaatttttttgtatttttagtagaggccgggtttcatcttgttggccagcctggtctcaggtgatctacaggccttggcctcccaaagtgcagggattacaggtgtaagccaccacacccagccaaaatcctatgttttgatgcagtccactgaaattagttttgatcccactccaccatggaatgatttcctagttgccaaacccaaacccagaggatttttttcagccctaatttttttttcttcttttttatttttctttttttgttgagacagggtctcacaacgtcagccagcatggagtacaatggtgcaatcttagctctctgcaacctctacctcctgggctcaagccatattcccatctcagcttccccagtagctgggactactggcacatgccacacctggctaattgtgtgtctgtgtgtgtgtgtgtgtgtgtgtttatttttttacatattttttagagacaaggtttcaccacgttgcccaggctggtattgaactcctgggctcaagttatccacccacctcggcttcccaaagtgttgggattactgggctggccgtgcccagcccagccctttttacttattttattatttatttatttatttattttttattattatttttgagacggagtctcgctctgtcaccaggctggagtgcagtggcacgatctcagctcattgaaacctccgccttccaggttcacgccattctcctgcctcagcctcctgagtagctgggactacaggcgcccgccaccacgcccagctaatttttgtatttttagtagagacggggtttcaccatgttggccaggatggtctagatcgcttgacctcatgatctgcccacctcggcctcccagagtgctgggattacaggcgtgagccaccgtgcccagcctattttattttatatatttattttatttttttagagagtctcactctgtcgcccaagctggagtgcagtggcgctatctcggctcactgcaagctccgcctctcggatttacgccattctcctgcctcagcctcccaagtagctgggactacaggcgcccgccaccacgcccggctaattttttgtattgttagtagagaccgggtttcactgtgttagtcaggatggtctcgatctcctgacctcgtgatccgcccgccttggcctcccatagtgctgggattacaggcgtgagccaccgcgcccagctaatttttgtatttttagtagagacggggtttcaccatgttagctaggctggtctcgaactcctgacctcaggtgatccacctgcctcggcctccgaaagtactgggattacaggcgtgagccaccgctcccagcctaccctaagaatttctattcacatttcatagctgaggtctctcagcttccttcaaggtggacaattctgtatctctaggtgacccaattttatcccctcgtctttcgtgcacccagtttatgctaaccaggaaccatcacattattgcattgtttgttcacctggaccttaaaaggaaggttcttagtcttatttatcttattattgagtctcctcaatgccctgctaaagtactggttacattagtttatttcattttaataggtttaaatgataaagatcctgtctaggttgctaatctgtgcaatcgcctgggagcttgcaatctcactacttcgagagaaaaaccttattttggctctaaagagggctcctgacttcgccacgctcaccttcagtggtgcttcaccgcactaccacttccctaaccaccgcccctatggctgtcacctagatcaaggacctatctaaggagaaagcccaaggacaggcaaagacaggccacgcactttcaacaggaactcggcccctttcctaaacgtagttcctctgattaccctgtccaacggacgtcgctatgatccaattaagttttgaggctcagagtgacgccctctaacctcacactgtccaataaaaaaaggagtttcagattagcaccagttttgaccaatggatgagaagatcagcgtgtattaacctgtagaagcagcacagagaatgatgagcagccagttcacccaatggacctgcctactgcagcgtaggcctcgcctcaacggcaggagagcaggcggctgcggttgctgcagccttcagtctccacccggactacgccatgttggggtttgtgggtcgggtggccgctgctccggcctccggggccttgcggagactcaccccttcagcgtygctgcccccagctcagctcttactgcgggccgctccgacggcggtccatcctggtaagtgcttttctctaggagctaacgttccattttgccgccccatgaccttgagccggggaacgatggtagctcgggcctaagggatccgtggtgttaaaaggatgcctggagccgcgtcttgctctctaatggctggagaacaagaatgggacacccataggaggtttcttcgacccagctctgtcccattttgtataaagtcctttgtgtgacggaaaaggtgcgggcaggtgcgttgaccttccggttgaataggggtactgaactctcgaaaaatggggtcttgtgcatgcggatgggaaggctgtgcaggcgctttatcgatcgctgcgcggccttccctcttggacacgcgttccgtacaagcggaaagaggcctgacttcggctgagttttcctctccttgtgtgttaagtcctggcttccgatgacctttaactggcctgaccccagctccttccaatatcttttgtctgttagtcagggactatgcggcgcaaacatctccttcgccaaaagcaggcgccgccaccgggcgcatcgtggcggtcattggcgcagtggtggacgtccagtttgatgagggactaccaccaattctaaatgccctggaagtgcaaggcagggagaccagactggttttggaggtggcccagcatttgggtaagtagagtttgttaggaatagtaaagaccttgtgtagcccaaatatccccaaaaccaagctgtctgccttctatgatgattttatcaaaatgactttcgttcttctgagtttgctgaagccacatttaggtactgagaaggagtcttggtcgatttaggtcttgataccaatttatccttatgtataaccctgcgatgcctgtatctaacaggtgagagcacagtaaggactattgctatggatggtacagaaggcttggttagaggccagaaagtactggattctggtgcaccaatcaaaattcctgttggtcctgagactttgggcagaatcatgaatgtcattggagaacctattgatgaaagaggtcccatcaaaaccaaacagtaagttgctcttattgcatctatgcacaaaggaacttctgttatttgcagttttacacattaaggtgacatgttctcctaaagcagaatttttcttctgatacgttcgattattaaaatcacacagtgcagtttcacctgaagaaattaggatgcagaatttctgattgacaaaagcctactacttgaggtttttttttttgagagggagtttcgctctcgactcactgcarcctccacctcctgggttcaagtgattctcctgtctcagcctcctgagtagctgggattacaggtgcatgccatcatgcccggctaatttttgtatttttagtacagatggggtttcaccatgttggccaggctggtctcgaactcctgattttgggtgattccccccccacctcggccccccaaagtgctgggataacaggcatgagccactgcgcctggctagttgagtatttttaagactcggtcttatggcttaggtttaggagtctccaaaacttgtaggtttttgtatttgctattgctatgtgagggaatgctgttaggttaaggctcagtaaaatgaaaaatttatgacagttaaagtcagggaatgggattattgtttcctaagataataattttctttattgcagaaagttgggttagatcctagatgatagtttatctgatttatgtaagaaaggggaggtaagactgtggttcctcaggtaaagggatggacttgagagttgatagggagggatatataagattatcatttgctttcaacaaggtgaatagatactatcctctcttctacctttacagatttgctcccattcatgctgaggctccagagttcatggaaatgagtgttgagcaggaaattctggtgactggtatcaaggttgtcgatctgctagctccctatgccaagggtggcaaaattggtatgttattaaggggtacatattttccaaacctaatatgggaggaaaaactcatacaatgttatgagtggatattgacatctattcctcactgatgagtacgttctgactttcgttcttctgagtttgctgaagccagatgcaatttctgagaaggaataggatggaaggaagcaattactttttttgaagtttgcttatttaggaaagcagaactcttaaatattctttcttttcaacctcttatagggctttttggtggtgctggagttggcaagactgtactgatcatggagttaatcaacaatgtcgccaaagcccatggtggttactctgtgtttgctggtgttggtgagaggacccgtgaaggcaatgatttataccatgaaatgattgaatctggtgttatcaacttaaaagatgccacctctaaggtaagcattgagctaattgatgtccacgtggtagttacgccaggaaactattgccaactgaagccatgttctatattttctatttaatttttttttctttttaagaaaatgttaatattttcattttcgtgtcccagggcctacaaaggaaacctgttagtgttttcccccccaacttccaatacacaaatggacattttctttcctctttgatactgacattaaataacatttccaggttttctttttggtagatagtcccatcatttgaaagctaattttgggagggctggattggacgtggtacatatgtttcagttaagcctattttgkacttttcacttaacttgaataggtttttatttcctttctactatagttttgccttactaatataagaagctgtcttttttttttgaactgcatctctaatagggaaaagaaacttgcacacaaaaacgctgacaccttctgagaaaggatctgwggtcgtttctccgatttgggaaccttcagtatgtggcttctctactcctttgtcaggttttacgattatgtatgattactgcaggtagcgctggtatatggtcaaatgaatgaaccacctggtgctcgtgcccgggtagctctgactgggctgactgtggctgaatacttcagagaccaagaaggtcaagatgtactgctatttattgataacatctttcgcttcacccaggctggttcagaggtaagagggaaggcttgagaggacctggttcatctggcctttcttcggatgaggctaaggatgtagacacctaagacctttttttcttttaggtgtctgcattattgggccgaatcccttctgctgtgggctatcagcctaccctggccactgacatgggyactatgcaggaaagaattaccactaccaagaagggatctatcacctctgtacaggtaagaaaaattacatagatgaagatctgatttgtataaaggcagggtgcagtggtgcatctcagctactgaggaggctgaggcaggaagattgcttgagcccaagagatcagcctggggaacaaagctgtatgtatgtagagagatgtataaaactgactgggccaggcgtggtggttcatgcctgtaataccaacactttgggaggctgaggtacgyggatcatgaggtcaggagttaagacaccaccctggccaacgtggtgaaatcccgtctctactaaagatacaaaaaattagctgggcgttgtggcaggcgcctgtaatcccaactactcagaggctgaggcaggagaatcgcttgaatccgggaggcagaggttgcaatgagccaagattggggcactgcactccagcctgggtgacagagtcagactctgcctcaaaaaattaaaaaaaaataaatgaaggtatacatttaaatgtagatcacaaagcaatggtttctagtctgaggggagtccggcgctatatggaaactgagcattaaatatttactgtattagggctgagtgcagtggctcacacttgtaattccagcactttggggccgggcacggtggctcacgcctgtaatcccagcactttgggaggccaaggcaggcggatcatgaggtcaggagatcaagaccatcctgacttaacacagtgaaaccccatctctactaaaaatacaaaaaattagctgggcgtggtggcacctgtctgtagttccagctactcgggaggctgaggcaggagaattgcttgaacctgggaggcggaggttgcaggaggttgtggtgagctgagattgggccactcactccagcctgggcggcagagtgataatccgtctacaaaaaaaaaaaatttactgcattaatgtactatacattttcaaatatatatagatgggatatatagtaaaattacataaattttacatatagtaaaaatgtggctaaactgtaggaacttttcatgattcagtgtaatgaactattgtgcaagaagttttttgttcttgtttttaattcttttttttttttttttgagacggagtttcactcttattgcccaggctggagtgcaatgggtgcgatctgggctcactgcaacctcctcctgggttcaggtgattcctttgtctcagcctcctgagtagctgggattataggtgcccgacaccaggcccggttaatttttgtatttttagtagagacggggtttcaccatgttagtcaggctggtcttgaactcctgacctcaggtgatctgcctgactcagcctcccaaagtgttgggattataggcttgagccactgtgcccagcctcttttttatttttttattttttttaatttttatttttttgagacggagtctgttgcctaggctacagtgtggtagcacagtcttggctcactataacctccacctcctgggttcaagcgattcacctgcttcagcctcctgcatagctgggattacaggcatgcatcaccatgcctggctaatttttgtttccgtttttttttttttttttagtagagacccccgtctctactggtgtcgaactcctgacctcgtgatctgccctccttggcctcccaaagtgctgggattataggcatgagccaccgtgcctggcccccagcctcttgtttttaattctaaaagtgggcattaaaatagttaaaataaaagatgaagaacaaaaagaatgatactaaaaattcttccatcatggctgagagaccagataatctgtcagcttattcagcaggtattaggggtggtaagaagggtcttttgagtgctaagaatatggagtgagatgataaagataggtcagaaagggggatggcttaagtaaaattactttggttcgctgggcgtggtggctcacgcctataatcccaacactttgggaggccaaggcgggtggatcacgaggtcaggagttcaagaccagcctggccaagatagtgaaaccccgtctctactaaaaatacaaaaaaattagccgggtgtggtgatgggcacctgtagtcctagccactcgggaagctgagacagagaattgcttgaatccaggaggcagaggttgcagtgagccgagattgcaccactgcactccagcctgggcgacagagcgagaccctctcaaaaaaaaaaaaaaaaatttactttggttcctgttcttcatgggatctcactttaggctatctatgtgcctgctgatgacttgactgaccctgcccctgctactacgtttgcccatttggatgctaccactgtactgtcgcgtgccattgctgagctgggcatctatccagctgtggatcctctagactccacctctcgtatcatggatcccaacattgttggcagtgagcattacgatgttgcccgtggggtgcaaaagatcctgcaggtgagtatattactatgtgggatcagtgtccggaaagtcaaaaagagggcctgtggggactatatgaggactggatctttcttagtgatttgttttggagcaaggaaagttgaggctggcaattgctagtgagagctaatgaggtctcttgagtttccaggtacttaacgctttggaatgcaatatttttctttctttttttttttttttgagatgagtctcactgtgtctcccaagctggagtgcagtggtgccatctcggctcactgcaacctccgcctcccaggttcaagcgattctcctgcctcagcctcctgagtacctgggattacaggtgcgcgccaccatgcctggctactttttgtatttttagtagagaccaggtttcatcagttggtcaggctggtctcratctcctgacctcatgatccacccacygtggcctcccaaagtggtgggattacagacgtgagccactgcgcccggcggaatgcaatatttttctaacagcaccaaactaggactatggagaacaagacactgatctttcttggctgagggccctcataacaccaccaccttctctgccccctagcatgtaactttccctttgttagcttgtccaaattaaaggaatgagaatacttaactcagtcttcttttttctcataggactacaaatccctccaggatatcattgccatcctgggtatggatgaactttctgaggaagacaagttgaccgtgtcccgtgcacggaaaatacagcgtttcttgtctcagccattccaggttgctgaggtcttcacaggtcatatggggaagctggtacccctgaaggagaccatcaaaggattccagcagattttggcaggtgagattttgagtacaaatcttgaatgtttactgtgctgtggtcccattccaacaaccgtcaagcaatatatgtaatatactatgcttaattatattttttaatttaaaaaacaaacttacccattgattttgtttgaaaatactctacatttaatttgagtgtgatttgttacttgattctctagctcccttttattttatatgtattttttgagactgagtctctgtcgcccaggctggagtacactggtgcaatcttggctcactgcaacctccacctgccgggttcaagtgattctccagcctcaaccatccaagtagctgggattacaggcacacgccaccacgcctggctaatttttgtatttttagtagccatggggtttcaccatgttggctgggcttgtctcgaactcctgaccttaggtgatccgcctgccttggcctcccaaagtgctgggattacaggtgtaagccaccgtgcctggcccatgtgttcttaattcatactgtatcatatcttgtaaatttgatttgtgagggaaatttaagctttctaagatgacatgaattcatcacattctaactgatggcctgaagtggtgaggaatgttacatgatgcagaaagttgatatccctccgcttcttactctttttttttttctcccccatcatacaggtgaatatgaccatctcccagaacaggccttctatatggtgggaccyattgaagaagctgtggcaaaagctgataagctggctgaagagcattcatcgtgaggggtctttgtcctctgtactgtctctctccttgcccctaacccaaaaagcttcatttttytrtgtaggctgcacaagagccttgattgaagatatattctttytgaacagtatttaaggtttccaataaaatgtacacccctcagaatttgtctgattctcttggttctgacaacatagtcaacactgaagggttatgtatttaattttagttttagagacacggtgtctggctgtgttgccaagactggtctctaactcctgggctcgagatctcccacctcagtctcctgagtagctggggctacaggtgtatgtagtctcacatcaccagcactgttttcaacaattagatttttagagtggctataagaagcagtttcagcatgaagtgggccatgtatgtttgaaattggtccttaaaaatagccattctcttttgttgatggacaaccgtacctcttgtgaggggtttcctgtgggtagtgtgatcttagtagggcctcagttttgggccttttgttcaatacaaattgatttttttttttttttggcctctattccatgtggcacatccctacttcttggttaaaaataggacttttttgaagggcatattgggaaaaactcgttttagaaataacttatttccaggggttaatctgagtttaatgaattaaattttcaagaaatagtgatgaagaatactgatctttgttaaaatggaatcaaaagggttctctacatcttggttaggccttcatgtcttcagaaagtgtacttaactacttcctgacattttgggcaagcctaaataaaagttgcttgtgattccttgaggctatgcagaggcatataataccataaggcctagtccaccctctgtgaagatccccttatgaaagtccagaaaagataatcttacaagggaatagcaattttcagagttgctggcttgggcttctaaactaatgaagttaggttattttcccttcattttagccgactgagaggtgcaggggtagaagatatattttaccatttcaatttaaaagaagcgtgcaaggtcagattgggttcctcttgtgttcttttccgggaccagacccatccgactgccctctcgcggtagcactggagactctgcaagaactctgatcccattttcaaatccatgaaggccatttgctgggatgtggctctcagttaaagactgtttacagaccagctggggcttttgtcctggggaggagcctgtatctataagctccacccgctgagtccatcaagttaggtagaagctgggcggggacaagctgagctccaattcagaggcccctgggggctgaaggttggggagggctttttggcgcggggccaggggtggagtaggggcctctaagcttccttccatctgcctrtgacgtccttggcagcagcctctcccgcagtctctcctgtgtcatgatctggacagaaggtggagcccctgagctgcttgtgctggtagtttgctcccagaaaagctgggatttggggaaatgctgagttatgggggtgtggacacttcctctaggtcctgactctggagtgggtaagaagctggtagaaaaagccctagggtacaggtcagccctttctgctttgttttctcacgtcacccgatacagacctgggaactgaaatcctaaaggtcttttgcatccctccaccccttcccccaacatgttcacgtccttcagcgtttatcgagaaccttctccctctcagtagctgcaactatttgtttccttccccctttgccggcctcttctaccatgccactggagtgtcaacacagctctctaaccttcctccatatttctcctggtctgccctgtcctcgcctcctccctctctccacccagagaaagccccgcccttccctcctccctccccaccccmgtctgtcacacagggacatcaccctacagcagttcaggctgtgtggttcgcaggaagcatacactggctttttgattcttgctagttcccagctcacagtttgggaggatccaacaccaacctttacgtgaagtggrggcccaaggacagtgaggagctgggtggtcccagcctggagctgtgccagcctgacatgggtgagtatggggaccagccccggggaaggcctgagggatgcctactccctccctggctgactcagcaggggtggggcctaacctttgctcatttgggggctgaaggagaggaaacaggactctgggggacggggggcacagggctcagctagcgaggctgccgaccacgggatcctgagtatgggcaagccccagttctaaggaagagcctgagacgcatcttaggccagggctttcccagccccctccccgccgccccgtggaggattgcccctgctcctccccatttaagctgttgagattcaaggaaattttgacagtactcactgctagcccccacaaaagtaaagccggcttttggcagtgctggaaggtctttaaaatgcctcccctccctctcatttttctaaggccttttaagtctgtcttctctcctcccccaccttgacccaccttcaggtgggggctgcactgagcagctgcttcctgttgccccagagactgaagcaagggtggtggtggttgggggaaaactgaaccaaagtcgattctcatggtcccacatcagcctcaccagggctgctattgatggcccccacactacagtcactgagggcactgagtgggacgcaggattgaggttgagaggataggaggtttttgccttcgtggcttcctgattccaaaggccccacagccgtagggatggagccctgaggagctgaaacacggggaaccagttcacctagtagggcgctgcgcgtgacccccagcaggctcggccttgagttccctctcctgcacccctaggcctcctaggagcccatgtagctctttctgccttccccggcctcttttgtgaagcggtctttgctggtgccctgggagcgcgggcagagctctcccaagtccttcctttcggacctaccaccatcccccacttcaccgcagaagtttctgtctctttctgggatccgttctcttcctcccatctgggatccttcctggttctggcccctaggagacgccacccgctatcctctcccccagtggatccttcgcgactgctctcctgagcggttgtcctcacctcggtagttcctgcccctttaagcaccacctcctcccctccgccgccgccggcccagggctgggggaggaggcgcagccgccgcccggctcggccacctgcgcctctgccgccgccgccgccgcctgcggcccggccctgctccaggtgaggcccggcacccacctccagctccggagtcccttggcgggccgttcctgcggtatcctgccccgggatccctgctgccccgggattcgggatctgactctccccctgagggagctgcccttcctctctcccctgaactatctactcgcccattttccccctgtcctccgcgaccggaatccggaggcttctcacgcctctccgccatcgtctcccgagtacctttcctattctgggcccaggatctccccctcccccgcgccttcttcgccagaaaaatctcccgcggtctgggtttcgcctcctcccctctgaactagcgctttcccacgccttcctaaccccaatgggaggggggatacccaccccaactcctctccttccccgtagtaaggggggcgggggagcaacatcgacagcactatctgtccctgctccgctcagccctttaagttcagctaagtcccatctaaaccttttctgtagtcctcaccccaccctacatctccgggagcttggggtccaacctcagcaccgcctactgagcccaggtgggaaggactctcctcctgggcctagggttggtcggtgcagcctaggaaggcccctcccccagaacctgggagctgggggccagggcgctgccggaatcttgtgcttcagggcctcagggacagttgggagagagtgcgtggggagctggggctaaatctctaagggagttggggcgatggggaaggcaagagaagtccagtcttctctgttcagatgcaaaggaagccccccgactccctaggaaataggggctttctctaacttccaggaccaccatagagaatcccattgggaagtttggaaacaagtctgtgtgaatctgaggagccacctgtcgacttaaaggggagaagggggccgggtggagtgtgctcgcctgtaatcccagtactttgggaggccaaggtgggcagatcacttgaggtcaggagttcgaaaccagcttgggcaacatggcaaaaccttgtctctacaaaatatacaaaaattagccagtcgtggtggcgtgtgcctgtaatcccagctactatcgcttgaacctggcaggctggaacctggcaggcgtaggttgcagcgagctgagatcacaacactgcattctggcctgggtgacagagcaagactgtctcaaaacaaaacaaaacaaacaaacaaacaaaagtgggggaagaaggggaggggtgttttccttgtgatgtgttatgggagaatctagccttcccagattgtagagggggtgaagacttttgctttaacctggtgggggggtctagttggaatggttacccggctaagagccatctccctgctagacagatcctgttaacagtatgatccattcagccagtgaggggaaggcaggtctttaataattatcccacctccattagagaattccccctccacccccagtccagctgcgcccctagctatgctctttcatttcccactcctcacttccagaattaggggactggctgccaagatctgcttcagactcttctaagtcatgtttggagggggtgctggggggaggagagggtgttcagcagtggtgtttggggttggatgccaggagtatctggtgggggagagggaaggatgtagagggatgcaaacgaatccccttctctctcttcctcctcccagccctagccatctggctacagagtggagccaggcactgtggcagctgaccccagagtcagggaggtgctgcaggaacacagggagggtgagaaagggggtgcaggtgctaatttgtccctccccattctcttcatgactagtccactggcctggcttgagggaggttcagcctattccctggagactctccttacaagttgctgataaaatgaccatttgccccttcccctttctagtagcttcctgaagggaaatgggtggggaaaagagaggtgggtgggtgatcagccacatctgatgggattgaggagtgtttcgggacatttggggtcagtctgccctctctcgtctggatggggggagaagcacagctgcagcatggggtgacttctagcaagaagtaaacatccagctgttgggcacactgtcaccccaacctcatccttcctcagagcaaggaagatcctgattagatgagatgaggtggggtctcattcaggaatgaggatgattgtagtctttctgcaccagatgggaagaatggatcctacctcattttcttttctaatcccaagtggtcctctcctatccaacacccctcttcctaaccgctcctggctggaatagtcctaaaggttgccctggagactaggcctggggctcggaaggggtgggggcggtcagtggggcacaggagtaaccggctcttccggagcagagtggagccagtggtgggtgtgtgtgggtgtggggaggggcgtggctacacccgtctgacgggcgcaggctcctcccctgcctgcccagtccccgactggccccctttaagattgggagcaggaggtaggaagattctccctcatctgctctggaaaagggcagggaagacaaaaggataccagcttccttacccacacccccatcccgccgcccttgaggcctcagttttatgcctttcttcacctgccttaattttttatttggggatagagaggcatttcttagcagaagtttgccagagccctcctttctccagaaggaaggaaacctctaccctgagtgtga

SEQ ID NO: 95234 - DNA, 34969 bp, Homo sapiens
  misc_feature (1)...(34969): n = A,T,C or G
aaagcaagaggatattatcaaagtggctggtcacagaggtctagctgggcagcaccaaaggccataaggtactgacagattcaatgaaatgggaaggtcaagaaccagagaacttgaggacaaaaagctgatcctgtgggtttaagatagtgaaataggtgactggtaaggaggctaaagtgatggggagcagctgaagaaaaagcggtgtcctagatgagatccaggttgtagtgattctgatgtgcaactggtttgaaaatacaaaggaaagtcgaccgtctcatgctgaggaactatgaaatcagaatattccaatggtgctggagacactgaaaatgatagcaagaaaaaaaggagagaaaaaaatatgatgcaataggtctgggtccctgtgggcagtaaatgatgacactaaagttttacagaaactgctataattgcatggcaataccttccatgaggattagagtgacagtggtagatcaatgatctggacatagtaaaggaaaacaaaaaagcagtttattcctttttctcttccacatagtcacggaaaacagaaaacagcttttagtgacaaggtaaggtaagatgtgatacctggattttcacggagtcagggtaaagaaaatgattaagagtaaagagaagtatactggataagtagtattttcaaaacacacattaaaagttggtaattcatgaaggagctactgggtagagaacagaaggaaagaggtagtaccactttaaattgtgaggttggggagaagtagcagcaacctgggttgtcatcagataccataaaataggtgggctgaggtgtaaggaacatggaaagcagcagagcaagaagcaaaatggcacattttaaaacaccgtgtgtaccaaggcacaggcacactgttgcttctacagactacagactacacatatgagggctacaaaaacagaaacactttgcacttgcacagtattttataaattgcttttacatatattatttgatcatcattgagtagctattactactatgcatattttcctaaagatgaggccattaggaagggacaaaaccatgataaaagctgtgattctccgtttccaacacatacaccttacatacacagcagacacttcagcatctcggccagccaggctgcaaattcttctctagccagaaggaatagtgggttttattcacttgtcaaagggcttcggagaaaagccactagatactttcctgtttgccttttcccaccttagacccctcaatttctatcaccatcacgggagaaggtagcgaagggtggctccatcagggagaaaactcaagctgaaagttgtattarggtcctcttcccttcacacctctaaacctcagtgacccaacaaatgaagatacgggagaggaaaaggtactatgtagaaacgaggaggtcttcagcaaataaagcttcgagaaaaataatgaaaacgggactggggtagggcagaaaccaagtatagctgagatgggggaggggaaaagaaggagggcaggaactggagggaaatgagagtgtagaagcccccaagcctgaagaacctaaaagagatatgagtggtccaactgctggagaaaagctaagggcccgtgagggtcctgaagcagggaccagcactgaaggaccccagggtttgggtgaccggaagcagagaccccaaacacgagaccagaagggggcgcaggagacaccccgtaggagagaatgaatggggaaggcggtcckgggggcggggcaaaggaggggccccgggatgggcggggcacagacccctttccaagtccgaacccctgccccgagagcccggagagaagcggctccgcgcctcccgcactcaccgccggtctcgtcagtaacatagggagtcgccatcttgaaaacgcaaaccacttccggcgtgagcgggctggggtcccgcccccctccccaccggaagtggagtcccgatcgtagcaagccaccatcttagtcttaaagggagagtgcaccatttcatgggcggaggtggaggaggaggaagagtggagaagctgaaatagttaataaaataaagccgtgggctttttactgccaccgataccattactgagcgcttgctgcctgtaaaacagtcctcagggagccaagagaagttccgaggcacagtccctctcatccccaggaactcctcgtacgtccaggacctgcgagggaaaagggcgcaaggcccacctgcacccaaaaagggggccttataaatgaagaaaggaagaatatccaggctctggcctgcacccagatctcagagcggcttggtgacgtggagcagacaaactccaggaacgcactggggcgcacaagtgtttctagggacggttggagaccctatctaaccctaagaaggtggggaggtcgaattcgtgtgccgattgctgtcggccaacccactcaaccaccagagacccgcgggaggggcgtgcaaggcggagggcgccgcgggtcggtcacctgtctccgtagccgcagggctgccggcagcttccatggccgaagaggcagcggaccaggttgggcgggcggccctggcctggctctgccccgctgggcggcgccggggattcggcggcgaagtgatgagggccctagttgcttctcgcccagacctcctaaccctgagtgcctcctcgggctgggccctagggtcagagggcagggtgaaagcttctgggcggacctacttagtattctaattaaactcgtccaaccgctgaggatctaaagcggggcaactcgccaataatccggtcccgtagtgtcactccatttgtagtcctgccctgcgccgtacctccctattctgcagacgaacccatatggtctccctccgccgcccatttcagcaactgttgttccttcagggctaagtcctgttaaacttgtttcccctacagcctgagaggagcccggctgcaggttcctctcctcaggtgtcaactctgccctcctccaccctcatatagctttttccttatcaacccttttaccttcctgcttatatccccactttggcttagtttaatgtccagcagtacccctggaaccagggaggaggcaggaggtaagtattggtgactacctccaacactaggcagcatgtcccatttaaaaaacaaaacaaaacccaggcgcggttgctcacgcctgtaatcccagcactttgggaggccaaggcgggtggatcacgaggtccggagttcaagaccaacctggccaagatggcgaaaccccgtctctactaaaaatacaaaaaaattagccgggcgtggtggcgggtgcctgtaatctcagctactcgggaggctgaggcagagaatttcttgaatctgggaggcggaggttgcagtgagccaagatcgctccactgcactccagcttggacgacagagtgggaccccgtctcaaaaaaaaaaaaaaaaaaaaaaaaaaaaaactaaaaaactgagcaatggctgactaggacctttataagacaaattaggcctcagaagttttctgggggccgcagcttgccttccttcccatcctccatgtctgtgacttccactagaggccaattcagaatgtctgggggtggggctcatttaaaaagtatttccaggccgggtgcggtgtctcatgcctgtaatcccagcactttgggaggcccaggtgggcagatcacttgaggtcaggagttcgagaccagccatggccaacatggtgaaatcccatctctactaaaaatacaaaaattagccgggtgtggtggcgagtgcctgtaatcccagctactcgggaggctgaggaatgaacctgggaggtggaggttgcagtgagccaagatcgtgccactgcactccagcttgtattatagagcaagactcagtctcaaaataaataaataaaaagtatttgcatacgatacactgttattgcaagtgttgtgacactgtggtcttaaacccttgctctcttttcaccgattgtacttcagccctgcagggtctaacatcttgtccttaaccttgttatgattagacgtgagagtgtgggatgaagcctctaagaactaatgggatacgttggtcttgactgaactacctcaggagtggtctctgcagctttcagaggctgctcaatagacctttgtgcaggagggaaacctaaagtcgcccctgttcactaccaaccctaggcccccttcccacccccagacatcctgcctcagcactagggttgacaggaagtgaaactcaattgtctgcttagtagacctgcctgggacccaacccggggccccggatgtggccccccaccctgaggaggaacagggcaaaaaaggccggggagaacaggctgttgttttttcctttccctttgttcattgcggtttctttctttctgatttttatgatgtggttgattaaagaaatgagcacctggaaccgtaggcattaaacgcctccttcttagatgtttcttggcttttcttcccccacccacaccccccagtaactgacttggggtatgatggagcacagatcctaaagaagacacaaagaagtctagagtaagactgattccaccttattccttattcgagagataacattacaccccactttgaagtaccaaaaactatcttaaaaggagtgtcttcaactttatttagggacatatctaaagacgatagagtgagaaacacaggtaatacatagggtggcattactttgagcattctttgcaaggaaagctgagtgccttagagattaatatcgttccaagatttctaaatgaaagatccagggacagaaaactgataggcagaggtgttaggggacctattcttacattgtatgtttgtttaaagtagctcagagcagagaggctttacacacattgcaccactcattgatatagtccctaaactggactatgtttttgcttgtattgcagaactaagtacaggacttagtgtataaaaggccttcagaagagtttgtttactatgactaaggaggtcatagaggaaggagagatgaagctttgctaacagtgaagaaaatactgtaaagacaggatggggagtgtcaagggccttgtttttttttttttttttttttttttttagacagagttttgctcgtgtcacccaggctggagtgcagtggcatgatctcggctcactgcaacctctgcctcccaggttcaagcgattctcctgcctcagcctcgcgagtaactgggactacaggcatgtgccaccacgcccggctaattttttgtatttttagtagagacaggttttcaccgtgttagccaggatggtctcaatctcctgatctcgtgatccgcctgcctcagcctgccaaagtgctgggattacaggtgtgagccaccgcgcccggcctttggcccttgtctttttatgattgggggtgagagggtgagacttggaggggcacaggagcagagagacagacccctcttcaacctatgcccgaaatctccagtttggatacaacaatactcccaaaccctattactcagcagctatatttctggcaaatgtggaggagtctgttccaacaagcctgtcttgaaacaatcaagaactgcttagatatccctgtttccactagagggcctcatgtattcattccctttccaacccccaccaaaagtatgtatatattatgtgtgtgtatgtatgcatacacaatacccacacatgcatatacccttctagtcagaggtctcccctcccccttcttcccacccccaggtgtaagaaggacgattccaggaacctaaggctttgttactctgccccattttcaatgaagggtaggagggagttagacaggggttggggcggggccagtgagcaggatgcctgggtctccagttcctgccagtgagtccctaggcctccatctctctcccttgctgtaccaccttcaccascatccatgcgaccccaagagccttaatgactctagaagagactccaggcaggggaagctgaaaggacctttcactccctacttttggccagggccttctgtgccacctgccaagaccagcaggtaaagtgggaggatgagggcgtggagaaagggtggacatagaccaaagtgcaaaactccaccctagaattaaggagagracrtgagtcttgacaggaggtgtccttagactggggaaaataggtctaaaaggaaagaggaacgtgaagaaggtggggagattgtctcaagcagggtagagcccggggcgggagggaggtgtttggtcaggttgtggagtttgggactctgggcttgcccccgtgggatctcctgagtgtgaagtcagtggtggatggaagggagttggtyagggaagttcaggatggcagcaatcaggagagaatgagacgttggttgggtgcccaactgccgagctgttctgttagcggcccgcccggtatcttggtctcccaggtttgggatgaagggagaggctgtgagtgattagaaagaagggaaaatagaagcagagctgccgccggcgcgggaagaagatgaggagcgcagcaaatggagaaaatgtgtccaaagccccggacatattcgagggagggtggagcaggttatggtgaactggaaacctagaaacgggcctctccaacttcgaagttcccagagtcgggggcgccgggcgcgggcgcggcgggcaggctggggtggggggcgggcagctatgtcgtcaggaacggggcggccccgctgcggccgcgtctgcctggcccgtcccctccagcccagctcgggctccagctccagcgccggcgcttcagctgcgaccgcgagccctctcaagcaaggtagagaccccgcgagccccccagcgccccaccctcccccatcggaaaaggacaggggtagggaagccgaggacccacgggctgcgttcgtgctgctgggtcgggaaggaggaagcgtgacagctggagcgggtatcgagaagggtctgcgctgggacrcgggggtgcagcgggagggctgggccmgaacccggtgggtaacgtttcccagaccttcccctccatccctcccgctcattcggagggatggtgaagcccggttcctgggacccgactcggagggaagtcctctwcggaacctccacagtgccgcacgggtggagaagggttcttgtttggcctccaggtccccaacttcccaccccatcctctccccacctgtcactgggaagtttctgaaaatacctgagtctgaatctcacttttcaccttgataggagaaatgagccttcctgaggaagaatggcaaatattactgggcatctcttcagcctcagcacagacaagcccacatcccccaaccatgccagtatcgtaacttcctcctatactacgcaatgacaccctctacacacacacacacacgcacrcacacacacacacacacacacacacaaccccctcagccaggtgtagcactgcagtcttcagtgtttgtggaggcttaataagttttgaggcttcaagcaaatgattccctcttgagggctacctactagcagcaacggtcagggagaggaggaggatacagtctatgatgtgattaaggaattcagaagtccaggtaatcaggcctgggccctcaaattcggggctcctgcccctctggggcagcctcaatattctggagacatagctatttcctgagtaatggtcgacttaaaggacttggaatgtgagcaatgaacgcttaagtgaaaaaaggaaactttaaatactaacacaggctttggaaacaatatttatctcttggttaaaattttagtatttgatgtttaaaattagatccagagagccatgagctctaagatttagtggaatgtactaaggatgggtgtctagagtctgactgtgcccttaagagagtaattctctctctatgcctcaatttcctcctctgtaaaatacgagggttggtgactcccagctctgtggatgttctaagattctctgcctccaagtcaacttcttcctttctcgccccaattgggtaggggcgggcagggaaaccagaggagggaagggaagggtgagtcacaaatagctggcaggctggcagcagaccccaccctcccagccctggccttcgcctagactagcccaggttatagcctcagggttgggatggacctggaggaaaaaaaatggacttgttctaggtcttcaagtccccaggatcccacagtttgctgcccttcagctccagggatagctaaactttcagtcagagaagtcaagaaaaccactgaaaagatcccaggagcactcgtttccaagattccagcccaggggtgtccttgaaccctgagagtctagctctagccacctcgtcatcctcccagaggcaaagttcagaatcctgatactacatgtttgcacctgacagatatattaataacaaggggtaagacgtacaactgggcttcactgatgctagcagtccctgaaatttatgccttcctggttcaaagacatcatttttcctaatctccagaaatgtttctctaggtactacccttgtgtaataatgataatagctgatgttcattgagttcttattctgtgccatgctgtttgctaagtacattgcatatatcatcttatttaatgcccacattgcgactgatttctgtaggtgcccactttactgatgagaaaactgaggctcagggagatgaaatgaccttttaaagagctaggattctgatccttgcctgtccaatttgcaagtccattctcttaacttctactgtatactacttctccaggtttaagacctggggagctaggaaggagcaagaaagagttagatcattgtaaaaagagaggcagagaagaagcctgtcctctctcctttgcattgtaacttgtttgctccctccttgtcactttctccctcagattccatttcctagaactttggagtcatcttagaatccccaggggtaatcagagaggctaattaagctatagaggccccattagccataagactattagtattcattaggtctgttggcagcagaagttggactatggtcattgaaaagtgccagatgggtagagtcctttctctaggatgtcagtatcccagaaccctcttctgagtgttcccagagagctgctggaataggaatggtgtgctgcataaaagtaggcagcagagatgtcccaagggaagaggctgcagagaaagttcttgcatcatcagaaaggaaaagggctaggctgttcttgaacacccaaactgcttcccttacccaacaagccctaaatgagtgggtggagatcagggtgtttgatggggtagtcaataagtgcttttcagcatcattcatttatttaacaaatatttatttagcacctactctatgtactacaaattatctcctttcctctgactgtcaggtggacactctggcatcctattcccatgtaaccatatttggattaatagccccaaattatgaatccccagctttacacaatcatgtgtacaaccaatattcagcacccactacatactgggaagggtatcccaggcagacagaacagtaagactcattgctytgagcaggggagagcttggcatgcctgaggaacagaaaggagcacagtgagaccagatggcggggtgtgaggagagagtggaacaagaggagggcagagggacaaacagaggcactaccacatggccttgggctggagccttggattttccatctatcaactgccttaggaaatccaagcttctctgagctccagtttcttcatctgtagaatggttatgccaataatttcctatgtctgatgatttgattctaattgttagtacaataataactagcatttcttgtaggcctcctaaatgtcaggcattgtatgagtgacttttcatatattgttttacgtaagccacacaactgtgaaaaatggttctcattctccccattttgcagatataacttccccaagtcacacagtggtatcagagctaagaatgggacccagatatgactgatctagttctgttccaaaaccgtgctgtattatattaacgtaagatatgttattatcattactgaatcaaggaaagtcgcccactgcaccttggtccctggatccagtagccaaaacctggggctccctaagcactgctgacctagcggagtggaaggaagttcccaggagccgagacactagcactcggctccatcgtcccaggactgggaaacactagatctgttggcagcagaagttggattatagtcattgaaaagtgccagatgggtagagtcctttctctaggatgtcagtatcccagaaccctcttctgaggaagagactctgtgggtacccagagtctcttcccctgcctcttccctaccccgcgcctagttccccacccttccctagtggagctccgcggaacgcagtccaggcggggccggggctagggaccttgccagagctggttctgtgtcgcgcgtcagaagcgctagaggtcgttgcgtggcgtgggtggctcggggagtgggtggctgagcggagctggggtccctggccagaggcggaacaaaatggggtcatggccaggaagacgcgctaackcagtaagagtcactcagagggccggaactgccggaactgccgaagacccgagatgggagagagctcaggatggggagagtctgcagagattgacgatggtggaagaaagcgcagaaacagacaagggacacacccacagaaacatatatagactgagaaagccgggtgcgggtgggaaggtgagggtggtcagatgaatcaagataggttgggggagagggagaaggatccagaaatggagagacagagatgagtcagagaaacagagacagaggacagacactgtcagggaaggtagaggcatagggaagagggacacagggaaaggaagatgtttagggagggactaggagagaaggaaagaacaaaaaataatagtgggagtagagacagaatggaacagacagaagaaaagacacccagacagctggctcttcccactgtacgctctgtcacctttccccaggcctaccctctgaagaggtccaagcaacggaagtactactacgaagctgcctttctggccatccttgagaaaaatagacagatggccaaggagaggggcctaataagccccagtgattttgcccagctgcaaaaatacatggaatgtgagtcttcctgtcaggccttcagttctggagaccctgccccagagaatccctcctcctcctcattacaccccctgccccccagcttcctcagtggctttgagcagtgtgctgctcagatgtgcccatgactggaaatgggaggagtgggagatggggagatgtcagaaaaagatccggatctaccacagtctaactgggctgcattgtgcaaggtctcrgctctctacccaccttcgctatacctggactgcttgctccagctctcagagaagaggagtaaagagtggtactgttttggaggatctgaaatatttttccctctgtatttctgtgtttcttcttggaatttcttcatctcatttgaatcttttttcctgctggatttctctggcaagagaactcagctggactaataatgctgttctcttactctctctacaccctagactccaccaaaaaggtcagtgatgtcctaaagctcttcgaggatggcgagatggctaaatatgtccaaggagatgtgagtggcagctgggaaatcttcttcttgaycaactcttcccatctttgtttttgatccccaacttccaggaattattctgggcctgcccctcactatcccctctagagataccctagtgtccattgtcamtctgactattgctttaggataaaacaagggattctattaactcaggacttaatcaaagaaaccatactcctgcctcagatgcttctcagctctgcatttattatccctgtccccgctactcccaattcttcagccccagctctgaccttgcagactccccaggataatgctcactctcattataggccattgggtacgagggattccagcaattcctgaaaatctatctcgaagtggataatgttcccagacacctaagcctggcactgtttcaatcctttgagactggtcactgcttaaatgagacaaatgtgacaaaaggtatggtcaagcaggtaggactgggctaagcctctggcagaaaaatcaaactagtatggatttggggttgagaattaacttgagtcacacgttgtgcaggttgggggaaattggtggagaatagtcaggctggtctaggagctaaagggaggaaaggtaaaggggaaaggtaagtcgagggcagtggctcacacctgtagtyccagcactttgggaagctgaggtgggaggattgcttgaggccaggagttcaaggtgcagtgagcagtaatcatgccactgcactccagcctcagtgacagagcaagaccctgtctctcaaaaaaatcagtaaatcttttttttaaaaaaagggagaggtgggacaaacaaaggataaaacatgagccaaagtggagggagccctgacttctgatctgcttttttgtaaccagatgtggtgtgtctcartgatgtttcctgctacttttcccttctggagggtggtcggccagaagacaagttagaatgtgagttgcccttctgaagtgaggtggcagggcagtgaagggagagagaggtgtttcccatcctcctttcccttattccttcaggattcctaaaggctgacaggtctagacaaaggtggggccagagaatgagcccatttcctgtgttctcccagactatttatacctaatacccttcaccatagtcaccccagtacccatgtcttgtgcattcccatgtaggcggcctaggatgtccttgggatatggattatgtattgtctcccctgacacattcactgagggtagagtccatgcctgttttcctttcctttttgtctctctctcagtcccatcccaggctctaggcttctcacccaaaagctctctccctgtctctttgtttcccccatattctggtatgaattctttgggtatctctcacaaactgaccctggcccccctaaaacaccccacagtcaccttcaagctgtacgacacggacagaaatgggatcctggacagctcagtgagttggggaccctgtatgctgggcaagggaatatgtgttaatttgtctgcaccctcctgccccaactcttccagggtcttaagaaacagaagaggatggggggagaggttgagtcctctaggactaaatttgaaagtaagtcccaagctcttgacccctcaaagagaatgctggatacatgaattgggtctgccttacaaacatacaaacacatttatttacttggcagacatacctgagaatgagaggtgtgaatctggggtggaacccaggaacactgatttctggaaaagagtttggatggtggtagtaaaggggatatggctgtggctcttgccctttttgctccaggaagtggacaaaattatcctacagatgatgcgagtggctgaatacctggattgggatgtgtctgagctgaggccggtaaggcagctcttccttcatgtcccttcttgtaccttcytccctggtgagtcctgcatctgccttacttcatctctgacaggcaacctggttcccttggctaggatggctgggctggatatcctaagaggcagtggagaggtgttgggtctgaagacccactcatactgaaagtccctttccactctgtgctcagattcttcaggagatgatgaaagagattgactatgatggcagtggctctgtctctcaagctgagtgggtccgggctggggccaccaccgtgccactgctagtgctgctgggtctggagatggtgagtaggagagactttgggggatgagtaagacagccttgggttatgcttgcccggattggccctgtaagggctttgacactccctagcatctactgtgccttcctagactctgaaggaygacggacagcacatgtggaggcccaagaggttccccagaccagtctactgcaatctgtgcgagtcaagcattggtcttggcaaacagggactgagctgtaaccgtgagtaatgggagctgggaggtaggggaagagggtcagcccagctatctgtgggagcttgatgctgtaaacttagaaaagacctaggtttgaatcctgggctctgccactgactagttatgtgaccttgggaaagccacatcacttctttaagccttagtttcctcaactgaaaatgaggtaattgtgagcattaaaaaagttggtgcaagaaaagtgcttcagatggtgcatgcacatactataaaatgcaataaaaaatatctattatgattactgttgctgttagacctgggcctcccaagcattatccagctcagttcctgcctggcacatggatggtgtggggcaggcatgcagtagcagctgatcttttaggaggaagagtaaggaaaaggcgtgggttttggaggtgggcacttcaccccgaacttttattctgctacaccctcaagcaagggatcacatatctgatcctgcctcaccctcaggtaagaaggaaatagggggagaggctcagctaagcctcccaacttcttccttctccctcagtctgtaagtacactgttcacgaccagtgtgccatgaaagccctgccttgtgaagtcagcacctatgccaagtctcggaaggacattggtgtgagtgatctcatgcctccacccccaacatcacctacatcctggccctggccctggcccttggcccattgctgccctcagcccctccctcccctaggtcctgctcagaccctgccagacaaggaactgcctttctccccaaggtccaatcacatgtgtgggtgcgaggaggctgtgagtccgggcgctgcgaccgctgtcagaaaaagatccggatctaccacagtctgaccgggctgcattgtgtatggtgccacctagaggtcagtttgggagccatcccttctgggtgcgtcttacccckcagagctgccttctccacgggcctccggccacacctcctttacaggcacagttgcccctgctcccaagggctctttccagcccagactgccaggttgagaggagacagggttaccttcgtgatctctctgtgcccacctcgtctttcagatccacgatgactgcctgcaagcggtgggccatgagtgtgactgtgggctgctccgggatcacatcctgcctccatcttccatctatcccagtgtcctggtgagaccctcggcagcagcggggaggggacaggagtgcctccccgatttcccacacgcacagagtggcatttagaatagagagctcatacttttaggattcaagtcagacmcctctatttagggattcatgcacaatacagcttttcttccctctactttcttcccctcccaggcctctggaccggatcgtaaaaatagcaaaacaagccagaagaccatggatgatttaaatttgagcacctctgaggctctgcgggtacagggctgagagtcttgggcttcatgatgggggcaggtttttcactggagccctcatgggtgggaatgaagtgggagagcctggtggggagcggttgatgctcactctccagaaactccaccatggtaggggagggaaggggagggaaacaggagggaggggggaaatatcttggtggaatgctagccctctgcccctgtctcctgggcccaccttaactctgacaaaatcctgctttctttgtccttattttcttcccccaatgcagattgaccctgttcctaacacccacccacttctcgtctttgtcaatcctaagagtggcgggaagcaggggcaraggtgaggagaaatatattgggtcttctaagatgagaggcagrgcctgcctgcaacacttagaaggtggaaggggatgtgtgtgtctggaggggcataccttgaggaacacacraagagggtgaggttcagaagatcacccccaacccccgcgcctgccatgaacttttctttttcccacacacagggtgctctggaagttccartatatattaaaccctcgacaggtgttcaacctcctaaaggatggtcctgagatagggtgagcacaggttagggactgtatcacagtgttttcrtgggtctgtgtatctgtatatgttaggagagtgcaggaaagagtgcagattgggagaggagggctagagatccccaagaggccagaattcagaatatttccttccctagggtcactgggtatcccatcctccgagctctctggcccatctttgtcctgctctcaaagaatgaagatccaatttttccctaaccactgaggagtggctataactttccccattgttcttttctgtgaccttcatagaaactcaagtcttttgacaaaaaggaggagggtcctacggaatgagagacaagaagcaatctgcctgctcaggacttgggtagcctcagtcctgttatccttcttcatattctctctcccctttgtctcaggctccgattattcaaggatgttcctgatagccggattttggtgtgtggtggagacggcacagtaggctggattctagagaccattggtcagtgcagggaggrgcgtggggaaggtattggggtcgtagtcttgcagagctaactcactccatccttctcttcacctgcctccgcagacaaagctaacttgccagttttgcctcctgttgctgtgttgcccctgggtactggaaatgatctggctcgatgcctaagatggggaggaggtaagtggttagaaattgttttgctgtaggctgagaggagttgtgtaggaagggaaaggcacttagagaagaaactaggcatctggtatggaaaggattggggaagaagaggggcacagacaggtggatacaaaagtggaatgtccaaaaagaagagagctttggaagaagcagggaccacaatctgaacctagaagggtcaagggtgatagtcccctttcctgtaaatatttttatgtttctcccaaccaactcttatggctcagagaatcaaggaatatgggggtggggaacaatgtgtgaataaggaaggttgtataagagctaagccagatgctgaatgatggagctagcaggtcatgactcattcactcattcaaacaattaaccaggtagtcattaattaattcactatgatttctttcagagtattgcaatagtctcctaactgctctcccatttctaatctcttatgcctttcaaacagaaggagtttgagggatggtattggtagataaagaggtcagtgtagggcagattgtgtttgaggaatcttggagttgaggttattgggttcagggtccagctctaagatcttgctggagatcttagggaatagagatctgctaagggcagcggaaggcattctaggtggaggaagtagtgtaaggccagaggagccaccaaacaacatggtggtgcattgggggaactgtaagtcattcatcatgattgggacatagggtgaaaggtggaaaatgtggagagggaagactagttgagcagagtccagatgatggagggttatgaatactgtgccagggagtttttaattttatcctgtcagagattgcaagctgacagcccacagtaatgattttgtgttgttttgtattagttgccttgcagtgttttcaatttctttgtacttgattatttctaagtgggacatgtattcttcagtttatcacaatccccttggctccctgctagtcacttattcactttccctttcttttttttttttcttgagatggaatctcgctctgttgcccatgctggagtgcagtggtgccatctcagctcactgcaacctctgcctcccaggttcaagtgattctcctgtctcagcctcctgaatagctggaaatacaggtgtgtgccatcacgccctgctaatttttgtatttttagtagagacgaggtttcaccatgttagccaggatggtcttgaactcctgacctcaagtgatctgcccacctaggcttcccaaaatgttgggattacaggtgtaagccaccatgcccaacccactttaccattcaagccactcaggtatttgagtgtgcaatccctgaactatgagcaaactctttttttttcttttctcttttttttttaactcaatcaaacaagcagcagtgagggggaactcgatgtaagtaaaagatgtaactaaaagaacaaataggaagaaatatctctgagtgctcattataacttgttttatatatagacatataaccaattctttgaccagttttcagatcctcaacatctgacttcttcatttataatattagatattttgaaattacatattttatgtcttccctgtattctgcaaacaaaaatcaagttagcataaacaagcaaacaagttagcagaaaacattgcagttttctgctaactcaacctgaatcatgacaataaggatataaatgtagcactaatgaaaatgtatgttgggctgggcacggtggctgattcctgtaatcccaacactttgggaggccaaggtcagaagatcgctttaagccaggagctggagaccagcctggacaacaaagtgagaccaagtctctacaaaatattttttaaaaaattagctgggcatggtggcacgcacctgtagtcccaacaactcaggaggtggaggctggaggattccttgagcccaggagtttcaggctgcaatgagctatgattgggccactgcactcaatcctggctgacacagtgagatctcatctctaaaaataaataaacacacaaataaatagccaggcatggtggcacatgcctatagtcccagctgaggctgaggcgggaggattgcttcagctgaaaagatcgaggctgtagtgagccatgattgcaccactgcactccagcctgggcaacagtgtgagactttaaattaaaaaataaaaaggaaaacatgttgacactgaaaaaatcataaggttcgaagaggggggattgaagggattatcactatgggagctctgtggaagatggattgtaggaaggagacagaataggaaattacctgtttgcagtagtccagacaagagatgatgaatacagaagccaaggcagcagcagtggagttaatgaggtagaagccacagctctggataactgataggttgtggagaaggaggtagagaaaagtctaggacatttcctaggtttgtggattcagcagatggaggtggcatttatttattcatttattcatttatttatttttatttatttatctttttgagacagagtctcattctgttgcctagactggagtgcagtggcacaatctcagctcactgcaacttctacctcgcaggttccggcgattctcctgccttaccctcccgagtagctgggattgcaggtgtccaccaccacatccagctaatttttgtattttaagtggagacgagatttcaccatgctggccaggctggtctcgagctcctgacctcaggtgatccgcccacctctgcctcccaaagtgctgggattatatgcgtgagccaccgtgcccaaccttggggtggcatttattaagacagggaatataggaggaagaccagtttaaggaagaaaaattcagtttggggcaggtggagatgttgtggtgggtggttagaaatacatgtcaggaatttaggagagaagtcaaatattttaggagatacatgtttgagagtcatctgctcctaggtggtaattgacattctgaaagtagctgagattacccagagaaagaggtaagagaaggtgaacaaagacagcaagatcctggtaaacaccctatttaacagttgagcagaggaagaggagttattaaagggtctgcattagcgtcccattgctgctgtcgccaattaccacaaacagtggcttaaagcaacacaaatttattgtcttacagttctggatgagagaagtccaaaatgggtctcactaggctaaaatcaaggtgttggcagggctgagttcttttctagaggctctagggaataatcctttgctttttctagtttctacaggctgtctgcattctttggctcaaggtcccccttccaaccagtggtcttatcactccaacccctgcttccacagtcacatctccttttacaactcttttctcctgccttcctctttcacttataaggacccctgtgattacattggtaccacccagatratccagtatgatcccccatctcaaaatcctcattttttttttttttaagacagagtctccctctgttgcccaggctggagtgcagtggcacaatctcggctcattgcaacctctgcctccctggcccaagcaattctcatgtctcarcctcccaggtagctgggcttacaagcctatgccaacacacyggctaatttttgtatttttagtagagacaggtttcaccgtgctgcccatgctggtctcgaactcctgacctcaagtgaaccacctgcctcagcctcccaaagtgctgagattacaggcgtgagctaccatgcctggcccagaatcctcaatttaaatgtatctgcaaagtctctttttccatgtaaggtaacattcacagtttctttttttctttcttcttcttttttttttgtttttgagagggagttttgctcttgttgcccaggctggagtgcaatggcacggtctgggctcaataccacctctgcctcccaggttctagcgattctcctgcctcagcctccctagtagctgggattacaggcatgtgctacaacacctggctaattttgttttgttgttgttgttgttgttgttgtttttggagatggagtctcactccatcgcacaggctggagtgcagtggcgcgatctcagctcactgcaacctctgcctcccaggttcaagtgattctccggcctcagcctcctgagtagctgagattacaggcgtgcgccatcacaactggctaatttttgtatttttagtagagacagsgtttcgccatgttggccaggctggtctcaaactcctgacctcaggtgatccacccgcctcggcctcctaaagtgctgggattacaggcgtgagccacctcacccagcaatattcacagtttcttgagattaagatgtggacatctttgagaagctagtattctgcctaccacaaagactaaaaaggaatagtcaaagagaaaggaaagtccctctgtaaccgagagagtgatatttcagaggttaagtgaagactttcaagagttaaaatgagaacgaaagatacactgttggcaggagtcattggcaatctttgccaaaaaagtttcagcagggtgggatgggcaaaaggtaaattacagtggattgaaccctcagtggagtgtgaggaagtggagactttttttctttttctttttcttttcttcctttctttcttttttttttttttttttgaggcagagttttgctcttgttgcccaggctggggtgcaatggcgcgatctcggctcattgcaacctccacctcccgggttcaagcgattctcctgcctcagcctcccgagtagctggaattacaggcatgtgccaccacgcccagctaattttgtatttttagtagagatggggtttctccgtgttggtcaggctggtctcgaactcctgacctcaggtgatccacctgccttggcctcccaaagtgctgagattacagatgtaagccactgcgcccagctgtggagacatttttaaaaccttttttcttccctgactacaattataatacatgctggtggtaaaaaataactcaaacatttcatatacatgtgccaagaaagtgaaagctccctataatctatgccctacagttttgggggctgttcctccatgttttacttcctagacacaaactaacatgtatttaaacaatgagatcattttatagatgtttttcttctttttctaacttaacagttcatattgattatcattatatttctatacagtcaggtttgcctcatccattttagcactgaatagtgttccgttgtgtgaatgtgtaatcatttataaacagttccctattggtggacattagggtagcattcagttttttaatcttacaaaccatggtgcagtgaacactcatacatctatctctgcgcacagatatgaacatttctctaggagagacttctagaagtagaattgcttactcggagaatatgaacatttttattttattttatttatttttttgagacggagttccactcytgttacccaggctggagtgctatagtacaatctcggctcactgcaacctccacctccgggttcaagcgattctcgtgcctcagcctcccaagtagctgggactaaaggcacgcgccaccacgcctggctaattttttgtattttcggtagagacgaggcttcaccatgttggccaggctgatctcgaacttttgacctcaggtgatcctcccacctcggcctcccaaagtgctgggattacaagtgtgagccaccatacccagccgaaaataactattaatagtaaaatgttcatgctggacatggtggctcatgcctgtaatccnnnnnnnnnnnnnnnnnnnnnnnnnnnnnnnnnnnnnnnntggctcatgcctgtaatcccagcactttgggtaggccaaggcgggtggatcatgaggtcaggacttcaagaccagcctggccaaaatggtgaaaccccgtctctactaaaaatacaaaaatcagctgggtgtggtggcaggcacctgtaatcccagctactcagtaggctgaggcaggagtaatcgcttgaacccaggaggcggaggttgcagtgagccgagatcatgccactgcacttcagcctggacgacagagctagactccatctcraaaaaaaaaaaaaaggtattttctttttaaaaaactattcaaatagctgaacatggtggctcacacctgtaatcccagcactttgggaggccaaggctggaggatcgcttgagcccaggagattgagaccatcctgggctacacagtgagacctcatctctatgaaaaataaaataattaaccaggcatggtggcacacgcttgtggttccagatactcaggaggctgaggtaggaggatagcttgagcctggcaggttgaggctgcagtgagccagtgcactccagcttgggcaagagagcaagatcctgtctcaaaaaaaaaaaaaattacacaaatgggctgggcgcagtggctcacgcctgtaatcccagcactttgggaggccaaggtgggtggatcacgaggtcaggagatcgagaccatcctggctaacatggtgaaaccctgtctctactaaaaatacaaaaaattagctgggcctggtggcacacgcctgtaatcccagctacttgggaggctgnnnnnnnnnnnnnnnnnnnnnnnnnnnnnnnnnnnnntgagctgagatcatgccactgcactctagtttgggcaacagagccggactccatctcaaaaaaaaaaaagaaaaacttacataaataagtcatcagtacgttgtcaccgtaaagatttaaagactccccacaaaactccatgtacctcctcagagataaacattgtttcctatttacagtcatttttctgtttttacatgcatgcacacacacacacacacatatgcataaacagacatttttttttttttgagacggagtctcactctgtcacccaggctggagtacaatggcacgatctcagctccctgcaacctctgcctcccggcctcaagcgattctccctgtctcagcctcctgaatagctgggattatgggcacccaccaccatgcccagctaatttttgtatttttagcagagacagggtttcaccatgttggccaggttgatctcgaactcctgaccttaggtgatctgcccacctcggcctcccaaagtgctgggattataggcatgagccatggcacccagcgaaaaatatgttttgataaaattggataasattttgataaaatttgccaaaatgctttccaaaaatgacttatcaagtcatgctgtagctaacagcaaatgagaatgccaatttattcataaactcattagcatttggttttctgaatctccttatactttgccaacctgatatgcaacaaaagttagctaattgttttaattatggttcttgaaattgttagtaatactgagcacctttcctatgcatattggccatttgtattttttcttctatcataggcttgtttgtattatttgcacatttttccttttttgttttttgtttctttctttgttttgagatagtcttgctctgctgctcatgctggagtacagtggtgagctcacagctcaccacagcctcgaactcctaggctcatgcaatcctcccacctcagggtagcctggactacagtcacatgccaccacacctggctaattttttttttttttgagacagagtttcactcttgttgcccaggctggagtgcagtggcgcaatctcagctcactgcaacctccgcctcatgggttcaagcgattctcctgcctcagcctcccaagtagctgggattgcaggtgtccgccaccacgccttgctgattttttgtatttttatagagatggggtttcaccatgttggccaggctggtctgaaactcctgacctggtgatctgccctcctcggcctcccaaaatgctgggattacaggcatcagccatcgcgcccggcctacacctggctaatttttattttattttattttattttattttttattttttgagacggagtcttgctctgtcacccaggctggagtgcagtggcgcaatctcggctcactgcaagctccacctcctgggttcacgccattctcctgcctcagcctcctgagtagctgggactataggtgcccaccaccacgcctggctaattttttgtatttttagtagagacagggtttcaccatgttagccaggatggtctcgatctcctgacctcgtgatccgcccgcctcggcctcccaaagtactgggattacaggtgtgagccactgatacctggccaatttttatatttgttgtagagatgaggttttgccatattgtccaggctggtctcaaactcctggtctcaagggatcacccgcctcagcctcccaaagtgctgggactacaggagtgagccactgtgcctggccttgtttgtttgttttttgagatggggtctcactatgttggccaggctggtctcgaactcctgggtttgagcaatcctcctgccatgtagctgggattatagaggctaccatgtccgtctagttttaaattttaatataattatatttatctatctttttcttttgggcttctagttttgtatccattcaaagattataaaaacatttactaatgttttcttctagtacaaattctggccaggcgcagtggcctgtaatcccagcactttgggatgtttggggtatggatggtcacatcatgcaggtagcgagcatagaacccagtaggtagtttttcatgctgctcctccctttccccagcaccatttattgaataatctgtcttttccccatttatttgaaatgacatcacatactaaatttctatatatacttgagtctatttgggggctctctattctttactattgaaccttttattgcattcactctgcctgtataacactgtttacacatggttgctttgtactgtggtctgtctgaatggggagtgaaagcatcaggggtcaagggtgagagaggattatccccatttgtcacccatctttttcagcattctcctggctattctctccaaccttccagatgactgttggcaccatctttgcatatccacacacattggaaacattcaccctccacacagcatggaggaaaggtccatgggagctgtgaccatgcaccctgccctgtcactggctagggctgggaggctctgtagaaacagggcagaaggcccctgggaatttgtggagctgggagctgagaagaggcctctctgggacccagagctcagtgctaacctgtcttctccactcctaggktatgaaggacagaatctggcaaagatcctcaaggatttagagatgagtaaagtggtacatatggatcgatggtctgtggaggtgatacctcaacaaactgaagaaaaaagtgacccagtcccctttcaaatcatcaataactacttctctattggcgtggtcagtggaatggggcctggggagaagggagaaaggggkggccaagcagtcagaggctggaggagagcagaaaaggagggggaggttaagtgwcctgtgacacagggaaattgggagtgcagtacagtgctgagttgcaagggaagatcttgggacatgctgtggggagcagcatgggkacttgggaaagaggggagaccgggagggagagattgagctctgtactgaccttcatgtcccraactctccaggatgcctctattgctcatcgattccacatcatgcgagagaaatatccggagaagttcaacagcaggttagggaaaggagggggcagtgtgggcatacacagtgtcaggagccaggttttgaccaagtttgactcagattgctcagaagaacagtggcacctctaggaggtccccccaaccaaagccacccttgttccccatgggactaaagttaggaggttgatgcccttccctgtcacgtaccacccctgccagcactgtgtaacctgtccctccctactgggccttgtgttggggctgacacagaatgaagaacaagctatggtacttcgaatttgccacatctgaatccatcttctcaacatgcaaaaagctggaggagtctttgacagttgaggtgtgtgtaataagacttaaccytacatccttttcagcttcttaatagccaagtttctccctccatggcacccttaggaacttcccatattcttgaacctatgcttctttaacctcccagctctcctaccccaattctccaagtcctcaagayacactagtccctatttccattccttgcacacctccaaatcctgccttctccagtttgtcatctggtggagggagcgatcacatctatgatcatgccatgaggtgaggatctgtaccctccctaactgggactgtgccccctcctctcagatctgtgggaaaccgctggatctgagcaacctgtccctagaaggcatcgcagtgctaaacatccctagcatgcatggtggctccaacctctggggtgataccaggagaccccatggggatatctatgggatcaaccaggccttaggtgctacagctaaagtcatcaccgaccctgatatcctgaaaacctgtgtaccaggtgagaggagcagccttgggagctgagtgggcaggacgaagggaaagtgtgactccctatggggataccctgtttatgtaaaactttactccctacttcgtccccagacctaagtgacaagagactggaagtggttgggctggagggtgcaattgagatgggccaaatytataccaagctcaagaatgctggacgtcggctggccaagtgctctgagatcaccttccagtaaggaagactccaccagggtccctgagggaaggtgtggggctggggcagcagaagggtcatgggaatggtggggaggggctttactagatctccctcaatgacaaaaggtctcaaagccaacctaagaagcagagttttggtattcgattggtaaggaaatcaccaatgttccttggcctcctatagcaccacaaaaacccttcccatgcaaattgacggagaaccctggatgcagacgccctgtacagtgagtattgacgatcccagccaaaaattaaacccttgggctccatggatcctaaatccccattccacagcttctttacacccttctgatgcctgaacttcccctgcacatcattcatcctaaaccctgatttctcagcccctggtttccctatcgtggcctctctaggaacctagcaacccaccccaaaccccacagatttccctctaaatctctgaagccacagccccaaagtatcaggtcctgcctctgaatgtgctcccttcccttccagatcaagatcacccacaagaaccagatgcccatgctcatgggcccacccccccgctccaccaatttctttggcttcttgagctaagggggacacccttggcctccaagccagccttgaacccacctccctgtccctggactctactcccgaggctctgtacattgctgccacatactcctgccagcttgggggagtgttccttcaccctcacagtatttattatcctgcaccacctcactgttccccatgcgcacacacatacacacaccccaaaacacatacattgaaagtgcctcatctgaataaaatgacttgtgtttcccctttgggatctgctaagtaagtggtacacttccttctttyawaccttcactccttaaatgacgtagattctcccaagaagcaacagaaaaaccagcatcaggctctgagtatttatttcagttaatagtagtctcccagggaagactgggggaaatataggtgtttctgtcaactccaggaaaatcacagcatcatatgagagtactcagacctgctgcccactgaggagggggctrttctcaccaatgggacaagagcagaagatgcggggtagacgcagccagtgactgctgctatgtggcaactggggtacggagaagtcttgcttcataagtctgcgcctgatattgggagaaggggtaaactggttagcaatggacaaaggtagcttgtctgtgcttctccaaagaagggaacacacccatatcccagtctgcttagccttgatcctagcttcctccccttctcctcacctccagggtttaccctctcttatttctgtggtaacctctgtccattcctccctcaccccgtaagctttcctgcctgaggaccatgccaccccaggcctgggggatctgcccttcttgcaggtagaaaactcagttcaccccaggccaggcacggtggctcatgcctgtaatcccagcactttgggaggccaaggtaggcagatcacgaggtcaggagtttgagaccagcctggccaacatggcgaaaccctgtctttactaaaaatacaaaaattagccaggtgtggtggcaggtgcctgaaatcccagctactcgggaagctgaagcaggagaatcgcttgaaactggaaggtggaggttgcagtgagctgagattatgccactatactccagcctgggcaaaaagggtgaaactccgtctcaaaaaaaaaaagaaaactcagtttacccaaactgcccccactcttcatattattaacaacagtcattaatatcaattattgcactcttgcttcagagccaggtgctttactcattgtttctaatctttacaacagccccacagggcaagtattagtttacctacttttcagaggcttagacaggttaagctacttcccccaggtcctacaagcaagactgcaacccaagtctgtctaacttaaaagcctgggctctttcctggacaccatgcttcctcaaagggagaggtggtttcttctccccttgaggaaaagtgagtagtgataataagggataagggggtctgagctgtgtgatgaggcccttacctatatatcagagatgcaaggaccacagccatcaacaccagcaagatgcccacgatcagyggaacctgcccaaggcctgcttcttgacctgtgagaagaatcccaggcactgcttcactcagtgtctgctgcttgccagctgccctctatccactcccttcctcatcttagctcttgtccaaggacctaccaggcatgataagctgggtgctgaccactgccaggctgttggtatcagccagagacacattgaggcagtatgtccccgagccacccttcagtatctggtgcagaaccagctggcaggctgggctgggtagcacaggctggcacagccgctgggcagggggctggcaccctggcgatgagatctccatgcaggcttccttgggcagcctggaagaagtgtcagcatatataaggggatctgggaagggacactaaatgccagagagcggagaaacagtcaaccaaagagttaccagcacactagtgagacactcacccgccttggcaggacacagtcagctcaaatgcatccccctcaccggacggcacagcctgcaggatctcggcactttcaataccctctgcagagttgcaagcttatcaaattaggattcctctacctggcctccccaaaagcccagagacagaaaagccccagggctgctccaccaatcccatccctgtgctttcaaatgaggactctggcatttgggtattcttcctatctaggtgagtaattcctcccaaggtgtgcttccactgaccagccctaggtagcacacagctgcctccatcagccaccaaagtaggcaagactcacggacaatgtccagggtgacggaaaaggaaccatatcgatacagaacacaatccagggggacttgtctcttcaccagccttaaggtggctgtaccatccagcagggggcccagggaacctggcaggagaggatcaaggaggcaagatcaagagacagatgactcatctggaggcagaggccaagcaggcattttttcaggttgaaccagagttactggattctggagtcacaggcttggaatcagataagacctgggaaaccttattctatagataaggaaactgaggcccagaagaagaaaatgactcctccagagtcacagttaggggtggcattggagttttaaaaaatcctcaaatgtttatcacaccccacactatgtcaggtcctaggctagacattcaacgtgtgttaactcatttaagcatcactgtttcattcctccctttttgctttgggatgggaatccagggttgggaaatggaaggatcaggatctcggaatctgggaaggattttcgtgcatttatgcttgaacagaaaatgagctataaatattatataaatgatcacagtctgttccctggtctcgccaaccgttctcagcagtagagaaagcaacaagctctttcctcatggcctaggggaagaccttggtttcctgaactccagacctattccatgtcattaagagagactggagggctttatagccaggccagtgagaactctgaggggaccatagtgctaagcaaaggattgggtaacatctgagtcctgggtaagacttacagagtagagtagggtaccccacctccgtgaacctcattcgcactgatactcttacctgtaatactttccgtagacatgattgagctggcatctggaccttcaggctcagggataggtagctctctagctgtggtctccacccactctgtagttgttacctgtgcagctgtggttccagaaagcaccacaattgatacctctgcaggtgtcatacctgtagcctctggagttgacatctctgccagtgtggtacccatgacctctgaaactggcaccttctcaggtgtcatacctgtgctstctgcagttggcatctgcacagrtrcagtgcttatgacttcagtggttggcacctgcacagatgtggttccagagggctctgcagttggcgcctgaccaggtgtagtacccacaacttctgtagtaggcacttggccagctgtggtgttakgggcctctgcagttggcctgtgcccatctgtggtgcctggaactggggaggagccacaggaggtgagaggaatggcagcctgcaggaccacctgggcagtgactgggccaggctccaggtaagtatgagtgaccacargtgcccgagagatcagggttccactactgtctccaaagtcccaggtgtaggagaggtcagcttcagccagatagccactrgggtcatggagctggagggcaaaggtcagaggctgatttctcaggaagtgcttgttccctccatccaaggcccgcaactgggacacgctcacggagaaaggcacctggtctgggattggagccagaaaaggtgagaaccaggcctgagccacagcttctcctttcacagccacaccctccaactccaagctgactggctggcccttcactggcactaagcctcacatttctctgcctaggtcttcctggcccttctactttaagtttgcacagcatttcacctttctcctttccagtccatccaagcctccctgccttctcttgccctacaamtggccttgccccttcctaaacccttaccagtaatggtgaaggctgagctggaatgagcaagaggcacatagctccgggatccccggcgatggtagacagtcacttccatggtgtgtgtgcccagcattgccctgcctgtcccaatgctcagcccagacactgggccccctagaacttgccagtattggcctgaagtttttggaatgaaaagcaaggaagaagagattactggtcaaaggggactgagggacaggcttcgaaacggcactggagatgggaggtcaggaagtatgattacttctgagggtgtttggaaggctgtgatatggggggacagggaaggggtcctaatgaggcattccatggggtaggactacaattgaggaagagttgccagaaagaattatgatagagttgaagggggctaggtgctaagaaagagaaaagatctaagaggaaaatgaagattagagaaaatcacagaagttaaggtggaaggggcggccaaaagaaaggtgatcaggtagaaagaagtaaacacaagtgtggatgataggctgagaagggagtccctcaccccaggtcttccagacataaacaaagcttctcttctgagaccaagagccagatgggcaaggtccaccatcagggaagatgcaggcatcgtcagtttcctggggatacactggctgtcctccccacacctggctccctgaaagataaatacagagtcactctcaaaccctggcattcttttttgtatatcaaaacccctaaaattgctcccagggtatcagagaggggctctgggaatattccctagctagaaagtacattctccatgatataaccatttggggtggtagttgggggttgagggtgtggaaactacattttttttttagagacagggtcttagtctgatgcccaggctggagtgcagtggtgtgatcacagctcactggagtgtcaacctcccagggtcaagcaatcctcccacctcagcctcccgagtagctgggactacaggtatgcaccaccatacccagctaattttatttttttgtagagacagggtcttgctatattgccaggactggtcttgaactcctgggcttaagcaatcctcccacctcagcctcccgaagtgctgggtttacannnnnnnnnnnnnnnnnnnnnnnnnnnnnnnnnnnnnnnnnnnnnnnnnnnnnnnnnnnnnnnnnnnnnnnnnnnnnnnnnnnnnnnnnnnnnnnnnnnnnnnnnnnnnnnnnnnnnnnnnnnnnnnnnnnnnnnnnnnnnnnnnnnnnnnnnnnnnnnnnnnnnnnnnnnnnnnnnnnnnnnnnnnnnnnnnnnnnnnnnnnnnnnnnnnnnnnnnnnnnnnnnnnnnnnnnnnnnnnnnnnnnnnnnnnnnnnnnnnnnnnnnnnnnnnnnnnnnnnnnnnnnnnnnnnnnnnnnnnnnnagagagaaggaccccgactttaaaataaataaataaataaataaataaaataagaaaaataaaagaaaaagaagatatatgtatatatatatagccacatatcaaaatatttagagtgatttgctctagctagtggaataaaaataacagcactagggggccaggcgcagtggctcacacctgtaatcctagcactttgggagtctgaagcggttaaatcacctgaggtcaggagttcaagaccagcctggccaacatggtaaaaccctgtctctactaaaaatacaaaaattagccaggcgtgctggcggaagcctataatcccagctacccaggaggctgaggcaggagaatcgctggaacctgggaggtggaggctgcagtgagccaagatcgcaccactgcactccagcctgagcgacacagcgagactctgtctcaaaaataaatacataaataaataacagcactagatagcatttatttagcctttactgtaggctagagcagacactacattaagtactttacacatattatcacattctaatccttacaacaatccttttatcttcggaaatggaaacacagtgaggtgggcagatcacttgatctcaggagtttgagtcatcctggataacatggtgaaaccccgtctctactaaaaatacaaaagaattagccgggcatggtgacatgcgcctgtatcagctactcgggaggctactcccagctactcagga

SEQ ID NO: 95235 - DNA, 54542 bp, Homo sapiens
tgcagtgcacagctcgaagggctggagacaggtcccaggtgggcacaacgacctatcacactgtacctccatactgggggactacattactatcacttcagtagcctgtaaaataaataagacaatgcaaaaaagagtttccatgtaaaaccagaagtccccagaagggcacgtgcaaccttccctgaccttgcttccccagcctcaagtccctcacccacacatgcttgaagccagctcccaggccctcatgcttggagccaacacatacacagggctcctgcagccaagcacgcccttctgcccccatccccaagcgaaccttccccttcctcaggaggccttcactgagccctgccgggctgggctggtaaccctcccgttgggctcccagagcacctgtgtgtcctactgggggccgtcctcacagctcagggttgagtctgtgtacttgtccacggctcccgcctcactgtgcaagccctgacaccaggggctgggtctacctacctctcccaacagcccttgaaaccagcacagcaccaggcacagagctggcatggctcaatgctccacagggtcaccgaggatgtccccagtccccagggcttggtcctgggcctgcttttcttctcccactaatcactctcacctcctccctcacggcctccgagagggataagaaacagtatcctctggtaacctgagcaaggcagcatcagggaagggttggggcagaaggaacccacaacccggagctgaccacagatgaccctttctggaatgcaacaaagggaattacagaaatctgcacacaaaaaaaagttcagcctgtaacctccctccacttcactattattccagcagtgtattcctaagagcatctgaaagcagaagttttcattcaagtcttaccttgaaagttttatccatagaagtggagagaagcatgtggctcttagaaaggactggacaccactgaatggtgttgacagggcccctgtggcctctcaggtggaaaagcactttccggggaactgtggtttctttataatggctattcaaatayggctgaataaactcagacactcccgggcccacgtagagaggggctggggcacgccctgcagggggcccctgtggctccacgtctttacccttgcctgtctccgtgcttaatgcctgccgctgtcttagtcttctgggagtatagggtaccacacagtcctcacattttttcttctgaaaagagctgccatttttacctacggtttcagactcactttgagcayggaaagatgacttgggaaagttcctggagagttttacttgcttaaagcgggcagctgccaggggcatgtggctggctggaacatggctcrtccacagagaagaacaagaaggctctttgatggggaaggtgacttgaggctccttcccgggccactgtagcctctggctggggcaagatccccratcgcttstcccaagctgagccaatggaaggcgatagccccctgggtcttcacaggagccatgctttgtgggctgtgcccctgctytgggcacatccagtgtaccagatgcaaaatcctgcccaggtggtctggccacaccagaagtgtctttctgctggccggtagcattaaaacttcctgcatgctctgtctcagcctccgagtccgaatcatcatacgctaccaatgaagccattaaagacagagttcttgctgtcattcaaagccaaaccacctaagatcaaacaaggtcaaccgtcagaaaatgtgcatggaagaatatgtatgtagttataagaaaccatgtcacctaggaaatccaataactcaacactcataagaataaacacaggccaggcgtggtggctcacgcctgtaatcccagcacttcaggaggccgaggtgggtggataacctgagatcaggagttcgagaccagcctggccaacatggtgaaaccccgtctctactaaaaatacaaaaagtagcgrggcagggtggcaggcacctgtagtcccagctactcgggaggctgaggcaggagatcgcttgaacctgggaggcggaggttgcagtgagcagaaattgtgccactgcactccagcctggtcaacaagagcgagactctgactcaaaaaaaaaaagaaagaaaaagaataaatacaaaaacaaaaaaggcttttctacatatcaggcccaattagttagaagataaaatttttgaaattgaaactatggaatagctgggggtaaatctgtaaaaaataagcaagacctacatgaagacttatagtaagtctgggtgcagtggttcacacctgtaatcccagcattctgggaggctgaggtgggcggatcacttgaggtgaggagttcgagaccagcctggccaacatagtgacaccccatctcaagtaaaaatacaaaaattagccaggcctggtggcacacaactgtaatcccagctacttgggaggctgaggcaggagaatctcttgaacccaggaggtggaggttgcaatgacctgagattgcaccactgcactccagcctgggtgccagagggagactccatctcaaaaagagaaaagaaaagaaaaaagcgctgggtgcagtggttcatgcctgtaatcccagcactttgggaggccaaggcggggggaatcacaaggtcaggagctcaagagcagcctggccaacatagtgaaaccccatctctactaaaaatacaaaaattagccaggcgtggtggcacgcacctgtagtcccagctactcgggaggctgaagcaggagaatcacttgaacccaggaggcggaagttgcagtgaaccgagattgtgccactgcactccagactgggtgacagagtgagactctgtctcaaaaaagtaaaattaaaaaaaaaaaaggaaagaaaactaaaacttttattgaaggacataaaagaagacctaggctgggcgtgatggctcacacctgaaatcccagcactttgggaggccaaggttggtggatcacctgaggtcaggagttcaagactagtctgaccaatatggcaaagccccgtctctactaaaaatacaaaaattagccggacatggtggcaggcgcctgtagtcccagctacttgagaggctgagacagaagaattgcttgaacccgggaggtggaggttgcagtgagctgagatcatgccactgcactctagcctgagtgacagagcaagactccatctcaaaaaaaaaaaaaagaaaaaaaaagaagacctgaagagacaatgcctacagagaaagagacaggactttaaaaatgcctttggaaggtccattttggtcatatgtgttacaagtttaaacacatcattttcaccccagcaaccccactgtagaactttatcctacacaaatactagcatatgtttgctagatgtataaatccatgaagataaatgtataaagaaaacctgccgcactgcttattagcaacaagtgagaacatatgctcatcatcatgaacgaggttaggtctgaaaatactgaaatcaaaagacgtccaggatccatggtgggaaaggcctgccactttcccctgcaccctttccctgtgctccagcccttccctcttttctctctgcctggaacattcttcccccaggtatcccatctctgtagcagccagctggacagacaggcccacagcacaaggctaaggtcctgaggtgtccgtctacccaagtgtgcagggagcaattctgagggcatgatccaaatccacccatttcactcccaacacacagattcacactgcaatgaatttctacttgttaaaaaaaatctttctgggcagggcatagtggctcatgcctgtaatcccagcactttgggaggccgaggtgggcggatcacctgaggtcgagttcgagaccagcctggccaacatggtgaaaccctgtctctactaaaatacaaaaattagccgggcgtggtggcacacgcctgtaatcccagctactcgggaggctgaggcaggagaatcatttaaacccaggaggcagaggttgcagtgagccaagatcgcgccattgcaccccagcctgggcgacaagagtgaaacttcgtctcaaaaaaaaaaaaatctttctgaaattctgaaccatcatacacaatacatggttatcaattagttcccagaaagaagtgctttggtaattttttacttctgtgctgttagcaccaagcacaatccagagaaaaagaagggtgctaggcactcctaggacagcagagggcgcggtggaacagcacagaacgctcaggcaatagaccgacttccaagaaaacccagtgcacccaaccttaatcaaacacgccaagctccgcctccatcccccaacaggtggagtcaggtcagcatcaacagattccctccaagtccttttctaagtcattccagacagcctattacccatctcttcttctagacaatgggtttctatgtcccctggaatcaaccacccaacctcttccacacctttcccccaagtggcatcattcgcctgagggttccactggtctacaagtcaggtcatcattccataaatgtctgtagtcagcctcctctagtaatgccgcccccgttcgcagcccattccaggcaggtaacaacttccacacgcaaagccagagtttaaataaaacgaccgggcgcggtggctcacgcctgtaatcctagcactgtaggaggccgagaagggcggattacctgaggtcgggggttcaagaccagcctggccaacatggtgaaaccccgtctctactaaaaatacaaaaaaaaaaaaaatttagccgtgtgcagtggtgcgcgcctgtaatcccagctactctggaggctgaggccgcagaattgcttgaacccgggaggcggaggttgcggtgagtggagatcacgccactgcactccagcctgggctacagagcgagacttggtctcaaaaaacaacaacaacaacaacaacaacttctaaagccagccagccagctcatctccaatggaactaatataatatgaaagactaattataaactaatggaaccgtgcactgcaaataatttggcatttctgttctctaaatgctaagcctggtcccgaggccactctcaactcctctgcccaggcaccacccaccatgcacccagattcccaccaccagggtgcccgtgctccctctggaaggagatgagggattaaacgaagaggaacagacagtaagatggaagggaaggcagggacactggagaagagtctaaggaaggagcgagtgactctgacagtcactatcagcaagtcagccccatgaggacaggactttctgtgttttgttcactattcaatgcccagcgtctaaaaatatttctggaatgcaaacgggtgggagggggagatgctaggaagtaaaagaaataggatattcccattcaacaaacatttcctgattacgtactctttgtcaagccctatgctgggtctggtgtgggtggaaatcaaacacaaaacacagatccccccggaggccccagagcgatgaaagcaacaaacaagatacgaccagagatgggttttgaaggatgaataggagttagctgagctgtcaatagtaagaagtaaggttggtccaaggcacagcgctttctgaaggaacaggaagtgaaaggaaggcgagcggctatgagagaccgcgttaagcggcacggggcgctttaggcgctgcccagtcccggcccctccagcccggggcccgccgctcaccacacgcaccggaagcgctcggttctcccggaggcagaccggccagcacactaccatccagtcrcgttccgacgcgacgccgcggccgccagccaatcagtggcggcctctgccccgcccccgcgcgaacagccaatgacggcgccgtcgggccggaagttgttccgtccggacggcgtttccacggacgcccaggagacagccsgttgctgagccgggagcgctgactggcccggctgggcagggtaagcgaggggagtaaggccggggcggagtgaggaaacaagggagggagtgatggagggacgctggcgcggcgcccagtggcctggccctcccgggagtatccttagagcccggcttgctgcccgccgcgttctggcactgtgaggcgcggagcctgccaccgacccctcgcccctttcctctgagcgccgccgacccaccccgtctccctttcccacyggcacccttcatcgtctccgcctgttcgcttttcccgaggagagaggcccccatttttatttagcgcctgccatgtgccagaggctttgcgtagtgttgcacttagtcccctcaacggtaatgttagcaggcttctccatgcccattccacagatgaggaaaccgaaggggaagcagaaaagtaatgcgacccttkcccaaggtttcgaataagtccaagctgggattgaaacccaggcgtctgtgaccccagaactcctgatctttccactgcactgtgccgcctcggtgaacagatgcggggaatttacagtttcyctttccaccgcccacgactacacaaaatcagtcacactgacgctgagggtggggaacgggaagagggtggggaggttatttggaggccagcggggggtgaggggtggctgatgcaatgaccagctaatggctcgattctcaagagggtttcattggtctcaacmtggccccccaggcaacccacccctgattggacagtctcatcaagaaggttggtcaagagctcaagtgtttctgagaatctgggtgatttataagaaacccttagctgaatgcagggtggggagaacgaaagacaaaagcatcttttttcagaagggaaactgaaagaaagaggggaagagtattaaagaccatttctggctgggcagggcactctcagcagctcaactgcccagcgtgaccagtggccacctctgcagtgtcttccacaacctgggtatgtattgccatctttgccaggcttagagcttgttcgtgtttttagcaaagtgctgaaaaccttggtttagggggtcaggacttgtgtcttaggattagggtgttatgcattttacttcttccattgacccaaagttcaggtgattcactgctcccatagggaacagagatcctggctgagcagtcgcgggcttggatccgtagcttgcctctcagcaccgtcatgctgtctgtcataattttcactgatgcaccctccttctgtgctcaacatcagaacgtattgtcattcttattgtgacacccaaaagtgtctcgtgcctggcttcatagaaattaatgtctttgccttttaagataatgttcatgctgttatttggcggggaaagcaatctttcttttagtgtttaaaaaaaatggaacatgatgggtcccaaaaggtgtcaagaatccttgctctaaagaagtcattttcttgtcctctgggaacttgccagtccaaaggtattgtcacctacactckggggccaagatagaaaggatggtattctacctcctggtggtattccagggatccagaaacactcctgggccacattctcttctcasctgctccagaattggctgtcttgatgccacccttccccagattgcagaatcagcgtgycctgatctctgtgagatgattttgatgcaacccaagtctttatcatgttgttctgttaaacaattctatagtcctttccactcctcatcccaatacaatacccagtttctttaagtgcctattatgctcctccaccrcagtggaaactttcagaatgagcacaagattcaagttcttgaaaagggggaactgggggttaattttcaagaggctttttagctttctccttgaaggtctgctgtgatctgctgtggagtaggcagttttgctctttacacgcccagtacttttgtttagggaagataatagagtacttcactggttataactgcatttctttgtttcagagtgtastatttgttaaacaggtgaatctacttctcttaacaaagtctcaatgtcctatttgcaatttatgtggtaaacactgaagacaatggtccttaaccttttggcatctcagcctcctttcgaaaggtaagaaagccaggagactgctcaaaaccatgtacataccaatgtacttgcaagcattaatgtaatttcagatgttcctgaactccaagttgaaaaacctctgaagttcaactcaattctgaaagtcaacaaagaaataaaggaggatgtcaataggtagggggaagaagaacatttacacaagaaatggggtaaactcataaatgcgtgaaatgaggaagatggtagttccattctccttgtctctgaccacacagaaagttgcatcatacacacacacacacacacacacacacacacacacacaagatttcaatagtgtggatgattcccacgcaaagtatatgccttgtgatcatgatcatctgctatttcctcagtctaatttcattcccatgtgcttcttaaatggagttctgatatttatagacacatgtttttccctgcaacatggaccctaaatgcaagtcctgtttatctagctgatcctctagcaaagaaacagttatctattctattgcagtgggagattggctgtcctgggatcactcaggcattctacctggcactttcccctggaatttttaaggataatttttatacttgattgacttcaaaaccttactgctgctgccttgttgccttcacgcggggcaccacattttttggaaggacagggtaaaccaaaaggaattccaaaaatagtgaccaggatggtgggcagatgttagcagagggtgaagaaaacagactaaggttgggagacctggaggagaccccaagagaccagcctggctctccttagatgtgggaaagctcaactcagtaccaggacgttaaacaagaggccatctaaagtccagctgggggaatcagtcttcaactggaacaagtaaagacattctaaggataaaccttagaggaaaaagttgaactagatgactaaggagattcattcattaggtaaatattttttgataagctgtgtgccaggtactagaggtacatggaagaataaacccagggcttacctttgctgtctgctggggaagacatgaataactaaactgcagtgtgagtgctttcataaagttactaaaggagtgtttggggatcacaaaggatggagcaaccaacttgttcccagaagcataggtgtcaggagaggctgtgaagagctgaggttcaaattggaaagataatcaatmagcagagttcaggcagagaagggtgtgagacatttcaggcaggcaggcaggcaggcagcagggagcagcagggattctgagagagcacatgagcaagggggcttgggaatcagattctggcttagctactccstggtaatggagccatcagcctcttgtctgctattgcagggcacatagagtaacacccagctttgagagttgggagaattcaggataggtttctggacatgatgattgatgatttgtggctagaagtaattttcatgagtttgatcgttatttgatatggacagagaccttagagagaaatggatttcgactgatttgctcagcttgttgctggggagggaatgggagagcctgagagttctctctagccctaggcagagggtactccggcattcctccctaaactggatgctttcttatctgagtcagttatctcaccaaacctccctttctgggaactgaggtggttctcatcaaggaggagaaagaaactggctgctgtcctgtcccggttttcagtattatagtttcattgaattaaataagttttgatttacatacttttttttcaatttttgtttttttattttataaaaattttttggagagacagggtctcactatccatgttacctttcactcgtgtcactcgtgtccgtgtgaagagaccaccaaacagggtttgtgtgagcaacaaggttgtttatttcacctggctgcaggcgggctgagtccaaaaagagagtcatggaagggagataggagtggggccgttttataggatttgggtaggtaaaggaaagttatagtcaaaggggattgttctctggcgggcaggtggcaggggtcacaaggtgatcagcaggggagcttttgagccaggatgagcaaggagaaggaatttcacaagggaatgtcatcagttaaggcaggaacaggccattttcacttcttttgtgaaggaatgtcatcagttaaggccatctggatgtgtacgtgccggtcacaggggatatggtggcttagcttgggctcagagacctgacattacccaagctgctcttgaactcctgagttcaagcaatcgcctctgcttcccaaagcacttggactgcagttgtgagccaccgctcacagcacccgtgatttacatactttttggaattttttttgttttgagacagagtctctctctgttgcccaggttggagtgcagtggcatggtctcagctcactgcaacytctgcctcccaggttcaagtgattctcatgcctcagcctcccaagtagctgggactacaggtacatgccaccatgcctggctaatttttgtatttttagtaaagatggggtttcaccatgtgggccaggctggtcttgatccaccctccttggcctcccaaagtgctgggattacaggcatgagtcaccacacctggcctacttttttttttttttttttttgagacagaacctttctgtcacccaggctggggtgcagtggtgtgatctcagctcactgaaacctccacctcctggtttcaagcaattctcccacctcagcctcccaggtatttggaactacaggtgtgcgccaccatgcccagctaatttttctctatttttagttgagacggggtttcaccatgttggccaggctggtctcaaactcctgacctcaggtgatccacccacctcagcctcccaaagtgctgggattataggcgtgagccaccacacccagccaatttacgtacttttaaagcaaatatttaacaaatggataggatagagtaaaataaatgacaccacaaatgtatatgtttggttcataaagataagtcatttgtaagataatggttgaaastgtaggctctagagtcaaactactagagtctataacgcatctctgccatttccttgtgatgttaacatgggcaagttttattttattttatttttatttttagagacagggtcttactctgtcacccgggctggagtacagtggcgcaaacrtagctcactgaagcctcgaactcctgggctcaagtgatcttcctgctatagcctcccaagtagctgggattacaggcccaccaccatgcccagctaattttttttttttttcatttttttgtagagtctcactatactgcccaaagtgccagggttgcaggtatgagccaccatgcccagccatgggcaagttttttttaacccctctgtgcctcatctataaaatggagattacaaatctatttcataggactgctgcaaggcttaagtgaattgatacatatacggtgcttagaacaataacaggtacagaggtgttcaaagttagcagctcaggcactagccttgtcattttccttctccaaggttttacagcaagttaaaatgaagctggagttcagccaatctttggaatcctaagaaacacaagaaatttaataacagcactcgtaacgtagttacatcttgctttacagtttacaaagtgctaccatgccttttttttctcattttgttctcataagagcctggggtagatgaagttcctggyggcgccattttataggttaggaaacttgactcttaggaagtgattgagccaagaaaggtttgatggcgatacagtctctgtctgccatgtccccacttcctgcaagggttataatgaatcatgactaataggaggtgcagacacaccttctgcaaaggcttgtagttaaataaggcagcacgtggaatggacagactggagacagtccttacctcatgtggaacctaggacaggtaaggccctgtcctccaccccagagctcactttgtctkagagcagctgaccagcagtggaagacatttgctcagcgatatattagttatggctrcaaaagcccaagaattcatccccaaggcaattaagataaaccacaaatagaggatgggtgccttggctcacacctataatcccaacaswkkmksrmskswgrwswgagaggatcacctgaggtcagaagttcaagaccagcctggccaacatggtgaaaccctccctctactaaaaatacaaaaattcgctgggcatggtggcaggcagcctcaggaggctgagacagaagaatygcttgaaccccagaggtggaggttgcagtgagccaagatcacaccattgcactccagcctgggtggcagagcgagactccatctcaaaaaaaaaaaaaatcaaatagtaatttgccaaaagtttttagcaatgaacttargttcaktwaaacacattggtatttataccctgagcaaacaggrgtcctcctgtgttctgggcactgggtgggggcacaggggcwtyaccagatgcaaacttkatcttgactaggagggcccctcctagtcaagtagattcacaccttaagtcagtaartcctagccactcctttrgtcttcatcactggcatttgatggttttcctcttcttcatggccccaaatttctggttctctttttattatattatctatgtcctttactgtaactcacctcacaaccttttcggaaaaaaggactcaatacaggaaaggaaaaacagccgcgatgttgtgttaacctctggtttttcctctctctccttccccgcccccaccccagtcttgactcgtctgctgaacaaatcctctgacctcaggccggctgtgaacgtagttcctgagagatagcaaacatgcccaacagtgagcccgcatctctgctggagctgttcaacagcatcgccacacaaggggagctcgtaaggtccctcaaagcgggaaatgcgtcaaaggtacatgattttgctgggttctccacgaaggcagctgagcctcccaagtctgtagggttgtgttcctctagaatagatggtttcctcaatgactgaggtgttttggttataattttttattttttgagagggaatttcactcttgtttcccaggctggagtgcaatggtgcaatctaagcttgctgcaacctctgcctcccgggttcaagtgactctcctgcctcagcctcccaagtagctgggattacaggcatgcaccaccacacccagctaattttgtatttttagtagagatgggggtttcaccacgttggtcaggctggtctcaaacccctgacctcaggtgatctgtccaccttggcctcccaaagtgctgggattwccagcatgagccaccacgccagccttggttatagttttaaatgtatttttcctttatcracattgggatgcctgtggtctaaagagtcaggggttctcaaagcctttgtgaaatacagtggccctccagcccacctctccctatttcctgctcaattcttttagccgatcttttggttatgtactccccatatctgtaaatattctgcttatcatattgttccttgttgattttcaagttggggtctttcaggtggaaatgaagcattcgtaccttcacaaccacttcccgtccaggcagtctccccatctgtattgcagttgtagttaggtcagtatctgtacactgacattattatgaccatggaaatagacgtggacagctgaaccatcacggatagaatgagtwctctaactttctcgcccagcttttgttttctctggagtkaatatttgtcttaatatctgtttgcttgacttttttatgtcaatgatactaatgataatgtatctccaagccctttccctgtccagtgaatctcctttcaacacacatcaactagtctatcaagttcatcttcttgaggcgatctctcccaaaaccttctgcctgcttccctctgaagtgggggctcttgcttcctacactgcccatcttggcgtctttcttcactgtcgacccaaggggttctttcacccctgtcgattgggtgccccgtttcctgctcctgcatcttattcctctttgctttactctttgggcagagcaaatcttccaattgtttctgaaaaaaatattgcaaaggaaatatttctagggggatcttgcccatctgaaagcgtatttattttacctaaaacatgattgatagccaggctgggtgtagggttctagcatggaagtgatttcccctggaaatgctgaagccactgctctattggcacctagcttctgggcttgctgcagagaagtcagttgccattcctttgttttttctttttggaagttagcaggatcttctttgttcccgtgttctgaaatttcatgggatgcaggttcagtatgcctttctttttttttttttttttttttttgccaccccacccccgccccccgagatggaatctcactctttcacccaggctggagtgtggtggcacaatctcgactcaccgcaacctccgcctcctgggttcaagcagttctcctgtcttagcctcccaagtagctgggattacaggcatccgccaccataccaggctaatttttgtatttttagtagagacggggtttcactatattagccaggctgatctcaaactcctgacctcatgatctgcccacctcggcctccgaaagtgctgggattacaggcgtgagccaccacactcagcctgccttttagactagaaactcatggccgttaattctcagaaatcatgatttctttgatctcttctgttttctctcttcacagacttttttttttaattcagagactgtttctctgattttctaaccctcctattgttttccatttctgctatcatttttaacttccaggagcatgtatgctccctgaagtttcctcacagcactctgccctgactcataggtacagtaccacccttttctctctgagatttttttttttaatcttattttactgtattaaatcttactaatattctgtaagggacaaaccagacgagtaggctacagtgaagaaatcttattttggagagttaagaaaccactatgatacttccaggtattatcttcagtgatgcttcttatctttattcagggactccaggtaatattcagctcctacagctaccacaaatgcagcaaatccccatttgaatcctttaaacaatacatcaaaaaaggaaacactctttgcaaagccacccatgtatcttcaagcttcattgtggccccacggatcccttagccctttttcagccagcttcttctggatagtttctaatggtgtcccttctgtcttccgttgtctgtaatctagaagttccattttacgatgtccatgctcatgtccatgtccatgggccatgtctgacagcaatctgacctctcaggacactcaactctctctctctgagatcttaatggtagttttccatatgtcctctacatcctttataacctcagtttcttccatcttaatttgttttctacctgcctttcatattagaggcaattctcaactgtttggtgtttcttggctatttgctggtgttttggggggtgcactgaaagctgctggatgcactcttcattggggaagagcttatcaacataggttccacttcctggagagtgaccaggctgctccccttttgttggggaatctttcgtgtcaaggtctttagatcttttctttaaagttaagtgagattccccagagaaagctcccccagtccactgttcagagggggtgagtcccgctgccagagttctacggctgagtgggagagaagggctgggctgtgggatccttccccgaagctccctattctctgtgtgctgccagtgccccaactgtgcagactgcccccagtctaggcacctgtaactctgtcctctcttgacatgaaaccttggaatggaggggaaactgtgacrctcccttggccgaggggagagggattctcaataactgcttcttgaagagacttcaaccagcgctcctgttttcataacccgctttcctgcccccactcctgtaagtgcscaaggtcactaaggcccgaacctttgggtrattccgtaacagtgtacactcggtcaccttccagtatttccatgatgtcttagcatttgtttttctctcatgctgttaggcactgatcattcatcagctttctggcttctgaaaccttgttgctgtcatcctcttcttgtttcctttgtccttgtgggattatgctttaaaaaaaaaaaaaaaaaagaagatctctgcttttgttgtagtagatttcagaaatatcatcatcaatacgcatctttaactagaacataagcatttcatttccttctggggtgactccactccggcttctccatgacttccatcactttttttttttttttttttttgaggctgagtctcactctgtcgcccaggctggagtgcactggcacagtcttggctcactacaacctctgcctcctgagttcragcgattctcctgccctggcctcgtaagtagctgggactgcaggcgcccgccaccacaccyggctaatttttgtatttttagtagagagggggtcttgccatgttggccaggctaatcttgaactcctgatctcaggtgatccgcccgcctcagcctcccaaagwactgggatgacaggtgtgagccaccacgcccggcccgacttccgacacttttaactcctgttatctgttatcttttcaaacaccttgcttgtcaccagattgtgtcaaccatctcacatkccccagtagtttactttgactatttgggaccctgatttaaatcattatttgtgtgtgtgtgtgtgtgtgtgtgtgtgtgtgtgtgtgtattttttgagacagggtctcgctctttccacgttggagtgcagtggtgcaatcctagctcagtgcaccctcaaactcctgggctcccaccttagcctgccaagttgctggaattatagatgcaagccactgcacccagctcatattttaaaggaaataaatagtactgaaagaaagtaatgtcaaaaaaaagytacttttttacagaaagagatttactcaccaggtaggcctcaaacgattaaaccaagttgttttaaaacaaaattataaaataaataaaagacccagtggggttatgtaagcccatcattttgggaagttgacagtggtatttttgtccatttaatattaaatttgaataacatttagtaaatgtttttagttagtaattcttagtgactgcagttatgttcattattttagtcaacttaatacattttataataactcttccaagtgtattatttgactaatgcaattggctggcacacgttgaagacatcagaggttgcacaatgagaccagagttaagtggtgaaaaattcagaagtacatttgtatctgaccctgaaatgtcttggtagtagaagcacttgatgttttggaaattttaaaaattaacttttagcaaaatagtgtgakccacattgggagtgccagttctaagagagggcaccttgagctctttcttctcctgccatttatctaggccatggaccttgaaggtcttttctgctccagtgtatctaaagaataagatccacatccttcagtagcagcagctcattaaagcggcaagtttcctagggggaaataagtcagcatctgagggctgtgaggggaaatagtttgagcaggactaaagaagcaatgctaggtcttaggtattaagaaagagagcagagcctttttcttcttctcctttttgtttaagtaacttctaaaatcaaaatataccattcatatagaaaaacatgctgatcataagcacaagcaggcacctcactgaattttcacaaaatgaccacacctgtgtaaccagcacccaaatcaacagcaagcagagagcacctagaagccaccctcacgcgcctcagcctctgccatgactcctcccaccaggggtagctctacctgggtttgaactgtatgtaatacagtcttgtgtctggcttttttttctgaacatcagcttttggcgaggctccgtggctcatgcctataatcccagcacttaggaggccaaggcaggaggatcgcttcaggccaagagtttgggaccagcctggataatatagtgagaccctgtctctacaaaaaatttaaaaattagccagacatggtggcacacacctgcagtcccagctactcaggagactgaagtgagaccctgtctaaaaaaaactgatgttctgggttttttgtggggtggggatctcacttcatcacccaggttggagtgcagtggtgcaatctcggctcactgcaacctctgcctccctggctcaagcaatcctctgacttcagcctcccgatgagctaggaacacaggtgtgtgccaccacacctggctaattttttctatttttggtagagacagggttttgccatgttgcctagggtggtctcgaacttatgagctcaggcgatccgcccgccttggcctcccaaagtgctgggattacaggtgtgagccactgcacccagctaacatcagcttttgaatcctgtttcagtgtcctggttcagacactgattaagactgattataagaaaatagacaaggtaagcctgcttgtcttattttggtgctattccaaaatgcagatggtccttgagcagggacattggttaaatgtttgactttcgcagagcctcctagttacaagcagaattagaccagatagagtatgaaatgtcaacaaagctagttattaagtgatattgactgcagtgtacttcaaagcaaggtaagccttcccatagataattggatagattatacgtactaaactgttattttttgcaagtactgagcctaggtactacagaaatgagatgggtggaacatacttaactatctaacctgggcaaacatctcatctatgaatcgtatccattgggttactgattccacaaatctggctcattttaatgatgagtctcagataattttgtagtttgaaacacagattactccagaatcacagtcctttatggcccaagtgctatatctgatggaatagttatctctgaatggaggttggtgtttataraacattctgtatatggtaaaaggaatttaaggagatttaaaagaaagaatgttctgtataaactgtaagtggaaatgtttgtatttcccttggtaagcaaattgggctgtgtatattctttgtttgtgatctaatccagcaaggccaattaccagaatagagctttagggcatagcatgactaatcagcttaattaggcctgcttttctaaacaccaggcttccaggggtggccactatggactcctgcaaaagagtctttaatacatttccagactacccaagggtacattttacctttgttttttttttttcaagatagtttgataagactccaaaatgtgatgatgtaactatttcccagtgaatccctccttaatttataacctgagagcctacattttttgtccttgcttttatctgttttagttgctcttactatccttagtggcatcattggttaagttaacgtaaatattcatctcaacctgtgtggtatgtaaaaactagttccaatgcagaactccaggaatctcaattaaaggagcttgtcacacacgttctctggcatcagtggtgtttgagaaatctttagcatatgaactttgtcataaatgacagtgtatattgtgtcactgctactgtcccaaagtgttcatggtagcactagaataacagataaaaatgaagtgttttcragccaatgacttgctgtgattctatgggtaagctcctctacctctctgagtctcagattcttgagctggaaaaggacagtgacaacaatrcctgccttgtagggttgtgacactaactaaggtaacacgtgtaaaagcatttaacacagtgcctgccacagaataggcattcagcacatatcagctattagtaatacttttagccatcccttttatttcctctctcaggatgaaattgattctgcagtaaagatgttggtgtcattaaaaatgagctacaaakctgcckygggggaggattacaaggctgactgtcctccagggaacccagcacctaccagtaatcatggcccagatgccacagaagctgaagaggattttgtggacccatggacagtacagacaagcagtgcaaaaggcatagactaygataagctcattggtacgtcctctgctttcttcccagaaaaagctgcaacttttagaagtggtcccattgagttgattccattgatgtttttaaattttgaattaatcataaattcagtgaagcttcaatgccaagaaaaaatrgatactaaaatcttttggttgtgcattatattcccaaaggattattttaaaataaaataacaatataaaatatatttcaaaataatgatctatagtagacagcttaatagaaggttttccctttttttgagcacttcagaacttgggaaaggtctattgaaatggccatttataacatttagtggctacaagtcaatcatagattacttaggtttcacctccagtgatactgactatggacctagaaggctggaagtcagcttaagagcagtgacttctcacatcgggcaagttcttactgtcatgcccttccttgagggccttcctgctcaggaaagactgttgccattccattgaagtctttactctgagatcattgctaattatcagagaagaaacagaactraaatgttttcatctaagtcaaagccattttccatgatttcagtatagactatcaatgagggaaaattcacttgaagacmgacattaattcagttcaacaaataaagaatgtgagaaatcatggttgtcaatgaatataaattttaccttaataaacaaatatatatatatatacctatttatatatgtatatgtttatattttgttgtcaaaagttgctagctggactgcattctgaatatgtttcccatcagaacccagtctcaggcaaaacagcattttgtgttgtaatttatttcctgttttgttggttgtgttgatctcagctgttgttttaatccaaagaccttttacttcatgttggggdtaaggacctttagcagaaggcctaaagaggtttgtgttcattaagattgtgcatggatcactcacttttcatcttcatttcagtaatatctgatcactaaacctcctgccacctaagaaagtcatcttttctttttttccagttcggtttggaagtagtaaaattgacaaagagctaataaaccgaatagagagagccaccggccaaagaccacaccacttcctgcgcagaggcatcttcttctcacacaggtcaggggctcttcaccacaggccttctcacctgtcctcttcttttagttcaaaaaaatcgtaagacactctcttcataagccacctggtactgtgggaaaagtgatggccagctgtsgtaagactgagatccatcctctgtcctgtcagtaacccactgtgggatcatgcttgtccatcaccctcaggctcttagttttttcatttgtagactgcccacctcacaaggtgggaatcatattaatagcaggtgagattcttcccagattacaggctgtaaagaaattataaaatgtcatgaaaacaaaagagaataatatgtccaagatcagcatttcccacatgacaaacagtaggcttcctgaaattccaaaccctcttcctcctattgtattgacttgctcataaacaataccaacagacaaaccaacagagaatgcatggaacagattatcygtaccttaggccgtaaattccacgcagataacgtcaagatatgggcaggttccaaaagagtttctgcctctcccaacctacagttatctgggctgaggcagccccctttttgaagctgtgtccatggaatttatgatctgatgtagggttgttctgttctactggcacttcacgsttacaggagaacaaccccaggacagagcccagcagtctgcccaaacacttcaaattctayctgcaaagaactccaggccttgctcaacccactttctgggtggaatataataaaaaattttccttaattcacatactataaaacttatttttttaaatgtacagttaagtgggttttagtatattcacaaggttgtgagaccatcaagactatctaattccaaaacatttcatcaccccaaaaggaaacttctacccattaacccatttatgccagaagttgtaaaaattttttgtgaaaaatcagaccttggcaatcaccttgagcagtaagatatcaataactcccacaagtttagcattccaattttggaacagtaggtaggcataaatgggttaacagtcatcccccatttctccctccccactggcaaccattagtctgctttctctatatctagatttaggcattttatataaatggratcatgtaacatgtggccttttgtgtctggcttcttttacttggcataacattttcaaggttcctccatgttgtagcatgtatccatactggattcctttttattgccaaataatattccattgaatggatatacctcacattttgtttattcattcattagttgatggacgtttgagttattttcactttttggttatcaacaatgctgctctgaccatttgtatacaagtttttgggtggatatatgttttcaattctcttgggcatatacctcgaaatagaattaatggcttatatagtaattccatgtttaactctttgaggaactgacagacttttctacagcaactgtatcattttactttcccaccagcaacataggaagcttcccatttctccacatcttcacccactcttgttattttccatgttgttgtgttttatagccatcctaataggtgtgaagtagtatttcattgtggttttgattgtatttccctaatgacaaggatgttgagaatcttttcatgtgcttattaacaatttttatatctttagagaaatgtctattcagatcctttgcctactttttaattgggttgtctttttattgttagttataatagttctttctatattctggatactagtttcttattcaaatattacttgcaaatatttgctcccattatataggttgtctcttcactctactgatagtcctttgaagtatgaaagtttttaattttgatgaagtccagtttattttatctttgattgattgtgtttttggtgtcatatctgagaaaccactgactaatcgaaggttgtgaagatttacacctatggtttcttctcagagttttgtggttttagctcttacatttcagtttctgatcctttttgagttaatttttgtatatttgtgaggtacagctccaacttcattcttttgcttgtgggtatccaattgtcccagcactgttttttgaaaagactattcttggctgggcgcagtggctcatgtctgtaatcccagcactttgggaggccaaggcaggcggatcacgaggtcaggagattgagaccatcctggctaacacggtgaaaccccatctctactaaaaatacaaaaaattagccaggtgtggtgatgggcgcctgtagtcccagctactcgggaggctgaggcaggagaatggcatgaacccgggaggcggagcttgcagtgagccgagatcgcgccactgcactccagcctgggtggcagtgagactccgtctcaaaaaaaaataagaaaatgtgagtactcaaacatggttctttttcaagattgtttaggtattctgggccccttgcatttccatatgaatttcagcttttccatttctgcaaaagcagcagctaggattttgatagggattgcactgaatctgtagattcatttgtggagtattgccatcttaaaatattaattcatctaatccatgaacatgggatgtcttttcacttctttgatttctttcattgatgttttgtaattttcagtgtataggttttgcacttctttgcttagatttattcattagaattttatctttttaatgctattctaaatggcattttcttaatctcattttgattgttcattgctactatatagaaatacaactgatggccgggcacggtggcttacacctgtaatcccaacactttgggaggccgaggcgggtggatcacttgaggtcaggagttcgagaccagcctgaccaacatggtgaaaccacatctctactaaaaatacaaaattgggcaggcatggtggtgggcgcctgtaatcccagctacccaagaggctaaggcaggagaatcacttgaacccaggaggcagaggtggcagtgacccgagatcgtgccattgcactccagcccgggcaaaaagagcaaaactccctctcaaaaaaaaaaaaaatacaattgatgtttgtgtattaatcttatatcctgaaattttgctgagtttattagcgctaatgctttttttctttttgcagattcgataggatttcctacatataggattgtatctcctatgattagagacagttttacttcctcctttccaatttggatttttttttcgttcctaatttctctgacttcaactttcaataggatgttgaatagtagtggtgaaagtgagcatccttgtcttattcctgatcttaggggaaaaactttcagtaaagactgaatatacaccatttagtataatgttagctgtgggctttctatatacccttcaacatgtgtttttattatgaaaagatgttagattttatcaaatgcattttctgtgtttattgagatgatcatgtgggttttggcctctattttattagtatggtgtatcacactgataggtttttgcgtgtttaatcaaccttgcgttcctggaacaaattccacttaatcatggtgttgaaaatcaatttattttcaatcatagtgtataatcttttttatatgttgctggatttggtttgtgagttgctgaggatttttacatctgtgttcataagggatattggtctgtagttttcttttaatgtctttggtttggtatcagggtaatactggcctcatagaatgagttgggaagtatttcttattcaattttttttggaaaagcttgggaaggattggtattaattcttttttgaacatttgatagactttaccagtgaaaatggggttttgggcttttctttgtaggaagttttttgattactaattcagtctttttgtttgttccagatctgtgtatattttctatttcttcttgggttcgtttcagtagtttgtttctaggaatttgtctatttcatcaaggttatctaatgtattggtatacagttattcatagtattcccttatgtagtaatcctttttattcctataaggtcagtagtaataccccttcttatattcctgattttggccgtttgagtcttctcttttattccacacccccccccmcacacacacacacacccagtcactttggttcaaagtttactaattttgttggtttgtagtcagcattttttatcttagcatggcatggttcttctcactgcctttgtgacttatttattaactgcagtatagtaatactgtagcctcttggcttaggaaagcataggacctgagtcatttgcccattctcaaatttcaaactgcccctctgtctaattttgtcatctgtaaaattggggattaaatgagatctactatgcacagtcaagcttcaagtggtgggcaggtaactgggttcccttagtagctgaatgagtctctgctggaatccatcctcataaaacatgatctcaaaattggaacccagtaaatttctgcacgcttgtcaggagcacctcaccccaggaccgagcacacagtgagttctcagatgctccacataaacacaagaaaagcagctcatggcacagttacatttttttctcttctgtaagcccatatggttagttgtgagaaccaaagaaggattctttccttccaaaattatgggttattttctttccttatttcaaaagcagtatgtgagcatttcatggggaaaaaaaatgaaaactaagcccaaaaaccagaacacccacaattgtatctgtccagagataagcaatgttgacccttggcttggggaatataaggagaagtcactttcagaatactgttctctagattctcctatccagacmyctggaaaaggtagttattcctcttgtatttggggacactttacccagaaacaaaggacattcatcctcgagcgttggtttcccaccctgctgaacattggaactcctcacggagctttttaaaaatacaaattcccggccaggcgcagtggctcacacctgtaatcccagcactttgggaggccgaggcaggcaaatcacgaggtcaggagtttgagaccagcctggccaacatggtgaaaccccgtctctattaaaaacacaaaaaattagctgggcatagtggcaggtgcctactatgcccagctactcgggaggctgaggcaggagaatcgcttgaacccaggaggcagaggttgcagtgagcagagatcacaccactgcactccagcctgggtgacagagtgagactctgtctcaaaaataaataaataaacaaacaaacaaacacattcccagagagcacctcagatccattgaatcagtctctggaggtggggcgcaggcagctgtgattggaagcagcctggtagggagggggatgactcttgagtgacttgcagatgaagatacctagtcccaagctggctgaggggcccagatagatctccaactgggcacttgacctctgaactcccagaggacaattcttactttccctgctaagccaggactgtctggtcccatgcagtttgcctggtattggtctgagagtcctcggggctgggtgattctgagcaaggatcatatggtgttggcctggtatccccagggaagtgtaccaagctmacagtatgtcggcactgatgtttggagggattccaggagtcccagtaactgcatagctggatccatcttttaaacacattattccaaacctacacatcttgtcttttaaaacactcacaggagaaaccatttcagtagaagtttcctgtctatatttatatcataagcaccaaaggtaacaaattctagttattatccatgttgtttcgtctctgtctatattttycatttccaaaagtgcattagtgccttgatatttttctcagaaaatcacactcttcctcttctcctttttcctttagagatatgaatcaggttcttgatgcctatgaaaataagaagccattttatctgtacacgggccggggcccctcttctgaagcaatgcatgtaggtcacctcattccatttattttcacaaagtaagtattggatcttatggcttttcttactctcttagtgaattgagaatgttgcttataaaccatgtttagaactgacaagatcatgctagttcatttgctgagcaaccaagatgtcaagagttggcacttttttggcttccattcactttgttcctgggctcactttagaggaccatggagtgatggggagagcgcagctttggagtcagccaggcctgctcctcttctcatcctgctccctgtcygcatggccatgggcctgctacttctctgagcctaagtttccacatctgcaagatgagaatgaagatacctacctcatagaactactgtaaagcttcaaaacaaagtgtgtaragcagctaacacagagcacacagggccacctggtcgataaatggtagtagaccttatcattatccatagtcaaattcatatcacaattcaaattgtgattttgtaggcaaggaagttttaacatacgttgtaagtaggagctgtgttttcagatgcacgatggcgttcctccacaggggagatgagacgtcagctttctccccctgtgtttctttaggtggctccaggatgtatttaacgtgcccttggtcatccagatgacggatgacgagaagtatctgtggaaggacctgaccctggaccaggcctatagctatgctgtggagaatgccaaggacatcatcgcctgtggctttgacatcaacaagactttcatattctctgacctggactacatggggtaaggagaaaacgtctggctgccttttcaataggtagaggaggatgtcaagttgtcatgaccacagctaaattcgaaacaactgaaatggtcttaaggcctagtaaatgttcttcttcctttattaaatgctatgagtggccagccatggtggctcacacctgtaatcccagcactttgggaggccgaggtgggcgggtcacgaggtcaggagttcaagaccagcctgaccaacatggtgaaaccccatctctattgaaaatacaaaaattagttgggtgtggtggcacgcacctataagcccagctactcaggtggctgaagcaggagaatcgcttgaacccrggaggtggaggttacagtgagttgagatcacgccattgcactccagcctgggcaacagagcgagactccatctcaaaaaggaaaaaaaaatgctatgagctggtttattggttttatttaccaataattttgaaagtgaaaagctgtgtatgtacatagaaaggattaagtgatatcagtatcttaaagactcgattattgtctccataattacatttacagaaatttaaaatatgggctcagccacagcatgatggcatctcagatcttcatcctcagctgtgccaggaagtcctgccttgcagtttcttgccaaggatagtcagtcttccagagttatgtcttcctccttttcaacgcaccttttcctcacagagaaaagactcagtggttacacagtttcctcagtctagttcttttaatcagccatttaataaaccaaaatatttcattctgaaaatccttcaagtttcatcccaaatgattaccaagaaatgtrttagaaaaataagactttggtcaaccatcacaagaaggatactatctagctcaacaaatatttcttgagcacctgagttgtggtactcccctaaggtgagatactcttctaagtcatagtactcccctaaggcgtggtctctcctaaggcatggtactcccctaaggcatgttactccactccccaaagacgtgttactcctcccctaaagtgattccccaggaggagtgggttcattgctatgctcctgcagcccaggctgggctctgagcaggccctcccatgttagctcaccatcagggaccatgccgaggcaggataagagggacactaaaggggcaggtgagcagtgagcacaggaggacttgcttagagccgcatccccagaacgttccctcttataagaccttaaaactgagtastggcagccaggcgcggtggctcatgcctgtaatcccagcactttgggaggctgaggtgggtggatcacaaggtcaggaggtcaggagttcgagaccagcctggccaatatggtgaaaccccatctctactaaaaacacaaaaattagccgggtgtggtggcgtgctcctgtagttgcagctacttgggaggctgaggcagaagaatcgcttgaacctgggaggcggaggttgcagtgagccgagatcatgccactgcattccagcctgggcaacagagtgagactctgtctcaaaaaaaaaaaaaaaaaaaaagaaagaaactgagtagtggttttatatccattgagagcaatgtataccctgataggaaatctcgcccttctatcagccagtaaaactgttagctttttctttttctttttttttttgagacggagtctcgctctgtcacccaggctggagtgcagtggcacaatctcggctcactgcaagctccgcctctcaggttcacaccattctcttgcctcagcctcccaagtagctgggactacaggtgcccgccaccatgtccggctaattttttgtatttttagtagagacggggtttcactgtgttagccaggatggtctcgatcttctgacctcatgatctgcctgcctcggcctcccaaagcactgggattacaggcatgagccaccacgcccagcacctattagatcttttaaaattacttctcttggttcagccatgtgagcatggaggccctgtggcatccttgaaggaaggaaaatagacagggatccagatcctggcacctgggtttagtggctgtgtgtcatagcagccgtgtccatgaaatgggatcaaacaagaacatagatgtcatcattagcataattttcttttttttttttttttttgagacagagtctcactcatgggttttgccatgttggccaggctggtcttgaactcctgacctcaagtgatcctccccrcctcagcctcccaaagtgctgcgattacaggtgtgagccaccatgcccagccgtgttagtataattttcatggcactttatttccttattctcaccccattccatacaatgattcaactgattgaacctctgcagagacaactgtgggttctgcttctccttttccagtcaggcagtgctgctggcattgcccagtagctgctatcctcttcccacaccaccactgcccccaccagccagtgatctccctaaaactcagagctaatctcatcttccacttgcgggtctttcccagctctcctccttagatgacattgagaattctcacctttcacttggcacacgagccctttcgtgattggccctgtgttcctctccagcgtcactgctacctccagctcagtggaacagcttgcagttccacatccttctcctttgtacatgctctgtgctgcccagaattcccacccactctcctgaccctgccacccccagcttagctaattcctacactttcttccaaaggcatgatcaagcatcaccttttcctaggagctttccctccccacagccaaatttagatgcccctctctggtcctccatcaggctgggccttacctctgccacatctggtacagtgtggccctctccccactagctgagtaagacacatagttcctgaatttgtgctctctgtggcccatcccctcctgggccccacagacacascagargcaaagctgagccgcttcgttgatggatataaatgctggtggtgagacaagagcaagtgcstataatagtccatgaagctgattcagccaatagatgcacgatggggtagatgaacttttgaacagtccatgtgaaaagaccaccacctgagcaaccccactttcagcgctctctgaacgtggagtgaggccgccattcctcgtgctgtctctttggcaactgcggttgcagctcctgaccagcctccaccttcgctaaataagaacttccttttttttttttttttttttttctttttttgagatggagtcttgctctgtcgcccaaactggagagcagtggcatgatctcggcttactgcaatatctgcctcctgggttcaagcaattctcatgcctcagcctcctgagtagctgggattacaggcgcccgccaccacacccagctaatttttgtatttttagtagaaacggagtttcaccatgttggccaggctggtctcgaactcctgacctcaagtgatccacccgcctcgaccacccaaagtgctgggatgcgtgagccactgcacctggtcgggaacttcctttttccttacaaacatggggtaaagatgaaacccagacagtatgtcaaccaaaagggtcgatgatatcttttcttgaaaggcattttatattgaacctaaagtgaggagagacattttaaagggtaaatcctctattcaaacattttactttaagagtttcttctaaacatttgagcattttacttttctttcttgaatttaactcaaaatctatatctttggcttaataaagctccttcctggtgtttaggagctggaaattcaacaaagccagccatcgccctctttgagtgggagggaggtggtgaggcctccatgagggaggaggccagtgcagttccccctgcacattgcacatggccccagaacggccttcctgcccagggccctgagggatgcaaaggcactgagctgggagtctgaaaacttgtgttccagacccagctctgcccctgcctggtcttgttcccttgggcaagtccttaaatctctgagcttccatgttcctgtgaggaagggagctgggtgctagtggggggcagcatagcagaggttgcaagtgctctgcttgacggccgtccgctgtgtggcctgggcatgggaggagccttccactgtgtggcccgggcatgggaggagctcctctctgcctgctttcttcactctgctcctttgttctacaaatatttattggacatctgctatatgccagactcatggtgggggtacagcagggagcaaaaccattatctcagcagctgtgtaaagcctctcttctaatggggagaatcagctaacaggtgatcaatcaggtgataataagttctatggtgataatagggacaaagggcaggggtagagaagactgtggtcaggagatgatagtgcctgcactgcatataaagtgcttcaagccacgcctggcacctggggagtgctcagtaaatgttgtaatctaaaatctcttcccactttaaaccctgtctgagagtgaaaagcaggtgccctccctggggtaactggtggttcagccacatgtgatatacagttaggtgtgttcactgcagccagtgagaagcctccatgtgccggcactggcatggctgctttgcgtgatgggtccgtcccagctgtgcagggggacagccgtcccttgaggggaggatcacacgtgctcacggtgcagcacctgcattcaccctgcagccagcacagtggcagcagcttgcagcaagtaatgaccagtcttctaagaaagggcagcgtgctctaactcagaaataccagtcagacgccgygaagctacagtcctgccacagtttgggggtactggagactttccctccttgtaggggttagggtgtcccaggtgcctcaatcccaagggcgcatggagtctttgctgcagcccatctccccaggtgacagacagctgctgtccttactggctgtgagtcctgctgcggtgcccaggagggaccctccctgcctgcggtgttcttggcttgcttggcaggaggacaaaggccgcatctttccaggcagtgctgctgttggctgtgctcttgctctctgttgtttccattgtgctgagtgggtgacacagatgctgggttctcctggcatgccccttcacagtactgcgcccgccctctccagtgccccccagggcctgaaactcagccggctgctaggcgaaagacacagtccatccctcacgtgctgcctctgctcaacctggacaggccttggcactgaccttgaccgttacaggcctcccagcattgtgcttcgcccagcacaaacggccagtgttcctgcactcctgacaccccaccccacctgcacaaagacattcagtagttctccaccctgccccaaaagtctaaactcttctaaaggataagatgtggtgagaaaagcataggctttggggccaggtgaatctgtgttgggatcccagcccctgtactcactgggcctgtgactatgaccctgaacttctttgagcctagtctaactgtaaggtggaggcaatgctactactttgaaggggattttaggagtattgacacatacgcagcatctagcacagctcctgccacatggtgcaaacacttaaaagacaccagccttcccccttttccctcgtagtgtctaacacatggtagggcctagagaaaaagctactgaatatagtaatacaaagatgcaatataagaagccacttggctgggcgcggtggctcacacctgtaatcccagcactttgggaggccaaggcaggtggatcacctgaggtcaggagtttgagaccagcctggacaacatggtgaaaccccatctctactaaaaatacaaaaattagccaggcatggtggcgagcagctgtaatcccagctactcaggaggctgaggcaggagaattgcttgaacccaagagatggaggttgcagtgagccaagatcatgccactgcactccagcctgggctacagagtgagactctgtctcaaaacaaaaaaaaagaagccactctgggttctgccaaacccctacaccccactgtgtttgcttcttcttcagcctagttccttctggtagcggaatggctgccacacattcaggcctggtacccacacccctcaccatccagaagagagagttgggttgcttgaatcagccactgtggcctagccctgttgctgtggatagggttagttctgcccaaacagcaggggggagcagtggccagagactaggaggaccagctgcactgaaacaggccttcctccttctcgggccgtgggtttctatccatacgctcatccgacaacaagcagatggtctcccacaacacagtatgtctcagctaagaagctcctgggggctcccagacttgagctccacagcccactgaactgctgaccctggcagaatttaaatttttcatgctagctgcaagtctctgaatctgcttgtgttcttgccttgtttgtatgtctgcttcacgtyrgtttcacactggtttctgcctttcccagtcaactccacaggtaaacgtgtgtctgctttgcctgatgcaggtatctttgcctacagatgacttcctggcaccttcccagtgcttacgtgttgaccacaatgtggccccgagtctggcccatgccactactcattggcatccaattttaataactgtgactttgccttcagtgaagrccgccctccgtttgggatttcattctcgttgtctttgcaggatgagctcaggtttctacaaaaatgtggtgaagattcaaaagcatgttaccttcaaccaagtgaaaggcattttcggcttcactgacagcgactgcattggtaagrggcccactgctgctgtggaccactccctgcacccttcaaaaaggagcagagttctggaggagacacatgcctggtttaaatatctctgagatgttagcgtttgcaactgtctctttaagtaggatgcccagrcgtgggtgggtcatygttgtcctggaatctgactagctagtgtaatgcattgagcagcttctctgggttgggtgaagctgcacttcaggatgtgagtctgtccctctcttgtcacccgtcttaaggtttagaagaaagaaaaatctaaggatgactttggagttccaacagctctggtgggaccccagtcagtgtagggtggccttggatggaacccaggggtgatgaagaaggacagctgggtctgctgcccatgagagggcctttgagtctttgtctccctgggcctcagtgtccccacatgtaagatgaggggcttgacacgaggtcttctggagccttcccacccctgccctgctctccttccatggctccaccccagcagatgtgcaaatggtttgcctcccacgtgcatgccttcatggccctctccataaakkkccatgtgtctttcagatgcattggcttcgtagacttttagacttttggtccttgagacttgtggctgggccttctgatcccctcctctacttgatgtytggtgcgtggcttcaggcatagcaggcccttgaggccttcagtcagctgccagccgagccagctccctgggatgcgctgccggggctctccgtgaggagcgttcaccctgcttggagccagagccacagcggcgtgtgctccacagcgtcagggtcacgctgggccagccgcgtgcccagggcccggaaacctctgcgctcacccaagggtctgggtaccgccacttggtgggggctggcgtggcaccacctgtcgggccatagagaggtcaaaagttctgcttctgcaggtctaagcaaatactaatgacagtaataacagcaacaacatccaaaacactaaacacttttaaatatcaaaatacattcatcataacttctttttttttttaatttatttatttatttttattgatcattcttgggtgtttctcgcagagggggatttggcagggtcacaggacaatagtggagggaaggtcagcagataaacaagtgaacaaaggtctctggttttcctaggcagaggaccctgcggccttccgcagtgtttgtgtccctgggtacttgagattagggagtggtgatgactcttaacgagcatgctgccttcaagcatctgtttaacaaagcacatcttgcaccgcccttaatccatttaaccctgagtagactcagcacatgtttcagagagcacagggttgggggtaaggtcacagatcaacaggataagaatttttcttagtacagagcaaaatgaaaagtctcccatgtctacctctttctacacagacacggcaaccatccgatttctcaatcttttccccacctttcccgcctttctattccacaaaactgccattgtcatcatggcccgttctcaatgagctgttgggtacacctcccagacggggtggtggccgggcagaggggctcctcacttcccagtaggggcggccgggcagaggcgcccctcacctcccggacggggcggctggccgggcggggggctgaccccgccacctccctcccggacggggcggctggccgggcggggggctgacccccccacttccctcccggacggggcggctggccgggcggggggctgaccccccacctccctccaggacggggtggctgctgggcggagacgctcctcacttcccagacggggtggctgccgggtggaggggctcctcacttctcaggcgggcggttgccgggcggagggtctcctcacttctcagacagggcggccgggcagagacgctcctcacctcccggatggggtcgcggccgggtagaggcgctcctcacatcccagacggggcggcggggcagaggcgctccccacatctcagacgatgggcggccgggcagagacactcctcacttcctagatgggatggcggccgggaagaggcgctcctcacttcctagatgggatggcggccgggcagagacgctcctcactttccagactgggcagccaggcagaggggctccttacgtcccagaygatgggcggccaggcagagacgctcctcacttcccagacggggtggcggccatgcagaggctgcaatctcggcactttgggaggccaaggcaggcggctgggaggtggaggttgtagcgagccgagatcacaccactgcactccagcctgggcaccattgagcactragtgaaccagactccgtctgcaatcccggcacctcaggaggccgaggctggctgatcactcgcggttaggagctggagaccagcccggccaacacagcgaaaccccgtctccaccaaaaaaatmcgaaaaccagtcaggcgtggcggcgcgcgcctgcaattgcaggcactcggcaggctgaggcaggagaatgaggcagggaggttgcagtgagccgagatggcagcagtacagtccagctttggctccgcatcagagggagaccgtggaaagagagggagagggagaccgtggggagagggaagagggaagagggaagccatcataacttctgataattaaaggtggaaggtggctagagaatggttaaatgatatgatacattgacaggatagaatatacttagtaacaacatggatagtcattacaatgaaaaaggcaaggaaggccgggcgccgtggctcacgcctgtaatcccagcactttgggaggccgaggtgggcagatcacgaggtcaagagattgagaccatgctggccaacatgatgaaacctcatctctactaaaaatacaaaaatcagctgggtgtggtacgcacctgtagtcccagctactcrggagcctgaggcaggagaatcacttgaaccccaggaggcagaggtagcggtgagctgagatcgagccaccacactccagcctggcaacaaagcgagactccttctgagaaaaaaaaaaggaaaagaaaaagccaaggaaagaccaaatatagtgtaatcacaacaaaaatgcatagagtaaaatatataaagaaaatggatgaaatcagacacattgcaactgtacagcttgttctttctacttttctgtattttttagatttattttaatgattgttttataatgggagaaaacctgtttttgttcattcctttattaactaagcagaacaggaactcatctcacgtgtaaaaatactttttctcattttcagggaagatcagttttcctgccatccaggctgctccctccttcagcaactcattcccacagatcttccgagacaggacggatatccagtgccttatcccatgtgccattgaccaggtcagcaggcagaaaagcaaggctctctaagtctggggcattgacagcaggttcctcttactcttcagcggggagaggtattgaaagatatgatgggcagccaggcagggtggctcacgcctgtaataccagcactctgggaggccaaggcaggcggatcacttgaggccaggagttcaagaccagcctggccaacatggcgaaaccccgtctctactaaaaatacaaaatttagccacatgtggtggcaggcgcctgtaatcccagctactcgcctcgcttgaaccccagaggcagaggttgcagcgagagcgcatcactgcactccagcctgggcgacagagcaaggctctgtctcaaaaaaaaggaaagaaagttggggagtggggcaaggggagggagagcattaggacaaatacctaatgcatgcggggcttaaaacctagatgacgggttgatgggtgcagcaaaccaccatggcacatgtatacctatgtaacaaacctgcgtgttctgtacatgtatcccagaactggaagtaaaatttaaaaaaaaaaaaggaaaagatgaaggggaggagggagtgaatttctttggttggaagcatgagagccttctgggaagatgctcacagggactgctcatggctgaaagctggcatgttttctggccgccctcatcagggtccttactctccccacaggatccttactttagaatgacaagggacgtcgcccccaggatcggctatcytaaaccagccctgytgcactccaccttcttcccagccctgcagggcgcccagaccaaaatgagtgccagcgaccccaactcctccatcttcctcaccgacacggccaagcagatcaaaaccaaggtgagcagtggcccaggcagagggcagccagcgggatcagaaacatgccctggggggcacacgcacacacacaccactgcrcagtgctttgggcctcagccacccagccaccgtagcaatgctgaactccaggattgccaactttgctccctgcagaactcaaggcagcctgtccttcccacatgaatcaggtgaatttgttttgtgtcctttcatttaggtaawattttgaatttttttttctttttttccttttctgcttttcttatcagcactgttctgcaggcaaagtcatggcaatttccttaaagttataattagtgtggatgttattaaataatggaaaagatttgtgtatatttctcatcatcagctgtgttccagcggctggacccggtgccttatttatgttttctcatgtttcattctcactgggaggtggtggtgctattccctttaaagatgagatgatgaggcttagagaagcccagccacttgaccaagtttccaccaccaggaatcagcagcactgctctcctggccctgagcagccattaccaagcagggrttatgagctggtyttctcccagagagcgttctcactgagagacatagaacggagaaacgtccatccacgggacagtcctgctggccccaggagggatgcatgcagcaggcattcagcaaacatttgacaaatcactagagaaactaaaaggagaagttagtttgagcttccttattttgcatggccccagttctgttgcctggttcctcaacagccagtgtatatataattgcctcactgttacacaaagcagttgacattttctttggaatcaagtgtgtgtttgcaggctagaagattgcagtgggaatgctgggaactgtatttgaggcatgtcacatgccctctgagtcactgcccctgaccgttctggaaagtcccaagcaggttctggttgacaatggggaagcctttcatatcaaaacttcctaagacatgccctccaccaactctccccactcagttggaagctggtataattgaagacttttctttccctttcacttctggccaaaacttccggagcacagggtgcagagtggggagggaagcgccattggaaaagtccactgttttattttgcttctgagaagttgtttggaaaaagttgtttatggccaggtgcgatagctcacacctataattccagcactttgagaggccgaggcaggtggatcacctgaggtcaggagttcgagaccagcgtggccaacatggtgaaacycctgtctctactaaaaatacaaaaattaaccaggcttggtggcaggcacctataatcccagctactcgggaggctgaggcaggagaattgtttgaccctggaagacaggggttgcagtgagccgagatcgcaccactgttctccagcctgggcaacagagtgagactccarctcaaaaaaaaaaaaaaagaaaagaaaaaagaaaaacttgtttatggatctgggacatttatcattcacttagggaccagtagagccctcgaggtgagcagttagcatgaggtcaggaaaaacagaggcctacagacggtcactgggcctgcaggcttcttgtggggcagaacagggcccgcccaggccctcactctaaatccccgtgcccgacttcagctccaaaatcagaatctccacactagaaaagagagggcacatctgctccagcctcctaaaaataacaggttcaggcagggcagtggcacgtgcctgtagtcccagctactcaggaggatggcttgagcccagggattcaaggctgcagtgagctactattgtgcctgtgaatagccactgcaccccagctggggtggcacagtgaggccccatctctcaaattaaaaaaatcaaaatagtagcacagtgctgacgactcaggtggctttgctgagtgagtacctgccacctgcacacagtaagcctgtgttatctaactttattccaactaccaccctagctggctgtgtccattcggcatcatttcctgtcacacagagtcacactggtcacccacttccatcatcttagttgctggcagcagtgctccatacccacccccaagtcagccctccatctgttttcctgtaagtcaggcctggtaggctggttcctgcatcactgaggactgatcacgtcaaggaggcagaactgagcccctcagttctcgagctccacccagaagcctggtgtcccaggagccagcctggtcctgccaatccctgtcacatatggcaggttcctgacactctgggcctgatttccttcacctgtaagatagagacatcactacagaggtcattgggttgttggggataaaatgcatgtcataaccctaacagcctccacggatggcacatctgctgtgtgcctaccgtgggaaaagcctggggagggggagtgtgcaggtggtggtgacgccagcacatcttgaaaaacatgcagcagacaccagtttccttgttctcctctcagataaagttctgggaactggcctttcaatatcctcttcaaactgcccctggaagccaggacctgtgttctcagactttcttcctgacactgaagcttcttccccaaggcccagcagggagggctatggccaccacatagcagtgactctatcaggcacttagatgctaggagacaccactactaggtggtttttttcttcctcctgtttattggtattttccrtagtttttcattctataactttttttttcctttttttttttttttttttgagacggagtctcactctgtcgcccaggctggagtgcagtggcacaatctcggctcactgcaagctctgcctcccaggttcacgccattctcctgcctcarggctcccgagtagctgggcctacaggcgcccaycaccacgcccagctaattttttgtattttggtagagacggggtttcaccgtgttagccaggatggtcttgatctcctgacctcgtaatctgcccgccttggcctcccaaagtgctgggattacaggcgtgagccactgcgccagcccctcgcatgggccttgcctgagcctctcgcgtgactgctgctttccctgcccagcctctcagcartgccctgccaaaatggagacaggcgcctttgccccaacactcatctgctccttttgcacaatcccaacttatctagttaggactctgctctagaattctgtgtgtgtgtgtgtgtgtatgtgtgtgtgtgtgtgtgtgtgatggagtttcactcttgttgcccaggctggagtgcaatggcacaatctcggctcaccacaacctccgcctcccgggttcaagcgattctcctgcctcaacctcccaaatagctgggattacaggcacatgacaccacgcccagctaattttgtattttcagtagagacggggtttcttcatgttggtcaggctggtctcaaactccttacctccggtgatctgcctgcctcggcctcccaaagtgctgggattacaggtgtgagccactgcacccggctgctctggaattcttttaaggaaacttactaaacataacaacttagaatttattgactctgcccaccttttttcccattaaaaaaaagttaagactgggcacagtggctcatgcctgcagttccagcactttgggaggccaaggcaggcgaatcacctgaggttgggagttcaagaccagcctggccaacatggtgaaaccctgtctctactaaaaatacaaaattagccgggcatggtgacaaaaaaaaaagttaaggggctgagcacagtgactcacacctgtaatcccagcacttcgggaggccaaggcaggcagatcacttgagcccaggagttcaagaccagactggactacacgacaaaacctggtctctasaaaaaataccaaaaaattagccaggctggtggcacacacctatactcctagctactcaggaggctgaggcaggaaggtaacctgagaccaggaggtcaaggctgcagtgagccatgatcacaccactgcactccagcctgggcaacagactggagatcctatctaaaaaaaaaaaattagggtgacattttctcagatgctcactgaaagaatgttgaaggagtttcacctatttgttctrgcttttattagccttaattaccccgtgattatctttaacaattcctaaaagtcattgtgtttctgagtttttcagctctgacagtgttgcctgtttgtaagtgaagacctgcctgcaggcccctctccctgcacagcacttctcgtgggtttgccttcccttactgccttaccctgtgccttcttgttatgctttctgtgtggggctggccactgctttcctgtccccrttaacactgcagtacctatccctaagagaggctgcccttcctgccatctcccttactctgaggatgacttactcatcctttttcttttatttatttatttttttagtttttattattttagaaacaaggtcttgctctgtcgccgaggctggcgtgcagtgatgcaatcacagtccactataacctcaaactcctgagtctgagcgatccttccacctcagcctcccgagtcgctaggactacaggcgcacgtcaccacaccagctaattcctttttttttttttttttggcagagaggagggctcactaagttacccagactggtcttgacctcctggcctcaatcgatcctcccccctcagcctcccaaaatgctgagattactggcacaagctaccatgtctggccttacccatcctttttctgacgcttgttacctgaggaacttgtctgtcccaggtttcagttcaatcagtgccttggctttcccaactctattctcctgtgtctccgaggatggggggttcaaagctcatctgcccccacctctcctgcagtgagccccacagtasctcacacccaagcctcacaggaagaacagcagtgggtcccccactggctgtgcgcccccraccggctgtgcgccttggcctttccckggtccagaatctgacagcactcacacctctgacttccacacttgggcttctagccagtgtccaggcacaggatgagcaggactgaggagcgtgtctgtgtcctcttctggtgcaggtcaataagcatgcgttttctggagggagagacaccatcgaggagcacaggcagtttgkgggcaactgtgatgtggacgtgtctttcatgtacctgaccttcttcctcgaggacgaygacaagctcgagcagatcaggaaggtgagcagggaaccccaagggcccacagccgcctyctgccacccactcctgcccatggggcctggaaggctccaacagccaggcatgaaggcttggtcggaggtgctcaactgaaacaaggtgaaaactgagtagactcgccctcatggtttttaggcctgggctcagaagcctcatgaacaaatctcgaaagagcagatacaaatcactattcatttaggagccacccaaaacagtcttgctttattagtcatcagagaaatgtaagttaacgtgatcaaagctaagacagttgagtatagaattagtaggggcttttgtgttgccattgactattttcagtgattatgaagcagatgcttcaaggcacactcaagtgagcagagtgtttatcagcacagcctcaggaagcagtttggtactgggtacaaagagcccaaaaatgttcagagcttctcctcaggttttctcattcttagattttttccaaggaaataatcctgagtaagagaaagctttccacacraagatgttaaaaatgataatagcaaaaagttcaacacagactcagtacaacagaggaaacgttaaattagaattgttacagggtggattattatgcgggcatgaactattttaagtgttcatatgcagggcatggtggcacacatctgtagcccctgctacttgggaagctgagacaggaggatcccttgagcccaggagttcaaatccagcctgggcgacatagcaagaccctcatttctttcttttttttttttttttgagacagagtcctgctctgtcacccaggctggagtgcagtggcgcaatctcggctcactgcaagctctgcctcccgggttcacaccattctcctgcctcagcctcccgagtagctgggactacaggcacccgccaccatgcccggctaatttttttgtatttttagtagagacagggttttaccgtcttattcaagatggtctcgacctcccgacctcgtgatccacccgccttggcctcccaaagtgcttggattacagctgtgaccaccgcgtccagccaagaccctcatttcttttaaaaaaaaaaaagttttagtgacacaggaaaatatgcctatgatagtgaaaaaaggataccaaatgaaaactcagggaggagttaactatgtttaaatgaaatgcacagggaaagaaatgtgaagaaaatctaccaaatgttagcgggagacccacctctgggcatttttcaggtgggcaatttgtaggtgatttttctttactttgctgctgctttgtggtttgggtactttattaaatttgcttaatgagcatgcagtacaatcagaaaaagaaaaaattagcaagatttggctgggcgcagtggctcacgcctgtaatcctagcactttgggaggccgaggcaggtggggggagtggatcacgaggtcaggagatcgagaccagcctggccaatatggtgaaatcccatctctactaaaaatacaaaaattagccaggcgtggtggcaggcacctgtaatcccagctactcaggaggctgaggcaggagaatcacttgaacctgggaggcggaggttgcagtgagctgagatcatgccactgcactccaacctggcaacagagtgagactccatctcaaaaaaaaaaaaattagcaagattttacagaagccataaggctgccaggaattgttgttgtttagtgcctgggggaatggcccctagcatcggtaggggtggggactgccctccccattggccctttcactgtgagaggccaagtcatggctatcgtcagagccaggtttctagccgttttaggaaaagtgtagctgaaggtataggttattgttgtggtaacaacagatctcacttctgagtgccacccacgtgccaggctctgcatgggtggtgtgggctgagctggtrcccgaggcaggaaggagccrctcaggacatgtggagccatctctcacgtggctgtctcyctccgggcaggattacaccagcggagccatgctcaccggtgagctcaagaaggcactcatagaggttctgcagcccttgatcgcagagcaccaggcccggcgcaaggaggtcacggatgagatagtgaaagagttcatgactccccggaagctgtccttcgactttcagtagcactcgttttacatatgcttataaaagaagtgatgtatcagtaatgtatcaataatcccagcccagtcaaagcacsgccacctgtaggcttctgtctcatggtaattactgggcctggcctctgtaagcctgtgtatgttatcaatactgkttcttcctgtgagttccattatttctatctcttatgggcaaagcattgtgggtaattggtgctggctaacattgcatggtcggatagagaagtccagctgtgagtctctccccaaagcagccccacagtggagcctttggctggaagtccatgggccaccctgttcttgtccatggaggactccgagggttccaagtatactcttaagacccactctgtttaaaaatatatattctatgtatgcgtatatggaattgaaatgtcattattgtaacctagaaagtgctttgaaatattgatgtggggaggtttattgagcacaagatgtatttcagcccatgccccctcccaaaaagaaattgataagtaaaagcttcgttatacatttgactaagaaatcacccagctttaaagctgcttttaacaatgaagattgaacagagttcagcarttttgattaaattaagacttgggggtgaaactttccagtttactgaactccagaccatgcatgtagtccactccagaaatcatgctcgcttcccttggcacaccagtgttctcctgccaaatgaccctagaccctctgtcctgcagagtcagggtggcttttcccctgactgtgtccgatgccaaggagtcctggcctccgcagatgcttcattttgacccttggctgcagtggaagtcagcacagagcagtgccctggctgtgtccctggacgggtggacttagctagggagaaagtcgaggcagcagccctcgaggccctcacagatgtytaggcaggcctcatttcatcacgcagcatgtgcaggcctggaagagcaaagccaaatytcaggsaagtccttggttgatgtatytgggtctcctytggagcactctgccctcctgtcacccagtagagtaaataaacttccttggctcctgctcttgtcattgtgctctgtctgggaggtctgaggagggagcagagacccctcccctcacccttctgtggatgaccttgagtctgctggagtcaaaatttggggatgaaagcgcacagtcccaggaaccccatggtgttgtgccacagctcccaggaatgggcttgtgctgggagagcccttagcagcatcctggtgcgggctccctctcacaccacatttctcatttccagcagctgatggagaatgcaagcagaggttgtcctcgcttttcagaggaggggctggccgtggggtgcttagtggtgctgtgtagtgacggggagcacaggctgggagccaggtcgggccccattcacatgaggcccagggcagaggccgagctgcaagggagccctgggctcattctaccggcccatccttattttgcaagtagggaaactgaggcttaggagaggagaacatgacttgtccaaggccatagggtgactctgatacagcgagtctgtcctgactcttggtgctttccacacacatacagagggaccattttacaaatgagggaactacggttcccaccctggaggctggaggcctgggctcgagtcccactcaggtacccgggtgcaccatgacctcaagtaggcttcctctcccggtctcgactcctgctggcctgggccccacccctgccctcccctgctcacctggctggctatggccagtgggggtgagccacccacagaggccacatagctcactagcctgttgccttgggcaactaatatgactcctcgtcgctctactgcacctgtgacgcaagtgcaatgaggggtgacaaatggagtcagtgacagctgctgctgtcattgtccacccagccacagcatctattggcagggccctggtgagaccctggccccagggaggagtgagccaacaccaaccagcttctcccctcaccggctgtgtgactctggccaggtcacttaacctcccaggacctccatctcctcccctgtaaaaagcagtgatgcctcctgtttagggtcttaggaggggtgccctgggtccaatactcaggtgacttgcccaaggccactgctggtcaggacacaggggagccacatgtctcccaagcctccccagttttgctaaaaaccagtggtttctgagagaaatgttccctgaaagacatgggcgtgtctggattaggatggacaggttgcagtggccccatgagtgtttggggatgaggcatgaggccgggtgcctgcaccaccgtggtgccagaggctctgccggaagagcactcctgctctggctggtaatgtccacttgtcagacagatgtggggccaacccagctcagtctctctgtcccgtggcccccagcctggaggagagaccagctgagcctgcctgaaaggagatggtgcctgagaagcacacaaaacagcactgggtggggaagcagggacaggaaggagggtggctgagcacacgggtggctgtggaacagctcgttgctccaggacggcacttggcaagcaacaggcctgcctctggcccccagtgcccgcctgcagcaccagcagatgtgccctccccagggtcacactggctgggccttgaggcccaggactctctggtcattaccatagaggttgtaaagacagtgaggacagccagacgcggtggcttacacctgtaatcccaggctgaggcgggcagatcacgaggtcaggagatcgagaccatcctggctaacacggtaaaaccccatctctactaaaaatacaaaaagaaattagccaggcgtggtggtgggcacccgtagtcccagctactcgggaggctgagacaggagaatggcgtgaacacaggagacggagcttgcagtgagccaagccgagatcgcgccactgcactccagcctgggcgacagagcgagactccgtctcaaaaaaaaaaaaaaaacagtgaggacagaggcctttcctgcaaaccccctccccagtgacacgcagagccagctgctcagtgacacgggctcagggagagccaaaggcccccacctcccagagtgcagccactgccagagccgggccaggagtgctgccaggaaccctcctgccaaggccgaacaggtggggtcttctcgacaaaaacggtcccggggtcagtgtttgatgagccatggaaacctgtcagcgcctgccctttcccggcattcggccacaacatctcagcctctgcaactcctaagctggacacacttcctggaatctactgcaggacttattcattcattcattcattcattcactcgctcattcatcccacaccccctactatgcagcagccctggagctagatggagtccttgcacagcccgcaggctcttgtggccggggagaggcagatgagtgaccacacacccaaccaggtccccaagggagcagagcaagagatgcttgggagcagcccagtggtcaggcaaggagagcttcctggaggaggtggcgcctggggtgtggagccagccaggcagagcagtaggagggtattcctggcagagggcacagggcataaggtcaggtgcccacagcaccacacatatggggactggcgtaacaagaggggttccaccccttactctgggagcagaagaattttgttcggcagaacacaggacagcgttcagtccacagacacagtcaaggtcagtgtccatgagtgaatatagtcaatgcaggtggcctctggccctgccagagggctgctgtggtggagacccggtggcttcacgctggacctgccagccctagcccctgatagcccccatcattggaagccacatgatgccaggagggggggtgctggagcctcagaagcactggctgcagtccacccacccctccctgawgcgtgacggcaggcaaggccccctccctcttggagctgtcaggtggctgtggtgagctgtgcaaggcacctggcgccctcccacgggcagccccctctggaaggggagctcacattcagggcaggtgggagggcctggctggaaccagctttcgctcagaaagcgggtgggtttgggatagggtggtgaggacagtaagtaccctgctaaacagccccctgcggcaggactcagcaccataggctaggccccacagcccagaaggccgagagagtggagcccgccagagtgccaggcggggtttcagtgtggccatctgcacagtgggagcaccagcagctcaggtttcgagggctcatccagcaggaagggagcaggacagggccacagccccacacctcccaggacgggtgggcaggcctcacagggtgcaaagctgctgggggcagggaacagtcagcccacggccatggagccacagccctgaacatcctcagaaacattttattgacaacagttcccaacagagtctttggggtctttaagtggcaggtgcagcgtccacaggcagagtgagggctcctgaggaacctcaccccaaattccctaaccggccgaggacggccaccccaggcccctctcaggtgggcatggcagtcccggcagcaccccctctgagcagcctgctgtggggaagaagccgggccggragccctcagtcrtggtgccagcccagctcatgctccccgccccgaggcccccagcctgtgggaagcccctgcctgtaagggacagctcgtgaagacacaggaacagtggtgggggtgagggtctaggaatggggcagagggtggctgagcacacacctgactccctggaggggtgcttcaaagacatgggaggcgagggccatggggaggctgggatgaacaaccgactccatgcaactcaacgctctcatcaaagaggcccactcctccctggctcctgccaccctaggccaaccctggctgatggctggcgggcccctcgacctgaggtcagtagctgggcagggcgagctcaggcctcggccgacaacactgcagggaggctcctcattctcctgggcaatggccctgtggggtcccgaacccagccacactaccccttgcctcctccagccactacgacctccagcagctgctggtgggtgggccgctgggcgtggggaccggctatgtgagcagaccccgggcgagcctcagcactgcctcataggcracgaagaccaccatgttgacagggaaggcgcggcagcaattgagtaccagccccttgaaaaggacccggggtccctcctctcgaacgctggtcaccatacagtgcaggagaccccggtagcgcctctggccctgcccgtctgcctgcagtctcgacttgatcacgtccatgggggtggccacagcccaggccaggactcctgcacagcccccggccaccagcacgcccgggacatctgcagagagaccacagtgccttgactgggagcctgatcggggcgcccagggcagcgcaccctggactcacrcttccggcccgtcctcatttgcaacaggcttgggagaggggaatgggacttgtccacaaccacacactgactctgtgacacagcaagtctgtcctgactcttggtgttgggagaactgaggagcccactctgggaggcaggaggccaagttcaagcccccactcgggtactggcgggcagcacgacctcaccttgacctcctcatccttctgggctccccgccctgccaggttccagcccctgctcacctggccggctgtggccagcrgggctgagccactcgcagaggacsgcgtaggaaaggaagtaggtggcaaaggagtggccgtcccgtaagaccagggccgagctgcccttgtagaggccgcacagcccctcctcacgggctaccgtggccaggcagtgcagtggccygcggtacttgggctctgggcaggctgggggcacaggacacatggggggcacagccaacggcccygaggccgaaagcmgccgctgctgcttctgcgcctgtgtctgcgtctgcaagcggactttggccacctcagtgggcgacgtcaggaacacctggagcagagaaggaagcaggggtcagccacctgtggctctgcccacagcctggacctggcctcccaccagcctcatgttgctcacggtgacctcaggaggttgggccccgagaccctgcaggctggcccagggctggggggccacggggcccaaagccagctccgcccacccaatgccaaagcccatgcttcctcggcagccacatctctcccaggccagcctgccaggcttctcctgggacgtgtaagataatttccatgacccaggttcaagaacgtatttagtaacatatcagcaataaaataataccatggccaggcgcagcggctcacgcctgtaatcccagcactttgggaggtcaaggcaggcggatcacgagatcaggagtttgagaccagcctggccaatatgggtgaaaccccatctctactaaaaatacaaaaattagccgggcttggtggcgcgtgcctgtagtcccagctactcaggaggctgaggcaggagaattgcttgaacctgggacgtagaggttgtagtgagcggagatggtgccactaaacactggcctgggtaaccgagcaagactctgtctcaaaaaaaaaaaaaaaaaatcactagacatactggctgccactttgtgggtactcattcatgtcggactccacatatgtgtgctgggggctttaccctcatgatttcactaaattctcatcatgcctcttacagatggagagacagaagctccaagagtctcccttgcttgcccaaggttgctcagctcatgagggtcagagctgagagctgggcctggtggtctggacccctgggccaggccttcagctgctgggctgctccagctggctccgtgctgtcaccaagtgcgaaagtctgtctcccctgcgggagcaagggctccctgagggcaggcgggc

SEQ ID NO: 95236 - DNA, 52826 bp, Homo sapiens
cttataactttgcatccttcagtaacacagttggacccagcctcctggggttgagaaactggcgctgacagcatatcgtaatgataaaacatgattgctcagtttagtgaaggggaaaatgttaacagtctttgatgtagcaacacataataataacaggccatccgccacagaggagggcattgttggagacccaaggccagtgaatgttttgtgtgtgttattttcataaagaaaataagtttacatccatggtccacacacttgggctgaggcaaaatcctcttctgagaaagagcagcagatgtttgtggggttacaaataggggagcagtgaaggggaagaaaaaactgaaagggatctgcttgcctaaatgaagacagggagcatattaattcccctaaccagccagtcacctctgtgtgatcagtagaggccagagtgaaccttgaaaagaggtctgagatcaatcatgctttggccatgccatccagtgaaattgctttacaggaaaaaaaaaaaaaaaaagagagagaaacaggattaaaaaacaaaacagaggatgggcgtggtggctcacgcctgtaatcccagcactttgggaggccgaggtgggtggatcatggggtcaggagttcaagactagcctgaccaacatggtgaaaccccgtctctactaaaaatacaaaagttagctaggcgtgatggtgcatgccttctagtcccagctactcaggaggctaaggcagaattgcttgatctcaggaggcgtgggttgcagtgagccaagatcatgccactgcactccagcctgggcggcagagtaagactccatctcaaaaacaaaaaaacaaaaaacaaacaaacaaaaaaaccagaaccaccacaacaaaaaaatcccaaccaggatcctttctttaactgaaattttactttggaagcccatgaataagacatatatctatccatagctatatctgcatctgtcaagtgtgaaggtgtggaggacaagattgtggtcacagaggctccaccagttcacccctgctcccatttctattgcctcccacttgcactgatgtcttttaccctttgtatataaagttttcaagatccaatgtgtattttaatcttatggcacatcttaattcagactagccacacttcgagtggccgacacatgtgtcaaatgaccaccacactggaaaatacagatatagagccttaaatggctcagagccttttcctgagtcacaagcacacctgcccatgaattttgtaggaaagaactgcaggcctcttgtgtccaaactcatagatagtgggacaagcacatggccctgcctctgtttccatcattacagtagccactgtcttagtccagttgtgccgctataacaaaatacctgagactggggaagttgtaaggaacagaaatttattgctcacatgagttctggaggctgggaagtccaagatcaaggtgccatctgcaggttcactgcctggtgagggtccaatctctgatttcaagatagcaccttgttgctgtgtccccacaggggaatggaagaaaactaactcactccctgaagcccttttgtaatggccctaatcccttccatgaggcctctgccctcatgacttaaccacctccaaaaggcctcatctcttaatagtgtcacactggtgattaagtttcaacatgtattttgggggaacattcaaaccatagcagctccttccttcagggaacacttcttatcagcccttccctaggcctggagagtgttgctggatgttttgccaggctggtctcaatgacctcaaacacttaccatgccactttcctattcctcagcttattccccactccttctggtataatatcatctttatcctggatgatttttaagttttctccaagccattctctgccttaattctagtacctccagaaatctatcttgaccttgaggattattttgaaggccccaccttctgccattaccccacacacttaaccatttaagtgcacaaaaaagaagtaatttaattaatacatttgctaaatactatccatattatatcttatatgttggcctaagttattgtcatcttttgactttaatacatagtacttcagctgaaacagtcaatatttttcttatgatgtttgtgggaacaaagatatgctcaatacaatcatgttacaacatccagactgaatgaagatgcttcactctttctttgggactgaaactaacattaacgctctgctgctggttattgatatacagatcagatttgtagccattggctgactagcattacgaatttaagtctcagggcattatatttcagtgtagtattttcacatttatcgctcaaaaacaggaataaaatcacttcttcttgtccaaaagatgttctgaagagtagtgaatggaaaaaaattccatctataatctgatttttttcaccagtcttatgacttgaatataaacttagagatgcctaacttaaaaaataactacaactttgcttatattcataatctggtaattattccacatttcaggcttgatatatgataaggaattttgccatctttcccaatgtttcagcctggatggcttagattcttagtcaactaaattataataatctactactttgaaactataataaaacaatcatctcattacaagagttacatttcttcttgaaattacttttccattttgggccttgtgggaaaagctgttaagaactcttctgcaattgtataaatctatactttgggcttagatgttgaggcattagaaatgaattcatcatttatagatcatatatacctttaaagataggcaccttatttcctaaagcaagtaaattaatttttttttccactgaatgccttttatcagcaggggatcttttttcccccctgagcgcttgaatgagttccctttttcttctgagttggggtattaccattctatggataaatgaagacagagactggatgaacagatataacagatagagtcagaatcagaacttagaactctcaaactctgagttaatgaaaaattttcccataattgtctatgtttagggaaaggtaagctttcagccttccagctccagatagatcaagggtagaacctctgggaagttcttttctgatttgtatagaaattacccagaacccaagtttcctgaccataacctgttgatcttcaaacatttaagaaccaaatggtgtgccctaagcactctgctattatcaggagggtgaattgacgtgtgtgttggtgtgtggatggagagaggtgtaaaccaaaaataaaattctaagcaccccccacgccccaccccctgcccaccccgccttcccaggcaaccctctgaacggactaatttgtcaaccagggctcttgtaaaatttatcctgaaagactggttcaggccatgaagggatgtgagggtgggacgtgccccattcattatatatcaaccaacggactaatttctcaacccaggctcctgtaaaatttatcctgaaagactggttcaggccatgaggggaagtgagggtgggatgagccctgttatatatcaacatggagttcaagtctgataagaaacattttacaacctattctctctgaacctgctgcctggagacttcatctgcataataaaactttggtccccacaagctcttatcttaacccatacgttcctttctttgatctcaggtctttagacaaactcaaccaattgtcaaccagaaaatgtttaaatttacctatagcctgaaagcccacccgctccttagagttgtccagcctttttggaccaaaccaatgtatttcttaaatgtatttgattgatgtctcatgcctccctaaaatgtataaaaccaagctggaccccaaccaccttgggcacgtgctcaggacctcctgagggctgtgtcacaggccatggtcactcatatttggctcagaataaatctcttcaaatattttacagagtttgactattttcgtcaacagacgttacacaaaatcctctcctatgtaagactatcggatgtgtacgtgatgcccgtcgtaacactggtgtgaaaagctggactggggggtatgtgcctgcatgtaagtggaggtgcccaaggggatttctcttcacagctcattgagcatagctgacttgctagctatggtctgacacctcctgatttcagatctgccctgaaaacaattacatgaatatgcccctgctactcagtatactactaggcttggagtctgaagtagacctccaaaccccatccaatcaggtaagggagaaaaacgatagcccaacattccctagtgctcataatgtattattccattatttcactttttatcccttctctcacagataagaaaagaaaaagctctacttctttagggttcttggacgtagactctccacagttcatctggggttgttcatctccacttctttttgtatcccagggcaactttcctgcagtttccctaatgagaatattttccggactaggcaaggggcggcttgccccgccccctactcttctccctgatcaggagctgcggccagctacctggcgccggccaaagtcaggggagcggggagaggcggcgtcacctcctccacgctcctccggccccattcaatctagctatttgcactcggctctggctcttttccgccagctgcggctgttccagaagcgccgggctgccggtcctggcctcggcaggggccgtgcgggaccgaggggtggcggccgaggcatgtggggcgggtgggttgcgcgctgctggcacggcgcggggacccagcgcgccaggcgggaaaggggggcggcggcgggcggggacccagacccggaggggcagcgggcgcgtagcgggccccaggacgcccggccaggggattggcctctgcaccgctgctcagggcgcgtcccttgccgcctctggcgtcgactcaagcctcctcctccgagcagccctcagtggcgccgccttagtgctctgggtcgagccccgggagggttagcctggggacggcaggggcgtgaccggggcgcggaagtaggtgagcagcagggcggcgcgcggcggtcaggccgggacagccagaggggcagcgacatctggcgggcgggcgcttcccgggcggagcagggccctccggaggacgcaggccgcgtcgaggctgaagggcctccctgtccgggacggtcagctgccaagttcgggcccttagcgcgtggccccgggccgcggctcggagcggaagcgtcgcccctggctgcgcgctcatgctggtcctagcgcagaagacccggcgaggtccgcgaattttggcttagcgtttgtcaagtcacctcgagcgactcggagagaayccggctttcccactagggacggtgatcgcagtctctttcctttagaaagttactccgatacttttgatcatctgtccatagtaaggaggaaaaatagcgtggtttgtccccgggtgagggagtgttggaggatcccgtccagtgggaagagccagttttagcggagcagcgcgtccagcccgctgacacttcagcctggtaaagggttaactgcatcctgccggttcggtttacatgtaaatagagagcagctgctccgcgcggccccggctggctcttttaagtttttgattggttgccaatgacatcaccgcccgtgttttaacaccgaggacccagagcagcttcggataaaccctccttaaagagatgaggccacgccttcttacccgccccctaggctgcccattggtcgcggggctctgtgaggtagcggtcggctttctccggattcttattggcccaacccgccgtcggtcggcggcgagtccgccccctcagaaccttacatttacagtgtagcaaaagagaaagtaactatgttgctgctggagatcaatgaagccgagtgaatgggggctgaatgtgcgagtccatagctgaagaggagcgccagatggtggaggaatacacttatttatgaagtaagtggaagtcaccgcgactactcctgagagcccgggactggaggtggaggattgtaaggcggtgcttgtgtgagtgtgagtgtgtgtgtttgtgtgtgtgtatctgtgtgtgtgagagagagagacagagacagaaagatagagatgcgatgctgacggaggagctacagcaggtagggttataaggttccggccgttggctcctgctaccctgtgcgtttactccctgcagtctacttggatttggggcgaagaaaaaatgaggtttgttgggatgctttgcggcagttttaaatgctcggggctcattagtgcgctgtgtgccgaggagtgaagcggggggcggggggatgttaagtgctccaggaatggggaagaagcattctctaaccacttaattttctctccagctcttgcctagtggtggaagggagaggggatagctcagtatttctctgggagattttctgggccagactggatggtttcacgggcagtatgtacgcccgaccctctgctgcagggatgcaggtctctctatacactccgtgtgtgtgtgtgtgagccttgaactctgtgtggaggtgggggtcccagcgcgtgtctctgtgaacacgcttatgcgtccctctcagaagaaatggtatgttgatcctggacgtgtcctaccaggtaacacawtagcaaagactttcaccgcttggtccaaccgggaaacagttatagcttctggaatagaactcgctcttcagaaaaaatactacgcaagggaaggggggttgactccttcgctcccatmcaaaggtgggtgagagaaacccgagtcgttggagatctgccgacgtgatgggtgcgtgccccrtgtgcgcgcgtgagtgtggattccgcctgtgacactttggttctrtgtcagagaatggtgacggtcgtgtgtagacggatgagaatggtgacggtcgtgtgtagacggatgatagatggcatttttcctgatagctcttaaagttcgtttaggtgagcgtctcttggcgtggggtttggcgtctttgctatgtgcatgtctaatagaagaagaagagttagcaagcctgagttgtagagtgcccctgtgcctacaggaggaaggagctgtctttttgcagacactctgaaatcagagatagatccggtgggcaacaattcactgtccctttcaacgagtacaggctaattgggaggtcctctttacggaatsagtactcttgaaggggggatatctgtatgggattgaaaccttatacaacgtggctgcctcccattgagagaagctctaggatgcacagtctgtgccagccagggagatgaagaggggaggagagcccaagttgtcctttccaggcaggaatgagggcgggggcaggtgagagagcaaagggtgagggatttgccggggctggggtttccaggtttccagatctggctccatggcttgagatttcgttttaggacaccagttagtagtgaaaaggggaaatgcagattaatttataagaggccaaaagacaacatgtgaggttttagtatgactatgttgtgcttttcaaaggaccccaatagagaatggaaggcaagaatagctccaagttaaagagattcacttaaggggatttgcagaaagttgacatccaccctgatgtatatttagctgctgtacctttctgtgaaccatgccagtgctcttggttacccctttgcctttgcagcgagtgagggaattaaatggcaagcatgcaagggtggacaaatgggtctttctcagatgtttgcagtgtacttctgcccgagagctgaggttcagaatagatgcctcttaagagcctcccttctgtcttcagcttttctaattatttgtgcttataccttctctacagctgaacttttatgtaggtccaggaaaggttgttcattaacatttacaacattacatccaaatttaaccttagacttagcaaccaaattgattggagccctcaggtttgcatcctctttgaatacataaaaatgaatttcaagttttgataatggtatgataaagggcaattaggacgactttgctcagagggatgcaaaggtctttcccagggattggatgagactgccttttgtgtcacgtgactttattctttctttcccccttccccttctttacagactgtcttgagttcttcttgaattgccagttttcagcctcctcatgcctccgtctcctttagacgacagggtagtagtggcactatctaggcccgtccgacctcaggatctcaacctttgtttagactctagttaccttggctctgccaacccaggcagtaacagccaccctcctgtcatcgccaccaccgttgtgtccctcaaggctgcgaatctgacgtatatgccctcatccagcggctctgcccgctcgctgaattgtggatgcagcagtgccagctgctgcactgtggcaacctacgacaaggacaatcaggcccaracccaagccattgccgctggcaccaccaccactgccatcggaacctctaccacctgccctgctaaccagatggtcaacaataatgagaatacaggctctctaagtccatcaagtggggtgggcagccctgtgtcagggacccccaagcagctagccagcatcaaaataatctaccccaatgacttggcaaagaagatgaccaaatgcagcaagagtcacctgccgagtcagggccctgtcatcattgactgcaggcccttcatggagtacaacaagagtcacatccaaggagctgtccacattaactgtgccgataagatcagccggcggagactgcagcagggcaagatcactgtcctagacttgatttcctgtagggaaggcaaggactctttcaagaggatcttttccaaagaaattatagtttatgatgagaataccaatgarccaagccgagtgatgccctcccagccmcttcacatagtcctcgagtccctgaagagagaaggcaaagaacctctggtgttgaaaggtaatgcccctgctcccttcccaagcacggtccygattagccgggttcactttgggttttctcgtagagtgacagcattctccttaccctggctaccaaagaccaaaatagactttattcttctcttcccttctatgctctttattgttttggtttagtaagaaaaacccagcagcactgaactggaagccagaagatctgggttctacccttcatttgggttctaatttgcattgtgcaagtcatttcacctctctgrgactgttttctcatctttctaaaaaggggctttatacacaccagatggtatctcaagtcatgcctggtctgctagctctattccaatcaatcactagttggaaagttattgtctctcagacttaaccaatgttgatggaacagaggaaggagcaactatggtgaactacaagtaaacctacaggtaccagttcttactgtgggaaattctttctctttctcacctttctgaccagcttgacttttatgtggtttataaagtgaccttgaagaagggcagagcttcttattctaaggccccatataaagtataagttcaccaattacatccattcctctgccaaggctccaagggaacagagacgtttttatgaaacactccccaacccattgttttttctggcctcacctgacaacggttggcatcatggctcctcccaagatggagtaatgggtcacttgccccagtatactgaatgcagaataactgagattagcagaactgagctctggcagaaggaattattcaccactcttctcggagcaccttccataccgtgttgcctaacctttccaagtagcctgcatcctgtgcccagcctagttgcacctctttgccctcagatactgacttttggggcactgtacatcactctcattcggcatcttttacctggtggtggtagtgagagatagtcgtcttctctcttctctcctcttgtgttctgagccaaggtacgcagtttctgggtcacatctccaaccagtctcctaaagtgtgttgaccaaaggtgttgctgagtttgaacacattgcatatttaaattgcaataggacatgtgggtgagcaagttagttattttgtctctatgggacagctttgccattctccttcttgtcttcccagtggggcattctgccttttgttaagcagtgttctgggaattatagttctgaattccactgacacaatctcctcttcccaccctccgctctcctcaaacttgccctcatggggctacactaccacaaaggcacatctctccttagggctggtgggctttgctgggaaggagaacatgaaagaattgtatgtagagagttccagaagcttctagacatttcctggtcgtggtggttgtggtgggttttcttgaggtcacaaatatgttcagatttcctccatatagctctgtattttattgtttctgtattcttgtatggttgactttgagtgattcccaggatatttaccctgctattgtcttaccataatcttgatgtgtctagcctcttacaaatgagaaaatcctaccgaggaatttcccatttgtaatagtttgtcttggggagcaaagaggaggatagccaatgatcatgatgatctcctcttttctcacgcagagcaggtgttcatgataaaaagcaagtcttttgtgtcttcatgatctgaagagaggaaacaacacggatcaagatgatcctagacctcctaatcatggggatgattacaaggagttgcagaccctactctctattttgcagtgggtggagttgtggataggggtgacccatcagtcattgagaaatgaatctcctgggtgctacttgtgaaagtgaggatcctctctccctttcctgtggatgcagctgagattctggacagcctagacttcttcctcagtgtcagagtaagattgcctcaatggggcggggcaggacacactgcygacctcaccactgggcgccctgggcagccactgcgaggcctcgtcattttcgagttggtgagacaccgcggcagtcgacttggaagatgctctggtggtagaggttagattatttgtagttttgggggccttttcttcaaatatctgggaatttcattgaaaatatgtagttcaggagtgaaggggtctatattctactttataattatcattatcattttggtatcttttgggagaatggcctaaaattgggaccaagatggaaaagaagggaaaggaatgggtcaatattagaatgcccttcgttatcctttcaacttggtaaaccagagattaataccatagcaccactgtggtgaaagacggggtgggcattccccaaaggcatgaccagcagacttctctcagattcttgagtgggtcaagcagaccattctggtctggcttctcctctcagatttatttgagtaatcccctcccttggtgataagattgtgtttcagcaagagtggtagtggtaccatttcggaaggagtaatttttgcagggaagttggtgggaggggggcatagttagaacataaggaggaaacttctaaaggcttgttagtttattttcagagatttcagtacaatcttgggtaatttatggctggcccatctgatgctctggtttatgtttgtaaacactggttgctaccctccctgtccaagatccttgtccccctgtctccatgccatactctccatttttggtgctgtctgtcaagtagagcggctgctaacttgccattttagtaatgctgtgtcaggttgggaagaaaccgatcagaggcatggcagcccctgggattaagttactgttctaatttacagtgccctccctgttgtgacctatgctagaatctatgttttagtctcatcttctaaagaataaatggcatcagacctgtgcttctcttcaacctggtgaaaatgatccaaatgaataaatatttagggatttgtgaggtctttgaaagaattatattgttttactcaaagctgatttttaatcaactaaaacttgctttctagtcaaactgagtaagaaagytgaacaattctagaccatccataacgagagctaccgtttttgctataaagtttttcaggctccctttcttttcagtaaagctgggtccagggaaataatttgtcatttacttaggtaggaagaaatagtctactgcccctttttcttaaagacagtatatgccttcaaaaatgttattataaacattttcaagcatatagaaaagcagaaaagtgtgtaatgaacatccatacacctatcaaccagattaaacaattatatttttcctatttgctttctcttttctgttgaaatatttaaaaatatagataatgttttaatgtatttaagtatgtttaatgtgtaaattaatgtttcaaattcaataaagctggaaatattttatagtatactatgaacattttcactcgtaaacacttgagtgtcatgtacccatttttaagtgcttttcaacttcgaatccctctgtgactgactggcagtcaggtctacagaggagcttccctccctgggagtaggagggctccaggtgcctccttggggtctgtgtgtcccccttcctccctggtatgtcagagcccatgcctctacttgctctatgctgttgtaaaacaaggaatgaccaactgctacaatctttataggactgctctgtaccaaaggcctttactgggggaatgtgagaagaagagggaaatggtttaaaaggatgatccatggggaggatttgatcatgcaggcagttaggcctttatactataaaacttcatcactccttagaattgagcaccatacattgcacacttttccctagttgaaaagaattctgaaatatactcttattggcaakagagttctatgacaaagtggatggctaggctcagaaatcagagacctgtgaaaaatattctgtttctgcccttttttcgggggtggggtggggaagggaataaaagtctccccttttctctcagagatgttatgaggattttaaaaaatacctgaaataaagacatatctacattcataaacgtgctgttgttattctgagcctctggttaacatccaaggctaaaatgtcaaacattagccttgtagcaaatgatggagaaatcaaggcagaacttcggatctagtcagcctgaatgctagccttggctcccctctaactaggtatgtgcccttggggaaggaactgaatccttcagttccttagttacctcattaacaaaaagaggatataacaatagctatctcaaagtgttagtttctgaaataaatgaattaatgtgtgtaaagtgttcagaactttatacacatacatggtaagcactccataaatatggtagaatgtttttattgatattgattgaaaggaaatgatagtgccagtacaaaggcaaattttgttcctaaggagtacaaataacaagctaggtatagtagagtgtgtgtgttgctatggcctaaaaataacttggtgactgttaactaatttaagttgcatagagttggagtgccaagtaattgcaaaaacatattgggccaggaggctggagtaatttgggtatatccagaattatttgttttagggaaatttgtaaaaacatgataataattctgtccaaataatgtcccataacaaaagcataaaactttttagctttgctttttgttgcctctcatcatctcatcaggaggatttatttttggaataaggattgtggactgactataaaagggtagatggaaggaggggtgcgctggttcctgagcctagggttgtgttgagttagaatgtgaaggaaaaaggagggaaggagttgaatggcctgctcctgtctttcaggaagtcctgaaacttctttctgaactgctgcacagttagttggctgtcctctctctgagcttttgggtacactctcctgcttcctaatttaagtgtaggtgaacagataatagaaatgaactctctctcccagccatgttcttgctttatctgttcctcattcacgatgtgctcagcagagtgaaattttgctcacttacacctgggttcaaatctaggcatttccattgaccaactgtatgcctttaggcaaatcagggggcctctcagaggccaggttttcttcattgtaaaacagggacagctccagcatcctaggttgaaacaaggtgatacaaagtacctggcatttgatggctgtcaataaatcaagcctctggaccctgctctcctactctcatgcactaatgtaagaacctcttacattgcaggggcaggggtattggggaggatgggcaagtcgttctaagcacagtactgtgggagcctgttaagtatgaatactcttgcccttaccaattcagaacagttaattaacttaatcatccagcttgtcatggacaagttcaagaaactcctctcctggcaataggagacatgatttcacattagaaaagcaaagcaggggaaggaaactgaataggtaaagcactttgyctatttctgttttcaaagcacgtgtgtataggagaaaggagaagggagaatggtgaatatgtacacttttctacttggtcctttrggcaaacccatctgaaggtctgacaaaattacaggagcagaaaaactttccgtcacatactcctggtgcatacaccctcagggactaagtgggagcttttgaccagtagcaaaaatctagttccttaaaccctgcattatcagaagccagaacctccaagccccagcattgctgaagagcagtttgggcatgaatgtgtgatatatcggagtgcttaggcagtttaatccaagttggttgaaaaagatagactacatattaaggagagaaattctagttccaggagaggtcatctcacctttttggaactaaagaatcccagctttgagaagagcaaggaactttagagggcccctaatccagtagttttcactgcaggctgttcattggtatcacctgaaggtgatttataacctatgatgcccagttcgtgtgtccagaaagcctgattaaattggtctggggtgcagcctgcacatcaagatttttttaaagctcccaaagtgattctaacaggcagcaaagtttgagaaccattgatctagtccggtattctcattatgccactacaggaatggggcttgtccaaggtcacatgcatgattaattttagagatttagtccttaatgttaaagtaggtcttgccaggttcaacagattcaatagatatcaacagactgaggtattcgtatgtatcattatttaataacaacagaatctaatatatagcataaaatataagattttttgagtactgatgccttttttcttgaattttgagatttcagttcagaactaaaaagaccaaagtctgaggactttcaaaaccagcagttcatggtctatatatttacctggatattagaatatggaccaaatattaatgttgatttaatctcttcatctggggaacctagtggtttaagctgttaacctagtggtttcagctgttaacagctatcaaaacaggtatcaaagaagcccaaccatcttaggcttctagggactttttggtaggtggtctccacagctgtacaaacttgtgggcagaggagattcatttgtttgttcaataaatattgttgaatgcctttggtgtgctaggcactaatctgcaggctgggcaatctgcatcacaatgcttatcattcaaatgcaagaaagacaacatatatggatgggaccagtcttccagatcctttccatcttggaaattgtgttcatgtttctattcttcatcttcttctgccacacaatcttatttagggagtgtttcatcttcacgaaattttgttctcctgtgaagcacatgtttgtactttttttttctttttcttttttaagaaatagccagccgggtgtggtggctcatgcctgtaatcccagcactttgggaggccgaggcagatggatcatgaggtcaagagattgagaccatcctggccaacatggtgaaaccccgtctctactaaaaatacaaaaattagctgggcatggtggtgcacacctgtagtcccagctactcgggaggctgaggcaggagaattgcttgaacccgggaggtggaggttggagtgagccgagatcccgccactgcactccagcctggcgacagtgagactctgtcgcaaaaaaagaaaaaaaaaaaaaaaaaaaargaaatagcctagccttttctaaatatgtcatgggccaataggatttctttccaatgtcttgatctgaaaagaaatgattcattggtttttaatgaaaaaataaatatatatgccctctgtgcctcaaaagctcagggctgacaagtctcctctgtgtgggagagtgaaactttgtaatttggaccccctaattttgtacatgttgatgataggaataagggcttcgtttattttcactgcatgctctctatggaaagaggatgtgctaagcaaacaagcattgtaaacaatatttcagaggcaaggttttggcctgctttaaaaaaawaaaatgtttgcaagtacaattaaaaaccagtataagggacaggggtgggatgaaaacctgtctctaagattacgaagcctgcgttatttcccctaaatccccttcgaggaagatttgaatccctcatcaacaaattttcattgattatgtttctattatatatactgtagactctatattcacgaatgtaatcatactcattcagaaaaatataggaagagaaaatgagtatgacctgtagcctgaatttcattataaaagatttaaaaatatayattttatattaaaattgatgtaatcttttaattatgaagtctttgattctttagatgttttcatccataacccaagagcaagatcttggcatcagttttttccaggttatgtctatatcatctattattacttaaaagttggagttacatatagatatatagatatatagagagttatagatatatgtaattttttttcattccagtcccccacccgagcaagacccatattttatgtaacttaaaagtaaagaaaagaaactttgagcgtatgtttttggataaggaaatgagctgtgcaggcctagtactttcatataagataaaggctcttacctattctctgaatctggcaaagtagagaatcacttacagaaagaaaaggatttgtggatgcatcaaattatctgcattgcccttaatgttttatgtgtggtaaaggcctactcaggccaccgcccccaaccctggcccccgacttgaatttcatagaacacaaaacaaagcgcaactcttcctgagtgcttccacaacgggattttgctttcttgccttaccacttcagaatggaccaccatcaggcatctgttgtccattgcacacatcaagtaaacagattaaactgcccgagccagggggtcgcatcaggcctgtcctccctttgaggagcttaaacctctcgtgttataatgcgaactcgactgatcttattttgtgtcctgaggtaaggaggcagtcaccgttttgcatcagaacatcactatccggttccttaatatcttatatttattttatggaagaaataatctcacattctttgtatcacagccctgagcttcactaccattgagctaaatattaccagctgttgctactggcaagagagaagcaaaaaacaaattgaaaggagaaagaggaggggtgggggagtggacagaaaagaataacatgagggttgagggtcttagggtgacagcaacatatcttctagctcccagacctgagttctgggctccagtattgaagactgtgagtcattttcttcaatcattacagtgtttcttcctgtcttaaaagaataagactagacacaaacttctaagagggccttccctgaagagatagaggacattttctattgtttcttttaatttctatttttattaaaatgctatgtttttatgataagactttaaaggaacgggtcttatggttctcatgaggtgatattttaatctgccagcagaacatcagttaatcacatagaactactctggctctgtgaccaacctrtcatccctgaaattagaaaattattttccrgatagtttggaagaaaaacaagttaaaagctattgaatgctttctagatgctgggcattgggctgtcatatatgtgtcttatttagttctcagagaagctctgtgaacgtcattttatatcctgacttttatagctcaggaatctgaggaacagattaaatattttctcccttgttattaactagtaaatgagagaataaggattgaaatccagttcttatgatttcaaagcccaaattcttttcaggctggccatatctatttgcaagtctcattccttatggtggctttagttgtgctttacctctgtggtgccttagttataatgccatcttcctttccccatttttcttgtatatcctcaaataaaaattccattgctaaggtgagtagcctattctgtgtccttagagtagactggcttcccagtaaccttgcctcaaattatatcccagcttttggatactttaaattttggtcatgacagttttttaaggaataaaaatttgagcaaaacaaacttttgaaaactgtgataattctaacatatatgaagtatttcttacatgccagactctatgccacaagtgttatgtctcatgatccctttccaatttacatacragggactgaaactcggagaggttcaggcacttgtccagtgttactcagctggtgcctagtggatcctgggtgtagctctggtatacttctgctcagtttgcttttgatatctggaaccttagaattcattctcctagtagcctgtggatagaaggatgatatttcctgcttttgcacacattaataaacccactttctggagtaggaagyagatgaacaaaggtaaagaaaagtacaagtacaaagttaggtaaaaagaacaagaaagaatctgtgacgagtatgatgactacatcctaaagactctaatgccaaaggtatttgattgtttatgctttatattcattatctgtcctattagtgtggatgataatgaaaactatagattgttttccctcaagtaggtgaagaaagaatctctagtaggttatgattgccctttgggaaggttagttatcagggataagtgaacagatcctatcaaaccatttactgtttagtttctctcctctcctttcctaatctttcttatctctgttcttcccttctacagtctaagcctacaaatatagctcaggtaatctggaggtgtggcaaggacagaccctgggaaaaataataatgaacacatttgaaggacagcaggatggactccttggaatcctgtgttaggggcagcattcatagaggcagaatctgtcttctgacagagcacccagcttcacacagtgaaagtatgtgactgtcctctcagatatcaactataagrtttcgtcacwaagttcattttatgctgctaaaacagaatacctgagattgagtaatttacaaagaaccataggttatttggcttatggttctggaagctgtgaagtgcaagagcagggtgccaacatctggcaaggtcagcccatggtggagggtatcacatgatgagcaagtgtgtaagacagtgagaaaatggaggctaagagttcatcctttttattaggacccacccctgtgatgatccactccatggaatggccatgcaattatggtcttaatccactcttgagagtggagccctcatgacctaatctcctcttaaaggccccatcttttaatactgctacagtgacaattaagtttccaatacatgaactttgggggacatattcaaaccatagcagtaaggtcaccccaaacactcaggtcctccagtgagaggggaagggagggggacatgggtgatcaaggcagtagaattagtgaatggagaacaaaatttaaaaatctgagcattttttattctgaaatataaaagtaatcaattttaagaaagcttaaaataaattcaaggagattaacttcactgatcataagttctcacatttacatggcaaggtragttttctgaaccacaacaaccccaggatgactttagaaatgttgaaaaaccacagaattatagtccattgcacagcaagcattcacttactctatgttgaattagaaaggaaagacatttttcaaagaacatggtgttacagaattgtgagagatgttatcaagcatttgatctaaccatcccattttacagacatagaaactgattacttatccaggaggatataaatagctattagcagtactggcataggattcatgtttcctaactctcagtttagggtgtttagaagcccaaccagtatataatcctttggattagtatctgagttgttgttaaataagcaaatcttgtgggttcaagtattcagccaggtcattccataatttttctcattacctttcttaggagcgtatatagtgactaattgaatgagccggctgatgctcccttatatttgtattcagtttatatattttcttgcgaagggagtatagtttggaggttaagggcacagattctggaaccaggctgctgagtttgaattctgattttgccaattattataattttggacaaattcacttttctgtgcctctgtttgcttgtctataaaatggggagggtaatggctcttttctcatgggctcaattgagaattagataacatatgtagaagtgctttgaacaataacgaatgcatactagctaacatttattgaaaatcaaccataattataatattgaatctctacaataataattcataatctgcttatattcaactgatatatgagtggtatagttcagtaaaatgctttgatgtcaccactaatgcagtacaagtaggagatacttttctgatgcttggtagatctttttgtttaaaagtttggaaaaacccagtgtttcttttggggtggatagataactacatagggtttttttttttttttttcctgaaatagtgctgtgctgaaaaattatatgctatttctatgtaaggaaatcttataaaagtcttagcagaaacactttatgtatacttattgttaagatattaagaacattttagaaagaaaaacataatattactaatcccgccctgactggcctagtttcatttttacatttctttttgttctctacccatatatgtgcatgtttttcagggtttctcacatagtaactgaaattcattttcactttatattgcatgtacttttgcttcctgtgttgtgatcatagattttcttctttaatgctgtaacctgtcttattaccacattttacttacttgcctattaatataaattaagattgtttccaaggttttggtatgacaagagaaacctcttgaaggaaacccttgtttggaattttctccaccttcccacccaactgcactccccatttagagaaatgggtactagctgccattttgggtgctagttgccagtttgagtttatttttccccccaattctctttcactttttaacttctgcttttctttcctgagtgtaagatccaaatacctatcaaagttgtgagtttttagggacatctttatccttgaccacaggtcttgatactgatcctgaatgtgtgtgtttaccacatgtcctgtaaggcacatattgcagatcttggacctctttggtggatagagtgaggacatgaggaagcaccactcagcgctattaaaaatcagaagctattgtggaagtgaatgatctggcaaggctaacaacggctccttatttcataaatatgagtcactcccagttttacactgtagataaaacactctgaaagggacaataaaagcagcaagaggtagatttagtgagatgctgagtagatgtgtttgtgtctcccttcctctcaacttttctaaatcctgaggttttagtgcagtgctgaagtcttctaggggcttaagcaaacacaggcagcaaaaacacatcagaatggaaagataattcccattagttcattttgccaaattgaggtaaagtgccctttaaataggagataattctttgacagataattagcttgtcttccttgataaaatatgtgaattggttgagtatattataattaattttgcatattatgtaaaaatctattcatgtacacttactaggtgaatctcttaattcctaccttgaggatggctagaaagccccatttctgctccagtgaatagaaagarctggaggaatgctgtggttatggagtccaggaagccctctcttacaaagattgggaggagctgaatgtggtatatcattattaaaagacacagagacttcatattaatatatgcatttattaaaacaaactttgagaacacttttaggcctgagaatgagatgctacaaagttgcctaaataattaccttgaaatcaatctcttgctagtgacattcttctggcttcccaatgtggagctttttccagggagtggagtgagtgattggctgggtgcagctagctgttggctgggcggtggctgtgggaagtagcctgagagggcacagaacagttgctcaatgactcagtgagtcaaagctcctctctgcagtttttcttccccctactccttaagccattctgagctccttcaggcatccccatgtatctgcgcactgcttttggggtgtcttttctcattcaaagctattgtcgtggctacttgatttggctcatattaaaacgtgcactgggagatgttggagtgctgaaataaaagagcatgctgtagttaatcgatcagagagcctctcttctccaagttgaagtgtttcttttcctgaaaatagagtggctatttgatgttccatgggagccgaatgacttcctggtgtagtgtggcttatagcaccgtagattttagtcattggtcactacccctccatgtgcatgcacacacattcacatgcaaacaaacacatattttagttaacatttgtagaatgggaacaattatgacactgagcattaactcatttaatggggatagcaatagtattaaatctatctgcagcgtccaatatagtagccttgctgcaagccaaacgtggccattgagcacttgaaatggggccagtccaaacagagatgtgctgtaggtgtaaaatatataccagatttcaagactttatatagaaaataatgtaaaatatttcattagtaattgttttaatattgactcttgaaatgatatttgcacatgttaagaaaaatatattagcaatattttacctgtttgtttttactttcttgaatgcagctactagaaaaaaaaaatgcttgttattatagtagcctgaattccatgtctatcaaatgttgccgatctcaatgtggtaataacagtattattatccccactttttagatgaggcaattgaggctgagagaggttaggtaagttgcccaaggtctcacagcacaatgccaaattcagacctgcctgactccagagcccacacccttcatcactaagaaactgttgtataatagagaatttgtctggccgttgtcctcagttcctgggaaataatttctaaacccttggaactccccgagtgttaggagtgtctttgttatgcatgatgagccccttggatcacacctgtgtttatgktaatgcgatgactcaggataagagtttatcatcagaaagacatccacatgattagaaggtcagggctttgtattagttcatcttcttcagcagaagagagtgggactgaagattgagttcaatcacaaggccaataatttaattatgcctaagtaatggaacccaataaaaactctggacaccaaagctcagttaaacttcctagtgaacacattgctgtgtcagcagggcaatgtgtcctgattgcacaaggagagggcctagaagctccatatgcaggaccctcccagatattgccctgtatgtgtctttatctggctcttcctgatttgtagcttttataataaaaactatcatcataaagatagggcttgtgttctgtgagtcattctagtgaattatcaagcctgaagcattgtagaagccacagaatttataaccagttggctagaagtgtgggtggcctgggaacccctgaacctgtggctagcatctggaagtgaaggcattcttatttgagactgtggccttaacttggggagtctgcactgactctgcttagtcagtttcagaattatattgcagtattgcaagaatagactgccttttatttggatgtatgtattaggagaacagcagctgagagagctaagtgctgcagcttaacttgcttatctctgtaacaccatttccttggtgacaatggccatttgcattctagacttggaaaatgactcaatctttgagcaactgcttttgaccactaggatcagttgggaggcaggcaggcctctgagaccttcatactcaaaacccttcasgctgtaatctctggggcctatttcatctcccagttggcatcatgttagcggtggtgacaaacatatgtgttggcccctctttgacaccagggattcttaagtattggttttgggattgagatgttcatgggaagctgacacagggtgatactatgggtaaggagtatttcgattttttgttgtgttttttaatcatttgccttgtctggaattacgcttttgtggtatgtcctattacatttcataaacaaggtatttagctcaattgttgctttttcttttggggcttttgtttggatttttaagccaagatccatgtgttttatttattttggtttagtttcttcatccctgcttaaaatagacactgcctcttgtctgtggtcctggtatccactactcttctgtttcctgctcaggcctggcccatgttctgcaaggccctcttaggtcaccagctcctagaaagttgactcctatgagtatctcttggggccaccttagaatgcagatttctaagaaaagtccaacataaactctgcagttattgggagaaagtttccgtcaccagtgaaaactaggaataaaacaagattttggaatgtataaaagaagcctctttcaaaaagaaatcaatatgacttgttttttcctaacatgggccagccctgggcacttttcatctgccaccacrccaggcctgctcttcagaggtgttcagctttaagactagggacagttcacaccagataactatgaggcagtgttctctgccactcattgactgtggaagtctcagtcccagtttctgagagggggagagcaaattcatcagaaccaactgaagaggtacagaacatgaggcattcacttctcacacagtccctgagcatctcaccttccagaataccagaggcttcaaggccctttttctacctttcaagagcgttatagcgtgctattgctctttgagagatctagggctgtaacagcccttatttttagaaaagagagaactcctgtgtttgaagaaatagctcttatgatatgatcgtgtggtttcacatggtcttaagttcaagtaacttgcccaaaggtgcacagttattaagagggataagaggaactccarattactgatttcagatccagtgttgtatcccttcaaaaggagatagaagaaacagggccacccggggttggtgaagatactgtcagaatcatctgttactgcttaccacatctaagtgagagggtcagcaagctcttgagagggcccacctagatcttagcttgtgtataccctatactgagcactgtgcccccatttcatatttagtgcttaataaatgtatattaaactgaattgagggcccctcctgctgctcagtgacatccctcagggtgagtttccctcctgagccttcttttccctttcatgactaccttccatgcatctctaccattcatcactcatatagaatgtccaagaagtaggggcgaggagagaggagaaaggggtaagaggccaccaagtgtgatttgccttggatttcagccctccctggaaggtgcccatttgtcacatttaagggaggcccagcacccctgtaaattgcctcttcctcataagtgtactcagccctccttcccagccttggaatgccaggatttctaaatccttgtgctgaattcacctggcgagtcctgcacctgactgtgtgagttacagctggatggcattgttcagctcaatcttcagtgtgttctgaaaatgtttcttctkccagtcctgtcactgaatttccctaaagttccttcctcctttccctcattagatttctctttggggactatttttttcaatcaaatctcgcaaatccatagcataatgctgaacagcatataatagatgctttacaataaactggtcctatctcatctcattccagtgttcaatgaatctaaaaatatttaatgagcacttactatatacaattcagatgctaaacagtgaatacttagaatttctattaataactacaatgtagtagctgatttaattcttgcaataactattgttgcctgttaggactattattagctccatttcagggtacaaagaggtgaaacagctttgtcaatatcatactggaaagttgtggagacagtctggccctagtgcaccaaaccattacactctatttcctctaagagaaagaacatcttgactttcttggggtccacactttaataagaacaataaacagggaagaaataaataggtaacttcagatagcgataagtgttctgaagacaatgaaactcttaaaaacttcatgatatgataaaagagatttggaagggtagctgtaaattgaatgtcagggaagacttttctgagaacacatctggtctgaggtctgaatcatctatgtgagtctaaagaaaaataaatttttatcctaccatactttcggaacacctctgtggatttatgccccctacacacagagcagtcttccagcagacactagcagaatgtcttgcaacttaattttgactctacctggtgttagcttcagaccccacaagttgtggctcagtcctacaagattaccccaccttccccacactgtttataaatcagtatttctgcaaccccctccctgagtcccattaattttctaggacagttcgcagaactcagggaaatgtgtttacacatttattataaaagatattacaaagaatatagrtggacagtcagatgaaggagatggatggggtttatgggggcttcattacataggcatgattaattacatcattggtcattggtgatcaactcaaccttcagtccctgtctcctccctggaggttgggggatgcggctgaatgtcccaatcctctaattaagctgttttaattctggtgaccagctcccttcctggagctatttaggggcccccagccactagtcatctcattggcattcagaaaacactcataacttcagagattccaggggttttagaagctatgctacaggaaccaggggcagagatcaaatatatattttttcatatcacagtatcacagtgaggatctacaggaagggagtttgcggaagagggaacagcaaatgcaaaggcctggaagtgggaagcagagcacccaggctttacacaacctctgacagctgattttgttcttgccattgttcattcatgtcatatcgtaccatatcatatcatatatatggtttatcaaggctatattgaagttatagaacaccagagttgggagaaacttaaagattaccctaagtcctgattgtataggggtggcaaaagaggtcacagagctagaacccagtatctttttagtgtggaaggaagggctgccctctgagtccttgctgtcagggcttytgttaccctgtgcaaagttagacatggcttcaggggaaatggtcgaaagtctgatggtgccagatacgggatgcatcccaggtcagcgcttcattctgcgtgccccaggttgaactgaccattacttggctggtccttcacttagcctcaagtccatgttgacaatatgtaattccagcccacctcctcagagacaagcagtgtttttaattgttttgttttccccctaatctcagaaggtggtcacccaggcagggacatgctagcttttttttttaacccagtgtaattttgtatgtctcttagtgcatggagacctcaccttgcttcaggtggacctgtcaaagctcagccctcatggtacggtgtgatcattggacatggctgagtccatgtttaaggaaagcccatgccttttctttctgsaagttgatcctttagtactcagccttgctcattatattcaccaaacatagaatccagctcagtgacttgaggaagttgttgctatgccttttgtgaagtgaaaacatcggttcaggaaaacaattcaaattttgatgctgacatttgatcctttcccctaccacttcctgaattccctaagccagagctctttgacctccagatcctactgaaatacacagttatacatactgtttgttggacatgggggttttattcaaagcaaactcagatgcagcatttttggctgggcacttccatacatgattttagcaatggaaccctatccaggcttcacctgtgtaactttgtcttgcttactgctttcccccacccctcctgtcatggatgtttctagaggaccttttgtgaatgtaacttccaatgggaatgtttcacagtagaaatatgctctcctgtgaggctcgcatgtgacatttctgaagatttatttaattggactttacttaaatcccattgggaaacatacttttgctgtgaagctgtgatgtgtttaatttggggtctaagataaatgttggtcctcggggtggatggttgagcaatagttttccttttgtacagtgggtttgtgtaatgaatagctttactgggctttcctctgtttgtttgtttagcaatgcttcattatttaaacttctgcactgaaaggcaagaatgtttttagacattctttagagacttaatgcagaatatctggttgagctctcgggagaaatatggctttgtgttttatagcactctcctcctgttaacattcctctctctgcagcttcccaggatgatctcatggatttttccccctcctttaatccgtcttgatggattaaccagtattaagtttgagaccagtgagcaaaaaaggtggagccctaacatggtatagagtagcctccccagtacgcagaatgtctccagctaaaatattcttccgcccagaaggatgccacatggaggtcatgtgccagtgctgatctgaaagggcatatatctaatgaggagggaagtgtctttgggagaggagtgggcttctgtgcgtgcatgtagctggttcatggaactaaggttctacaaggcttactgcgcttgccttttataggcatgctggtcctttcagcacacccccaccccctgcagcccccgcccccacccccaccaccctgccacccccattctgaccttggaccatttttggcttggctttaaggtatgacaccaagttgggttggctctcaggggctttgttctcaggmagcccacargttttagtgtggctcttcaaaagtaagtattatacgttgtatttctaaaagtaagctacactgggaattacaagtggcactatattcatttgggctgctttaaccaaatgccgtagactggatagcttaaacaacagaaagttattttcttatagttctggaggctgtaagttcaagattggggtgccagcatggttgggttctggtgaagcctttcttcttggcttgcagacagctgtcttcttgctgtgccctcacaaggcagagaaaaagagacagcaagctctgtgttgtctcttcttataaaggtactactcccatcacaggagccctaccctcatgacctcacgckggggattagggcttcagcatacgaatttgtgtgtgtgtttgaatatggggaggagagatacaatcagtccayagcagccacaaaaaatgcattcagaaaaggaaagggtatgaattttgcccaggatttggagtgtatgtaaattacaccatttggtaaatcagtgcgttctctctctctctctctctctgtttcttttcccctcccccctcttttcttttcaaacacatattgatcacctgttgtggactttggaacactcaggagcttcccactgaactcagaataaaamctgcctaagaggccctgtgaggagggtccctgcctcccttccttcccctctagcccttctcctcacccgcctcttgcccagtcattgtgcctccccacatttggctcccttgagtcactcagaggttccytgagttccctgcctttcccagtgtggtgttccctccctatgttctcctggattccgtcccctctcatacctcagagaggctgtccatgaaccccaatctaattagtcccctctcatagcacccaggaactggacagcgtcttccgttatgacttatcttaatttgtgactgccttctggaatctgtgtttatggttgtcatatgtttcctcctgatggagtggggaggggcagggaaggggcctctgcagcgtgtcactcacctcctcaaytcccagaatgtttggggagggtttgatcttaaatacaagagattataacagtgaaaaatgtgttaatgtaactggcatgtctgttaacaaatcccagacttgatctgagtgtttatggtgtgcatttctccctgggaaccagttggtctgtgctaacataggtaaagtttagacacgtaccagaaagaaaactgaacttgcaagttttcaggaacatgggggctggaacttggctgtctttctgtcggcccctgacccctcacccccagactggatcttggtaggcacccttcttagccattcacttgattgaagcccaaaatcctttcttggaaagcaaaaatacttactcttattttctttagttggcatttttgttagtgagaatggagttcaatagaagtagacaaaattctggtggaaaaaaaaatgagactacacaggctgggaggaaggtctgtggatggaggggacaactggaaccaccagaaacatctgttctgacccttctattccagactaggattaagggagagcagaaggcacttccctgcccctctggcagagggactgacttgaagtcaactatgcccacaacctgtcttcaggtggttcttactgaaacctttgtgagacagaatggggagggtgagttaaagatggtattctctgcactagcagagccttactgtgtgtttggctggcagggatgagtgctcaatcactcttcccagcccacctttgactttttaaaaataggtctaacaaatattctgtggattcgtttgaaattcaagcatcaaaatgtattccaggtagaagtctctctttcatgttttcttcccatctactgctgatggatttatgagagacagagaaggtgtagggagagggagagaagggtagaagaggggagatggcagggacagggagagaagagggagaggggaggggaggggagggaggagggatcagggtagaggagcaagagttggggaggagaggtgagggagagaagagtggagaagggggcaaaggggatagagatagagaccaaacccaaggccctggtggggaagaaaccagagagagtcatagagtctcactgacttctgcaaaacctgaggggcttcctggctctgggaactcttgagatcttaacagttcaaatcctgctcacataaaagtcatctgctcattaaaataacacaaagctgtttaattgttgtctttgtggaaaattacatgactgtcatcagctgttgcttctggcagtgctttctgttctaatgtaaataaatgaggtaacagatttaaagaaacaggctgtatttacatacttctgaggtatcctctcaaaacaatctgcctgtgttattcaaatacacacaaattaaacttgtggtagctcaaacattagttattcattaaagccttaaagttgaaatggtaggaggggggcaagagaactgcacctcccttcagggggtaggaaccagaggctgacttttctgtgtggactgagctactccagccggcggaaatccaatccccagctcttttctataccaattctgccctgaggcaacttctgagccaggaggggagggtggtgagagcagaggggaatctttaaagctctgacaaaaactttccagggtcagcatttcttggaaggcctccaattaaactttattttcaattttcataaatcacaattcctaaatcattggatgtttctgactcagtttacttttttgaggtaaatatgtgggcaataattttttaaaattcttcctattgagggcatggcaaaggttttatcaaacaaggaaggaaacagtatattcgaaaatataagaaaaatgacaagagacccctccaataaacaagttaatgactggaaaatgtagaagtatatggaacaaaaaatggagaagaaagcacactgctaattatacaaagattaggaagtagcgaaagtgactgttttagttcttggtaagtgtcattgtcaagtattagcttctttctggaatgctgggttttttttaacgttggggtgggagggaatggcacatcatctgagagaaacaatagtaactattgaagtggctaccttgtctgggttaaataaccggggttcgttgtctcacaccaagaaaatttaggacatagacacacaagaggagtttagaagcagaggtttaataggcaaaagaaagggaaaggaaaacagctcgctctttagtgagagagaggtgacttcccagaggaaaaaggccgactggtggtggatgtgccagattttatagtctggcttgaggaggcagtatctgatttacatagggctcacagattggtttgatcaggtgtgaggtttacacagcactcaggggaggctggtcaccccaccctaatcttattatgcaaatgaactctccccttgcctggcgccatctwgtctgctccttactgtacacgtggccggcagagaagggaagatggagccgccattttgaacatgtctagtcgcaggtaattctttcctgctggcatccacacgtgcgagctctcagtttgcttgtctgtgtctgcagctcaactttacaggctgctctctgttgaaaatgatttggggctgcttttcattaaaaggaaaacgttacggaggacttctgtaccctcactatctgcctaagtaatttcttcttaactcctgtatcactatgataccaaagttactatacgatgacaactcaagcaatgtctatttcatgtaagcctcagtattctatattatgttgttttgtccagacaatccaaagaaaagactattgttaactcaaaattcaggcaaattctggtatcaacttttcagaatttttttttctcttaaaacattactaaatactacttggttagatgaactaaataaaaatgaacaacttttattattggaagatagttttgggagggctattctggaaatgatttcagcctatcatttatcactaggaaaacaccaggaagatctttttattttattaagtttttgtaaattatttccaaaaagaaattgaccacctatctcaatacctctttccctgtagctcctattggtatctaacatatcagcagtcacctgtcttcatgtgacttggggctaattcctgtgtacaaagggatttaaataagmctagtcctgctctccaaggacctaaattctattaaagctcttaatctggatatacacagaaaggaaaatacattttaaaagaatatgtattaataatgcagttatagttgtagaatgaggctgcatgtatacatataataagttgttgaaactaagtttttatagaatgactctgagaaaaactgtaaacacctcaacttattgaggaaattgaggtatgaaaaagttgtgtgtgtgataacttttctgtacgtccatttcaaaaatttctagaagtatgcatatatttttagagaatataccagaaatgtatttttggctattcgatatgcctaaaaaatgtcttttttttcaaggcttctgaaaatcgtagacataaagaactaaatataatgaggttttcaagggagaccacactaaccaccagccccaacccccactctgcatgccacttcctccggcagtgatggagtgtagactaggctaacagcactgagtacacttttagcagagcagagctacagtgggctgtcctcatggctcctgctttgtcctccctctctggtgatgcccttgcatggggttgcctctgcaggatggtctccttttcctactgctctgaagcaactgtaccagcatcaaaagttcatctctagcaacactgacattgacccctgtagtctctggtcatcttcctgcatctgactacctccagtgctagttagctttgctgctccatttgacagtcattcaaatagctgcagggtttgaatgccttcttaaaataccaggatggctattgtacacacaaaatcattgaatcattacgacagacctaagtagtagtatcctattttatagttatggaaagatagcccagaatacttcaataactttcaaaaagtcacacacttggcatgtggcagacccactattctaaatccaaggcaaagctctttttttttttttttttttttttgctgctttatatatcatccactgtcttttctagagttggcttttaagatatatctgtagataactgtgtctccttcacacaggaaaaacccatgaatggagggactaacttatttttagatatatcttcctaaaagacttaataatatagcaagccaaataatgtggatgggtactcaatgggattcaagatcccattatgttatatgagtatatctgaagttttatgtatatgtgtgtattttaagcttgtgatacttccttgtttatgtcttttcaaacataaggcatctcacatgtaagccagaccacactggtttgagggaagcagtcaaatgacgtgatcataagaagacttctctctgactcatagtcagcctcctaaatctctttcttcccctgagtaagataaatacttctttatctcttgtttcataccttatacctagtgagacagcactcccattcaactctctctgcctctgtttgatagggcctccctttactcttcttgggaaagaaatacaagttccctgggggcaagatcctaagacaatttaagtaatacttccttgggtattttacagtaggaatgattttcatcttgaacttgaaaataccctactgtaaaatacccaattcctactgtaaaatacccaatcacatctatggagtataaagaacatttcatagaaaacaagaagtagaaataatctttgtggatcgagctggtacccaccaccaccccacatgtttctcctgttaagataggtgatattctgccctgaaacttatgaagtgactctgaccctgtctttgaagaagatttcagccttggcagcctgacatcagctccagttcatccaggctttgttcttccacagattcttgtgcttatagaatcttgagtggctctgatgttctgtttccatggagtatatcatagcatccatctgttcctggtataaacaaaatagtatscaacttacagcaatgtctctcccacttataataaaacacctaactctcatgtagcattttatccatattgagagctctgtgagatagaaattattatattacaagtcacagatatgtaaactgagatgcagagacatcaataacttgctcaaggttacaaggtaagtgataggagtcaggagttttaactcaagcaatctggctccagtctatgatcttaaccactatcatcaaggtactgttttactttaaaagactggttactcagtaagaaaaactaggcaacagagaggggtgatcaatatgcttatagcaaactgtagaagagtccaattttagcctacacccctccccctggtctttggacattacttctgtttgctgaccttcagtgagagtgttccttaaatttctggaaacagctcactttctagcttagcataagaccaaaaagggctgtccacctttagagtataaaaatctcttgcttatagattctgcatttggatgtggtttctttaactcacaacccagcgcattgcttctgaatcacattacagaggactcttctgtttctaggactgcagtcgccaaaacagcaacaggagctgaaatgcatctataaagagaagtttcccactaaaactagaatccattgcttcagtaggactgtcactgaactgaccgtgtgttagaagaaactggcaggcagtatttccacatatagttctttaggggtgctaggtattctttgttgctgccatttagaatcaatgtactgaccatactcattttggcagagaacctacttttgacataagctttgaaaatgtttgctgcccccccaccccgccttgcctcaccctaccccagcattgttgctcatggctacaatatgttcgcactaataactgcaggctcttgtgcacataaggaagttagccaccttggtagaaattagaggaaaggaagaaggagggaagaacagttttattttcaaaatccaattctgtggaaaaaccagaaatgcaaagacagtgtttgttaggaaagctaggaccaacaaagtgaaatcagatatatttgtttaggaaaaatagggagctgttgctttctttatgttaaaagtatgttttgcaaactttaaaactgctcggataccttggttcctaattcttttttgttaaataaaattttaaaagtaaaaactcaggaacattagtttacttatatagagtctttatattaagcagatttttttttttttagatctttaaaatggtagtttcccaaagtgatgaaaagaaaaagcacttacaatgtgctggacattgttttaaggtactttattaaccactttaatcattacaacagtacagtgaggtaggtactattgttatccctgttttgtatacagggaaactgaggaacagacaggtgagaaacctgcccagggtctcatagctagtgtttggctgtgctggggattcaaacccaagaagtccagcctcaatactccttctctgaatcactgcactgcacttagggctctcatggactatgcgtgtgcatagatctgttggaatttagaacaaaggtgatgatattgggggtaataagacattatttatcgaatacctggtygtgtatcaaaacctttacataggcttcctgaactatgaccctgatgggtagatgatattacatccacttaatagattggtaaactgaggcttaatgagggaacctgacttgcacagggtctcacagctgctaggaggcagaatcataactgcagctaggtgtggtttgtctctgacctttgctcttaacctccatgctacactgctcctgctttgtttgttaattatcatgttctaatattcttaaatagtaataaacataacatcatcarggttcctcattaagtgatcagtcactttggcctctggtgatacttgatggggtagggtcggaggaaagtaactggaaaagaaaaaccagattagctttactcttccccctcccctccagatttcaatttcaacccttccccaagagaagaaaacaatccttcctgcagacttctctggaaaaagccaccactgtgagcttccactcgttgttttttactttaagcaccgtccacagagagagtttttaactgcagtacagagctgtgcataagccttatggaaaactgatgcccaagttgattagcagagtggcagttgaacaggagactatttcttcagacccctcaaggagaatttccttgtttaccttatatgtttaaattgtaatatctccttttctctccacccccacccctcccacctccaaatattataagaacagagttcctacatggcttaaacatacaatgcacccatacttttgcacataagcatgctctgtgatttggagcattctgtgtgtctgtctcaaattccctcctccccccactccgccacgggtttttttccccccattaggcaaatggaaggcccatgccacctgttagcattacatcattggctccccagaacacagttgcaccaaaggccttaaacaaagtagttcttcttgtattgtttgcactcaaagagctgatatcatgccaactgatgtcattgtatgtctttgtgtaactgctatggcaactgggcaggtggggagcctccagctgatgtcattgagaaaggaggtgtagaggcagaattttaaaaagctggacgctgcttttttctgtgtgtggggttttctagcatgtgttggtttttttttttttttttaaactagctgcttttaagacaaattacagcttgagtaccctaaataagaacagagaggtttttcccctgcttttagagccttcttttgaatttgttttattgttcttccctctcatcttatatggaaaaatgtaacaactgccttttttgaagaaaaaagtgaattaggttcccatcacagaatctgtgtggaatttgggtttttgtggaggcgaagctgagcagattttaactcttcagaatcccttttgtggaggctgtgatgatgacaatgggtagtttttatcttatttattttttaagtcttcactggtgamgttattttccatattttctttcttctacttcagaattatctcttcaggttcaaactttattgtcataattgcctagcagaataaactatcatatgtaagggcagaggttaattctagaaatcaactgaaattcgtatatagctcttgtttttcttttcaaaaagctagggtaggttttgacttcttactttcaatgagtaaagtgaacataatattgccctttgagttttctttggatcataaccataccttaaggaaaatatgatttctctcttttacacagccagctccgggtccattggttgtgaaaagtcatgagactcggtctaggttatggtctggagtttcccgctgtggtttgtcaaagatgagacttgaaatggagaagaacatatgccaggctcagaggctagtggacagatagacttcctgtccttattgcaacataaccgtctcttgttcatgctttgggttttctgccttatctcctggaactatcaagacagccacaagccatctgtctttgagggtagatgttgtgttctggtggctttcagctaataggacttttccacttccccctcttttcaaagggaaagccagagtgtatctagttctgtttgagtagggttagagctcagttggcactaataatgtcaatccagattttatagcacttacatgtatattattataatttgagctttgtaataatcctttgggtttatctgtgcatgccattgtgtgtaaaaatattagcagaaaatttaaacaataaactatgatccgtaaattccctaatttaaacaattgttcgttttttgtacagttcttcagcttttggtcaatgttttttacttagcttttaaaaaatttaatattaaaccaaaatgttttatttattttcacatcctttttgcaactactcttttaaaggctacataatactccgtggaatgaatgtaataactttttttcttttatttttgtgttttacttggcctttttaaaatatatataaaacagataacattgtagtgaacatctccatatatctagctaactatctttggttagatgatttccctaagatccattcccaaaagtgagattgcacttgttcaggggaaggtttgcattttaaaaatggagaaataagcacagtttataagctttttatactagacccataactcgtgggaggcagagcagagccgtaagctcaaaagcatgcattcacacatccaaaagaggtttcttgatgggtttatgtgcccacaagccttggaaagtcgaggagtaagcaaccgcgctgctctcacattctgttctactgaaagtcagggttgataaatgtcagggccctacgtggagaatatcaaaaaagattataagagcagtccttcacaccccaccctggcttgtcttttccaagtacttctctgctgatttcacctgtgggcaatcatataaataatataaattaaaatagtgaatgcctgctgagttctactgtgtgccaggagatgtgctaagtattttacacgtattcatttatctcaggctcacaattgcactcaaagggagacaccatcaccctcagtttacagatggtggaactgaagcacagagataaatgaacttaagtaatagtgtcaggaaatgatggtacccagattataatcaagataacctgtctcttccaatgttcctgcttgtaaccactctgctgtattgggagcaaacttgtccctctgggtgaggtgagctatgaagggtgcaagacatgctcctgtggtgctgagattccacccgaggaggtcatctgtgcctttcttggctcccaaagcacagggttctatgtaggccactgagcatatggctctttgaggcaggtcacatttgcagctgaggaagattgcctgatgccgcgtggaactcttgctaggggaacatgccctcatttgtagaaagagcacatttccaaagtgttccatgcagtgatactccccgaagcttgtcttgggtctccaaatggacttttagtttttgttttgttttgttttatttttatttttattttttttgcttaaatacatatttatatatgtatttaaaatatgcatgagctacaatgcaaactcattctaatggggaggtggcattctctgccagctctgaaatctcagtcacactcaccttctgtgtttgtgttctaggtggacttagtagttttaagcagaaccatgaaaacctctgtgacaactccctccagctccaagagtgccgggaggtggggggcggcgcatccgcggcctcgagcttgctacctcagcccatccccaccacccctgacatcgagaacgctgagctcacccccatcttgcccttcctgttccttggcaatgagcaggatgctcaggacctggacaccatgcagcggctgaacatcggctacgtcatcaacgtcaccactcatcttcccctctaccactatgagaaaggcctgttcaactacaagcggctgccagccactgacagcaacaagcagaacctgcggcagtactttgaagaggcttttgagttcattggtaactatctcccatagggaattttcatccgctgccttccttttccctccagctcttgctttgatatcaagttcaaggtttattcctgtgttggaaaagaaaagctgccctggagttttggagggctctgccacctgaaacagcctaagcattctcctaagtcatagcctgtcgagtgtatccaagccatcaggatggatataaaaggacagtaattgaatttgttgggatctgttcaactagaaatcctcatccctcaagttctcagtgaaatagtggtaggggttagcatttatgtgctctgtaaccagaaaagtggatggaaagtaaggaatcggaggtcagagctggtgctactgctacttgatctactagcgccgttgagcaccttggaagcaatatctagtgaatatgacaccccttccaaacatacctatgccttccggtcaccctactaagccttattcatccagcataaggggagatggtactaggtttcctttgacagtctgccccaaactcattgaactaggaaagatcaggttgtgtagacggagtagttcccaaggaggaagttttagcaacagcacgctttgatccccagaaggaagcaactattagcctaatcctaatcttaatttctgcaacttctatagccccaaactgctataagactcaaaatatcgccgggcgcggtggctcatgcctgtaatcccagcacattgggaggccgaggcgggtggatcacctgaggtcaggagtttgagaccagcctgaccaacatggagaaactccatctctactaaaaaaatacaaaattagccaggcgtggtggtgcatgcctgtaatcccagctactcaggaggctgaggcaggagaatcgcttgagcctgggaagcggaggttgcagtgagctgagatcacgccactgcactccagcctgggcaacaacagtgaaactctgtctcaaaaaaaaaaaaaaacactcaaaatatcattttgggagcacctgcaatatagcaaaactcaacatttatttttttttacgtaacttcaacttttattaccataaaggggtggcctagtacttttcctaaatattacagcaggttgttattccaggaagaatacagttaagtggagtggggtgttcctttgtcagagaaagaaaaaaacagcctcaggtttaacagccagtggggtctggtggatttgctgtagtgttgacatctctggtcattttgccaagctgttttccttgctaattatgccgtcagcacaggaccatggaatattgrgtctgaaaggaaattcagggtgatcactgaacttagagaagtaaagtgacttcttcaaggtcataggaattctagtgtccaagaaggggccagaatccagggtttttgactcccaagcctgaggccttttcacaacacactaaggcaatgtttatgatgccctattaagtaattcccaactggcaacactgaggatgcagagatactgcagattctttattaataaaatctgagccaaacctggagcgctgaggaagaaaaatttctcaacaagcatatgaggaacttctggttgatacatgatgtgatgttatgactgagattccatctgacttaactccagttggaggaagttaggaaattgttttctatttaatgagtagggtaagatatacttgttctaagaggatttcaactaaagctccttctcacattccttatagattattcaggcttacctgcctttttttttttttttttaaggaaaacaaaaccaataacaaatagcattcagcccgaagaacaactccatatcacaacctgcataggcacaattttattttcattgttatattattggataaactgaaatcttacagtcttgctttagtaaaaacacagcaggttttataaacataatagctttcactgagagtgtaatataagctgagcagcatctaagtttagtgtttataccagtttatttattcctgaatcaagtgtgtgtagtggaaccggtggtccagccaggcactcagaagctcattctctcaccaccatgctttctggtcttgacttggagctaaataccgtgtgctgaagggaaaaagttgaaaaagagagatgcttacttttcttgaaatactgttgactatgagaagtaaacttcatctgtaaatttttaagatgaaaatttacatcaggttttttttccttggtccactggtgggtagccagtagatgtagtttaggtgaaatcactactctctctaccccttctccttccctacctgtttatctaattggtgttccttcaaggaagctttcttagggatgtgttagagtctagaaatgtcattaagaatctgttcaggtagtgcccacatgctattgtcctgagcttttaatatatttgaaaacttagcaagtcttcctctttcaattgctctggattttgagccattgctgggattcctccatcttctgcattattgccacactggaatgtcatacatggaagcaaacgggattgaatgcttgagaggtgacaccctcggcctgtatactactagcctttagttaactttgcaacaactggattttctggggagaagctgaacatagtatcttcctagttaagctttattcctttaaccttaatcagggtttagtaagactaaaactcttatccatttaatgcccgttcctgtacagagcaattctatagaataaagaaagtgttttttctctattacaagtgagagagttgttactagcactaggtttgttaagtcacacaaccgaaaattggaattaacatccttaatccaaagaggaactgcatatatatatatatacacacacacacacacacatacacacacatacatatacatatatatgtgtgartgtatattttcatgtgtgtgtataatttttccccttcctctctccttttccttcattctttttttttctttcagtagtgtaattccagaaaaaaagagaacaagacatttgagagaaggttcagtgactgttagagtcgacttgatcagtagcttgttcaacgtgaaagttaactgtgttataggtctggcttccggccactgctgtcacctgtgcagcaaactgttcctatgagcaattctttcatttaatcttctctttaaatgtagatgtatagcttcttgttcrtgctgatatcaactttagccagttctggaagttgtgacataagtatacgtaatgaactagtggattatacttggctttaaaactgttttaattcaytatttctatacaaaataaggcattgcaaagttgagatgaaagtttctctctccgtgcctctctcttccatcttcccttcatctcttgtctttctccyttttttcagaggaagctcaccagtgtgggaaggggcttctcatccactgccaggctggggtgtcccgctccgccaccatcgtcatcgcttacttgatgaagcacactcggatgaccatgactgatgcttataaatttgtcaaaggcaaacgaccaattatctccccaaaccttaacttcatggggcagttgctagagttcgaggaagacctaaacaacggtgtgacaccgagaatccttacaccaaagctgatgggcgtggagacggttgtgtgacaatggtctggatggaaaggattgctgctctccattaggagacaatgaggaaggaggatggattctggttttttttctttctttttttttttgtagttgggagtaagtttgtgaatggaaacaaacttgtttaaacactttatttttaacaagtgtaagaagactataacttttgatgccattgagattcacctcccacaaactgacaaattaaggaggttaaagaagtaatttttttaagccaacaataaaaatataatacaacttgtttctcccccttttccttttaagctatttgtagagtttatgactaaatagtctgtgcaggttcatagaccgaagatactacacactttaaaccaattaaaaagaaccaaaagtaaatagaaaagacattgaatcaccaaggcctgggatcaacctgggctgtccacacagaaaacaaaaacccaaccaaaccaagccctgttgtgctcactggtgcaaagagaagatcagggcagcttaagtggtctaagaatccttcaggcattctttaaggagaaaaaggatacctttgattttgtgtgtttcatgctctggattttttttttttttccttctctgggtttaagagattttttttgaaatagtgaggaactgaccattatatgccttcactggcttcttgtgcaataatatgatgttttaagtgtgcaaacaagttagagctggcagctgaatgatagacaaatagtgcaaatttgccagcttggagatagaaaggaattcaacaatatatcaaataytttccttcccacctttttccttttttttttttttttctgatttgattctggttacagtgccataaaccttgttacatatgtatatcagaatgtaagaaaaaaaaatttatttaaaaatatttttcgcaaaaaaaaaaaaatcttggtgtgtttctgttgattgtgtaaaaatttattttcattatataaatgaaactggtttaggatgtgtctttttttcccctctcttttaccttaactcaggttcaagcctttcttaagctctggtaacttgcatatayaacaaagttgaaataaaacagatttttatatagggaaagagagatgaggaagggaacatatccagttttctcactgtgaaacagagttagcaaggaagtggaagagctccagtattgatctgcccagtcactgtcccttatattctcacaatgctgtcatcctctcctgcaaatatcattccttttgcatcggggaaggcttgcattaaggggatcccatctgcctttgcgccttggtgaccaaatccctgccagattgattggtgagaattcagtgatctccctagtggctatttgataaatacttaggacaatcttccatttagggatcttgatgttcctccccccacccccccaccccattgtcacttgctcacttggcatctttggtgacattaaccatgtaatgcgttgcagcaaattgctattgcctactcttttccccagcaaactgaaactcagctccatacatgtgtacagcttccttataacactgggttaatgcatagctgggttcccaattcactgttgatggagggttgggggtatgggaaaaacacaatgcaaatattttctgtgtttcattaaattaaaagtctagtgggacttggccataaggaagatttatggcaaactgaaatttgcctggggtgaataaaagagttgaagaatctggcatgttggattctatgtgacaacatttgacataaataattttgtgtatgttggcttgaaaatgttaggaaatatttttgacatttaaaaaaatagcttttctaccaaaaataatttaaatttttcttttatagaaaagtggagactgaatttaacaggaattaacagctgttttagattattttaatagaaagtgttaatcaggtgaaaagcaaatctctgctttgtgctttctactcctcaggctaacaatttccttggtgttagagtatttaaggagtgaggttgatatataattagtgatttaaaatacatggtaatttagcagacatttctttttgttattttaagtctaagtgttaaatttctgatagcatgtaaggtatattgcctccctctgtcccttccttctttccttctgctttttctttgttcccctcccttccttttccttccctccctctttccttccctccctcttcccttccctctcccttcccttccctctcccttcccttccctctcccttcccttccctctcccttccattccctctcccttcccttccctttcccattttcccactttgcctcattccctctttgcctctttccctctttccctctttgcctctttccctctttccctctttctctctttgcctctttccctctttccctctctcttttttctttctttctaacaaaacagagaaaagtcaatacagtttctcatctttatccacatggaaatgatttatgtttttggaagtttatgattttgagagaaaagcctatcctggggcaaacagtaatcctgccaaccagaataccaaagattctgagagggactcaggtcttttctactaatctgctgtgagtcacttagcctccatttcttcataaggaatgttaaccacttcatgaaaataatacagattaaccaagccatagctctagaaaccagactccacatgttgctgggcctcactagctgtctgggagctataaggctgccctaggaaataattgtgtctccccaagaaagccaagtccctgaccaacgcatgaaccattctcagaatccagcaacggttgttttatattaaatgaatctaattacttagtagagtgaacctgtaactaatttaaagaaatacagcaagcattgttatcttaggttgaacaaaacagtagctttaggtttctatatatattacatttatttcaatagttaatacttttccaatcaatgcatgtgaaccatgatagggagttttcatttcttgaaagagtttgtgccagtgtcttctggataaggaaaggcatcatgggaggtagggcaaggaagctgacaaaaaacatgtacaaggggaaatattcaagaaaaaatgtacacaaccacacaatcacatgctggcagtaaaggggaaacatggcctttcgtaatacgggaaacaggagaaaatgggaggctaaaatgaaaagaaaaaaacctatgtcagagtaaggaactaggacctgaattacactccagaagctgactaagatagaatgctaataaattgctcaactagatattctgatggtaagaagtccaatgagccaagttaaatagagatcaatcaatgatggccttcacattatttggggacaggctcttgtaaataggtcacaacacattttattttatgcttttttccccaaacatgaaatatcaggaaatatagttgctgtttggtttcaagctctgattggagacagttgttgcatatgaatggaggtcagatgaagggtggtagaaaatgactattttagcactggcacccagaaggatgggtcataattcagaagtgccccaaatcacacctatctgtagaagacttcctgcctttttgaggtggtggaatatgaacaccagtgctttctgtggttcctgatttcttccttcgtgacaacctttgtcagtgtttgatacaaggtgcatgtatcggtgtttaataagaagcagaaacagtgacatagaatgaggggtttattccagggattagacctcaggcaagtgtgggatctggtgaagaagtcaatgggagtgtgttgcatctgtctgataatgggctgaactctccgggtcagcacagccaccagtaacaaaagctgggcatgaagtagagaagaacaaagaattggaattaggaggaaaaactggaacccacatcagccttttaccaacctcaatgggggtgacttccagaaggatctagtgccctctgccatggagctgaacatgtacctagcataggacttggcaaagctgaagacagagctttgggagcttcaactacagctgctgcgctaagtccaggtgagtcaccacatcagggtaaatgtgtgcttgccatcatagagtttggtgcccccttcaaatggttgctgcttcaattctgcttttccaacctcatgcaaatttcccctaaggctaaccttaactcagtgtgaatcaggagaggaaattctggaaaatatagctcctgatttagccaatttgatactgtagaaagctaccaaagtccatcccttgccaacttggcatccatgtccacttctcttaactaaatataacttccaaatgaagacattagcaaaacgatgcttctatgtagtatgatgcaactatcagttctacagatgaaaacacatttaaaagacgactgggtgcagtgactcacaccagtaatcccagcactttaggaggctgaggtgggtggatcacttgaggtcaggagttcgagaccagcctggccaacatggtgaaacctgtctctacgaaaaatacaaaaattagacaggcatagtggtgcatgcctgtaatcccagctactctaatcacttgaacccaagaggcagaggttgcagcgagccgagattgcaccactgcaccagcctgggtgatagagtgagatgatgccacagaaaaaaaaaaaaaaaagatacatagcctcataggttactttgtccattttgggatgatattcagtctttttttagctaagatccactttcccttcgatgtcatgtcatttgaatatactgagatataatgatattatgggttgaattgtgtctgtcaaaaagccatgttgaagtgctaaaccctgaaccttgtaaatatgatcttatttggaaatacggtctttgcagatataatcaagaagaggtcatattggattaagatgggctctaattcagtgactggtgtacttataagaggaggggaatttgaacacagacacaaagaatgtcacgtaacaatggaggcagagattggacaaaggaacatcaaagattaccagcaaccatcagaggctacaagagactcattgaacagattctccctcagagcttctaaaaaggaagtgaccccactatcacattgatttaggacttttcgcatacagactgcagtaaaataaatttctgttgttttaagccacccaatttgtggtactttgttatagcagccctagggaactaatacaaagactattattaccccattttatattagatggtggatggggtagaaaaaagaattggttaatatacaaccaaatatatttatatcaaaaaataaatattcataattcttaccatcctaatttctataactgatcttgtggtcatagctggtatttataacttccttctttcactacccattccatatacttgtgtcctcagcaagcacatcacctagtcatggtttcttgcctgttggggtgatgtcagttttcatttttgagggatccaagcttttgcaattgagcctgcattgggttattttccacttactttgttcgttacagcaacaaaagtaattacaagacttgagagtataagatatgatcttgaattccaggcacactttttcttactcctataatctggtagtaatccaatttccccagtcatcccagccaatacaccaatatctgactttgcttgttgattctttagcataaggagcccaaagtcggcagcagggagtatcaacttccatcttaatggaatcattgctgtatctcctagtagaagcatctctcccttggggaccagaacttctagaccagcagagtctaaagttgagaatagaaagaataaattttgctgtggatcactatgggtaacagtaagaggagccctttccatttttcccccttgattcctggatctatgaaatctggataagagagaaacagcaacatgcattgattgatcatttagagaatttactgcatctttcaggacattatcctagccctgcaaagtgtttccatccatctagcacagtaaatagttaaaagaagaattccacctttctactgctttagagtgatgaataacaagttaagactaatgaattccatgagcatgagtctgttattcttcatttgctgcaaagtaagttccttggtcaaaagcaaagcactgtggaataacatgaagggaaataagatataagaattctttaagtccacagatactgattttggcaaaggtattacaggtagggaagacaaatccctataaagagtaagtttctatggagcaagaacaaaatactgccctttcaggccttgtgagtagaagttcatgttgctgaattcatgcataccctccatgtctaccatcatggctattttgttcacgagctcattggtcaagaacagaagaaactggaaagaaaaacctgatagaggtctgcagaatgtgttctcttgtccattattaagattcttacatgctgaggttgagctttgatcaacattcacatgggcccatttaggaaagtctatccatttacttcttccctagattttcctgtcactaattttccagtcatgtttcttctaagtcccttattatccatctaaacgttagcaactgcccatgaagcaatgtagatttatacctctggctgtctttcctttgaggcaaaatgaacaattaggtacactgctggaagttcttattactgggaaaatttttcttccccacaccaccagtatagggccacaatgatttagtcattcggttttggatgataccagaatatcacacaaaaatttctgtaaacaatgccaaatatttttcagtccactggtcactgagtgcttcccatgaggccatgggtgtaagattctgaagctattgttgcacaaatagacaccatgggtaactgggtcacttgcttatttaatatacttgtgcttgatctcatatattctacttccatttgatcattgaatgaacaacttagaggcttccatttgatcattcatgcacaacttagaggcttgatggatcaacaacacttagttcatcatgggcagttcaggttgcattataac

SEQ ID NO: 95237 - DNA, 80577 bp, Homo sapiens
aagagtttaaaataaaattagagaagagggatcacaaaccaaaagctctattccaaaaacaagttctgagtatacgggtaaaattcagtctatactaaggtaatctcaacagtcaaggtcaaaaatctctctcacgatcttcagtgtgatggatgggcattgtcagcttagattgtaagtttaatttaaggataatttcttgctttgcctttggctgcttcctgatcagcaactccaaatgcacgtggaaaaaaaaattaactcaggagcttaagtgtttctagaaacctgacagttaatgtaggcccatggagactgagatgactgtgatgatttcaggagagatttacccagctccagctgattatttcatgaagccatgcaaatagaatccagagtggccagatctgatttttgaagagaaatccaaaggtttatgtgaaatctcttttgaaagatgtttgactcttttgtggcaacactgcatgtaccaatctaaactcatcgcaccatattgcggcctctgccttaaaagttgacccttctggagctctgcttcatgtagtttaccctatccaccctgcacctcctcttcctcagaacctaccactcccatggcttcagttaccaactgtgccccagatctctcatctcaggttcttagtaggcataatatttaacttcttactgagcatctggctggtgtctcaaactcaccacatcggaaagagaagtcattctctaatgtctcaagcaaatctatttccctcccacactcaatatttcttattgtggtacactgcatgaccatccacttggttgtccaaactagaaacctaggcattgacccttccccacaaccaatcaactccacaaactgttacctcaaacatacctcactactcacttctctaatctcactgccatcactctagtgcaaccagccaccttctctagtctagacacactggagtcattttaactgatgctgggttctaaagccagcatataaggtagggattctggtcaaaatgtgtgtgccaacccttcaccacattcagccagtgagacactcagattctgaaaagactgactgtaaaaaacacagtctcccagcggctcctcagtctgggtcatcctgtctcttcactgagtaaattattccaggctatgtaaagtgttatttcttgtttttttctatcttctgtttgtctagctgatataattaaatattcaggagttaaatgttcacataatacatctccataatgctacaaacacatcaccttaagtttcatccctcctttaactcattctcagttatgcagtgagaatgatctttggaaaatgcaaatctgtagaatgatccactatttgaaatatgtcataccatggaatcagttctctgaaaaaaattcactctggtattgtttgttccaattttttattgaatagttacacaaaagtgtttgcttcgtattaactcactgggctataatttctacactatgctatttatgtgttccacttccatttaaaagttaaaactataaagaaataaaataatgcaaatcctatcatgcttttccttattattaagataaattcaaaattcttagccccttcccacttctccaggttcattcctatatcactttctacctcaagtttgctgaatctaaatatattgatctttcagttttttgaatttaccacattctttatttctattggtctttgcatgcactagctcgtctgctagaaacacctcttccttagcttttcccattttcgatctcaatttaaatattattttctcagggacatcattcttagtactccatatcgagttaattctattgttacatgctctcacagattctgtattccattcaccaccctcaaagtcctttagttacttgtttaatacatactttctgtgctagagtgtaaacttcatgagagcaagaatcatgatcatagtacctgacatatggcttttaattctccagtttctgtagtaacaacatcactacacacataataaagtacatacaagcaatgtacagataacaacataaaattatatagagacactatgtgggaaaacaaaggtactctctctaaccttaaaaggcaaagactaaatgctaaataactaactttcatttctgcttttatgacattcagaagaacgcagggattatctaccaaatgaataaagttttacattctagaatatacgagtgatatgcaggcttcataacctcagtctccaagcctcctgccttatacttctcaacattccattttttgtagcaaaaagttccctgcttaaaacctcccaatgacttcctactacaaccaaaataaaatccaagctcttgaccagcttctctatgatccatttcctactttcctctgacctcatcccctccaggcttcccctcattcattaggcttttggcttcagccacattggtcttctttctgtttctgtaagagttaaaggctttgcaatcacttctctcagatcttcaaatgtggccactttctcatcatttatatcctaattcaaatatcacttcctcacaagggtctttcttgacctccccacctaaagcactcatttctatccaatagcactcactattgtttgcagtttttcttctccagaaatttagcagaacctgaaataacataatttgtttacaagattaatgtctatgtgtccacatggaggcaaagacttatctaccgtttatcgaaaatattctcagtgatgagaatagtagcacatagtaggtgatccataaatatgttaactaagttattctggatatgcagctgcaggcaagtcaagccttggaagtctaaaggctttttggaagacttctaagaagattccaaaaagtcaaagcaaatgtgtggttttctaaatgtatttagtgacctctgctggaatacttaccaagggaaccaaatacaagtcttcatttgttcctacttgccctctcacttcttttcattgggtgataaaatgttagcataagtataaaatttggtatcagggacttttgtgagtgcttctcccaacttggagaaaacccatctccctttctgtctggatgactgttctctttctgctctcatctcatcaatttgtgcttttagcacaaacattataggagaatgttcagggatatgggaggaagagaaatttccctgattcctcttcaaatctttttgcacaaatgactgcctttctctgcacaaatacctgaacaaagggaattcatccagatactatggatagatgaagatatatccatctcatggatatacttcatatggttccatttattttacctctcttaacccaatgaacaactttgaaaatgatatttaccataaacaagcaaagcattggcaaaggatgttctcatgttgagaataacaggatcaagagaataagtctactatgagggatcattaggagatgacgtgtggctgagagtgctggtacttgacacaaaaacgccaaatgggaactaaagactagaaatttcgaaaaatcagaataatgagtgtgagtgtgtgaaacaatcatgtgtatttaattcatttatatgattaaacttttgaaaactgtgttactcatcctatatacggtatatatatatatatatatatatatatatatatatatgtatacgtttattgcagaaaatgtgtagaacacaaataaaaataccacacaaatatcaatcataattacaaccagtttaagacaactattgtaagagtttttacatgtagcctcccgtcttttgtttatgtctattccagccttctattacatatacttcatgaacagaggtatagagtacattttcacaaaattaaatcaatcatactacttattttattttacatcctacttattttcatttaggatgttataaaatatactcattgatcttaaggtcatttttctgaaaaaaatgttttctctaggcatttgatcaggtaatatatacaggtggtacaacttcaaaaaaatgaaagaaaagtaaagccttctttttacccctttccttttcaatggtaacctctgccattagggaaagcttttactaaaccatcatatgtgttataaaaaaggctaagattactaaagtggttggcatagtaccaggcacaatgttaagtgacttatatagattatctcatccccattttatcaagaaaacaaaaacttaggtaagaaattggctcaagtttacacagcagataagtgatgccacaagtgcctaactcacaactaagcagttgatacctggaacagattgcaaataaataattcagccttatcatgtaagctggagaatatggatcattgtgctcctgtagcctgtgtgacactggatgaaccaatctcaaggctcctggaacagaaaactgcaaacgtgaaactctatcactgtcatcccattctcactcctgtcaacatgtccttagatttggttttactggaatgtgcacttgcaggactctcagaggttatgtgaacataagcaaaccattttataaaggagacaatcattttgatcatttgggatcatatgttttctattttagtacttgattttttttattagccatataatctttttctcacaacgcaaacaaatggataacaaactatgtacttaaatgtacttttctggacaaagataagaatcaactgtgtcacaaaatcatagatgacatttatttatttttgttttaattaattttttattttattttattttttaagagagtggttgttcaggttggccttaaactcctgggctcaagtgattcatccccctcagcctcctgagtagctggaacaacaggtgtgtactaccacatcaagctgacatatttaatctatttggcttacatagatttattaatgtaatataatgaaatgtggttctgcccatcttgagtcattaaaataagtgtaagtctataagaccaagtatatagaaaataatttaaaacctaataaaaggtgctaaaatagtattatcaagtaacaaattacaattctgattgtaattctaacttaaaggatattttgtatgagcttcagttctgctgctttagagaataataatgtaaaaatattgattttagctacatctgtaaagatggctcaaaattaagcttgcttgtgaatgcaccaactctctgtaggtacaatataggatatatgtgtatgggtgtgtaaataaattggaacatatatatttacaaacatagaaacacaagggaaaagcaaacatatgccatttatctgcagtctgatcctgatgatttttcttcccatgtttgaacatttacattgactgaattattctttatcaatttgataatatttgaaggaaatgtacaaacatgacaaagatttatttttactacctcattaaaattattgactgatgattattgaccagtcaaaattatgttttttttcatgttacacccaaagacatactcaaatttatgcttttttatagggaaagttttaagaaaagtaattgagaaaagagggctcaagatctctggctatcaccaaaattcaatttgtaagtgtagaataaaataactaggaatattttttaaaagctctagaaataggaatcaaaagaaagaagaatatttaggaaatccaaagggatttaaagcataaaaatatgtcccaatcagtctacatgtaatctaaggaggcctgcaaacttaatgaggggagttgccaatattgtatcactttggaaatgatgaaataagcattggtaactgtatgaatctaggagtctggtcaaaaggacaagggctaaaaggctgaacttgggtcatgccctgcctatcccaggaagtgcttacctatgtcctgaatcagaggatttttctgttgacagctctggattgtttgggtagatactgacagggcagataccgtcctcacaatacctgcccagaaagacgagaaagaggaggaagaattcctccttccaccaggaattctgtgggaagcacataagatttcatgctactagtttattcccaagagaagctaccaaagcctggtaactctaccaactctaacttttgtgcctgtaagttctcttctcctgggattacaactaattgaaacaggaattcaaaggagtctcggaggactgtaagaagaatgcttcgaggcygatccctctctgtaacatccctgggtgggcttccccagtgggaagtcgaagaacttcctgtggaggagttactgctctttgaagttgcttgggaagtgaccaataaaggtttgtactgctcctgaaggtggatcagtacaccttcactaggtgactgaggaatgtagagtaagatttcacagataactctctagtgataaccaattgctagtgagtgaggaaagcatttaaacggaatatayatttaggctacatttaaccttgtctattacaacaggctatgaatacagacttgtgtatgtgttgaagagggagaaagttgaaaatattagccattgccatggaatgtgcatttaaattaaaatttaaaatccatattatgacaacatagaaataaaaagttaatatttacattttttgttttaaaatttttctcagcaaaatagtataattaaacattttattttaggaagatgtatatgtgattagaaccagttggaaacctcaactctacattctgttagtaattatatgaaatgcttaagaatgtttcatattcacaattagcttggaattaatgttttaattcaggagcttctcaaaaggcaaaatactgtgctcctttcagaatgaaagtaatttttttcttcaatgctatgcttatgtaggaattataaaataaagaaaatcaaattgataaaacaatttgcgagtgaggtataacctcatytgtgctgggtaagagaaggcaaggtagagaaccacaatgtaaatgattttgaaaataaagacatctgtaaaattataaaacaattccttgtgggtttatactctctagtttaaaagtgtcaagactattgaaggaacattagcaaagaaaaagtcatggttttgaaggctgagttcctcaagatcttgaagaatcaagccaactgattgctgggtaaatggcagtgawgacttgtgtgatttaaacgatctgaaattatgtcatgtgttgtgatatataacacatttatttttcattttgtgtttactatttcatgtctattacagtaatctaaaggatctgaaataataaccagaatgtgatatattacttccttcttttggctaatcagagccagcataatctcaaaattaaatgcattatatatggcatgcattctgaaaaatcagaattcaccttatactaactgttcaaagttctcgtgtgtatgcattcataaaatcaaaattaaaagtcaattttgcctatgtagaagtggacagaatgcatataagagaacaaagcacggtcttattctctgtagtttagtgagaaagaatctaggaggacagaaaccttattacagagaagtgaagtattttatgtgtacctgtttctgttgtttctttttaaattattttgtattcttttcctcagagatctttatcctgaaatgagcatgtgtttttaatgtcctttttctagtcacaaatttttccagtccagtttttaaatatgcccaaagttcctgggaacagaaccatctctatcacatgtgaatcccggagtatgccttgaaataaaagttttctctagagagtgggcaggagctcaaggacatagcttattggtggataaaactggaagggacttgttagcactgggaatcagtccagaagatctctgcacaagttcctgcacctgagcagagccccttctgctttcctcttttctcatcatttaacaaacattaatggagcactgttacctgggcactgggaacacgccagtgaaactaagttattttatggatcttataatcagtagcatgtgtgttgatctcagggtctagaacagtgcctggtacatagaaaatgctcaatrgatttttttttgaaaaaatttgtttttcaacccctaagctgcctttaatacttattttctatcatttccctttcaaggggaagggaagtgtttttgtggagaggtccccacaatgtgatttacacaagttgatatcatcttcaatgtatctttattttaatattatcatagcctggtatggtttgagattttcatatagatggataattattgtgtttattcctaataatacattgccactatagtttctttaaatttaatgatttgaatttttacttccctgcatttcatagtagtgatatgaggtatcttagagatcatgaatcccactcctccagttcatagagcaaattgattcgtagaggtatttaatgatcaagcaaatggcagagttaggaccaggatttaggtcttttccaaggccaattcacttttttactattatgtaagaattaaatattaaaacctcagttttcaaaggaaatgtcctatagatgaaagaacacagtacttgcagtcaaaggtcttggatttctgaaactttctgaaaaagaaccccttaaactgaataacagtttcttcatgaataaaatgaatgttatactctccagttatcttaccatgttttctggcaaacaaggaaatgtattcacatccaagaaaacaaaaggtttcttaggagaagaatcccttgctgccagaattttgcccatgaacaatggaaacgtgaaaaacataacagatgagagagtcacagttagttttgggtactaattctcagacttcaaaataacctttttaatttattaatattaaccttgaaatttattgcttttattcattaatccattttattattcagtaaggattcatcaagtgtctattaggtatcaggcactgagaggcgagggagatagagttaagaatacagaactgattcttaatcttcaagaattgacaaatttgtagaaggtagacattgaacatacaatacagtcaaatgtgatgagtgtgagactaagggaaccaggtgtcctaagactatacagtgtaccgtggaatggggagtggtttctaacctagttacctagaggtttgggaaaaacctctctaatgatgagatgtttgagctgacacttgaaggataaatagctaaaggggagaaagcgttctatgtgagagaactatatatgccaagatgcagaagtgttctctgttcgaagatctgagcggggctcagagagggaaaaggagaggagtatgagagaagatgggagagacctgcagggactagattgtgaagctcagggggagttaatagccttaaggagttttgtctccagggtatgaacaatgaatgaggagtcactgaaattctatccacagtagtgggaagtactaagtagtcagrtatgttttggaagaagcactgttaccagttgagggagaggrgaggagggaaattagactgtggtgtgacccaggatggaaagttttgcccaaatgtgggggaaaaatgtttactctctcctttgcccaggtcttactacaatcatttcttctgcacacacttgctcagaacattacaaactctggagaaattaacatgttaaggatatttaggatcattaaaaaagtttaataaatgttgtcacacataatgaaagttaatttaagaattgtaaagacttgagcgatgtagtccctaaataaatgcttccctcttaaaatggactagaaacaatttgtttttgcctaagccaacgtattgctggacataatttacctgcttcctcctcagtcttgacactacacctctgaattacatggtacaagtggcacagggaagaattcagaaaactagagtcaaagtggttatggaagaaattataataatgagtccactcttctaggacaggagttctaaaggtgaggactttgatataagtgaactcaaggagtttctaaaccttcagaaattatatctaaaaattaggtgcacgtatatagaagtacttttctctgagaagaggacttcacacttccatcagcttcctgaaggcccctgtaattgccgtaaagaacaactgctctaaagtttaatactaggctactcggctgttttttgttaacacagaagttttccaaatggcttttctctagagcaaaatgaaaaggatcccatccttcccgagacctaacgatgtttatctttcgtgatactgtttttgttcttcctctttttctcctaccccccaccacttttaaagatccatcaaggcccagcatggtgattcacacctgtaatctcaacacttttcaaggctraggtgggagaattgtttgagaccaagagttggataccagcctggggaacatagggagaccctgtttctacagaaatttaaaaaatttctctagctggccatggaggctcacacctgtagtcctagctacctgagaggctaaagcaggaggatcamttgaatccaggcgttctagtgaggcttcagtgagcaagattgcaccattgcactccagccggggtgacagagtgagaccctgtttcaaacaaacaagcaaaagcaaaaagatccatcaatttgttgctccattcctttacttactatcttgctgtctacagctaaagtcagactgcatgatttggaattccaactccaccatcacctgggtaatgttgagatttattacatagcatctctgtgcctcagtttctccatatataaaatctacctgtaataatgttgtgaaaattaaaagaaataccagttgtaaatcactcagaactgtgcctagcatttaataaacactctgtaggtattagcttatttctttataaaatttattcataaaatgaggaagttagctcatgtattgtcataccagctttcactttgaatgagtccataattgcatttttaaacacaaaaagagaaataataggaaaaaatatgtatacatcaatgttacttcaatcacgggatgcatagtaattaggatttctttgccctaattactgatgtggataagccggtgggccatgtcaatggcatctcaagctgttatcacaccatgtgaaacacacgatctatgtaaaaactatgcttggttgcacagcttcaaggaaagcactagtctactcacttccttttcattcagcatgctatgtctaggcccctttcatataaaatatttggagctgccattgtaggtagtgcaggtggtcttgttcaaagtgtgagtatcacctcccactgccaagactgcagctgctttgattttaactgaggatctagaaaagtgctgggaacacaaatatttgctgacctttgtcacaagtagcacctaatctccttcctaccagacctgctgccttataaaatgatgttctaagtgtataatgacttcctctgcttctgcaactgtgttttggaacaggagggtgagattagtagccacacacactgaaatagtcatatgacttccaaagtctgtaatttttaagcatatacaaaatagtgaaatttctccatatgtgtataatatgtatatatgtgtgtatacatatatatakagagagagacagagagagatgggggagagagagagagagagagcgagagagaggcagagaaagagatccttattttggctgatatctattctatacttctttgaaatagtgatttttagtaaattggcagtgttgccagatgacgacttagagttttaaccacctcattgttatatgtaccatggtagctcatcttttctttcaggtgaaagttgtgatactttgtcctcacgctaaacatagcccccatgttgttccaggaaaatagagatcaataaaatacaaagtacttgtttgaaagtgaaggttaagttcaaattcaatgacctacgctgtggtaaaacgatcattcattaatgatattaagtattttcttttttaatgtcagaataaaaccatttatttgcagatttaaaaatatatatgtgtatgtaaatctccttggtttatacctcaaatatgaaaataggaatgaccctgtctctatgctcttgcattcacttatattctagcttgttaagagagaagtttggggcaaaatgtgctttataaatagtaaaaactgaggtaaactatagcacaaagtgtgctatataaacagtaaaaaccgaggtaaaaatatggggaggacaaaaaagggctaaaatggtgttggaatataagaaatagcagtaaaagaagctcctcacagcaagacagtacagggaaatgtctggagggacaaagatttacttacaatcaggcctcaaccaatatgagatcgactttcttttattgatatatgacgtgtttatatgtatcaggtacatgtgacattttgttacatgcatataatgtataatgatcaagtcasgtatttggggtattcatcacctcaagtatttatcgtttctatgtgttaggaacatttcaagacctttcttctactattttgaaatatacaatatattgtttttaactataatcaccctactttgctattgaacatcagaacayattccttctatctaactgcctgtttccattaaccaacttctcttcgtctcccttcctcccataacgtacacaccyttctctacctctggtttctgtcattctactctctacctacatgatattaacttttttagctcccacatatcagtgagaacatgcaaaatttgtctttctatgcctggcttatttcgtttaacataatgacttccagtttcatccatgttgctgcaaatgaaatgattttatatttatatggttgaataatattcaattgtgtgtatacaccacattttcttcattcatccattgatggacacttaggttgattccatatctttgctaatgtgaatcatgctgcaataaacagtgtggtaccagtatctgtttattattctgaattcttttcctttggataaatacccagtaataagattgctggatcttatgatagttcaatttttagctttttggtaaatctacatattgttttccatagtggctatactaatttgcatgcttaccaatagtgcctacgagtgccttttccttcacatccctgccagcatgtgttatttatttattaatttatttaaatcatgatgattctaactggcataagatgatatctcattgtggttttgatttgcatttctctgatgattagtaatgttgagcaatttccccatacccattgtgcatttgtatgtcttcttttgaaaaatatcctttgccaattttttaatgagattatttgtttttcccctgttgagttgtttgagtttcttatatattctggagattaattccttgtcaaatgtatgcaaatattttctcgcattcaacagcttgtctcttcactgtgttgattgtttcctttactgtgcagatgtattttagcttaatatagtcccatttgtctatttttgcttttgttgcctgtgcttttgaggtcttggccataaaatctttgcccaaagccatgtcttgaagtgtctcccttatgttttcttttagtagttttatagttttaagttttatatttaagtctttaatccatcttgagagtacgttttatatggcaataaataggggttgtattaggccatttttgcatctattgtacaaggggttgagttcttgatttgattctccatttggttgctgttggtgtatagaagagttactgatttgtgtgcattcatcttgtatctggaaactttgctgaattattttatcagttctaggagctttctggaggagtctttagggttttaaaggtaaatgatcatatcatcagcaaacagtgacagtttgacttcctctttactgatttgaatgccctttatttctttgttttgtctgattgccctggctaggacttccagtactatgttgaagaggagtggtgagagtgggcatccttgtcttgttccagttctcagagggaatgctttcaacttttccccattcaatattatgttggctgtgggtttgtcayagatggcttttattacactgaggtatgtctcttgtatgctgattttgctgagcattttaatcataaatgtatgctggattttgttgaatgctttttctgcatctattgagatgatcatgtaatttttgtttttaaatctgtttatgtggtgtatcacacttattgacttgcagatgtcaaaccarccctgcatccctggcatggaacctgcttgatcatggtggattatctttttgttatgttgttgaatttggttatctagtattttgttaaggattttagcatctatgttcatcaaggctatcagtctgtagttttcttttttggttatgtccttccctggttttggtgtgatgctggcttcatagaatgaattagggcaggttccttctttatctgtcttktagaatagtgtcaaaaagatggggaccaattcctctttgaatgtctagtagaattctgttgtgaatccatctggtcctgaacttttttttggttggtaattttttaattaccaattaaatctcactgcttgttattggtctgttagtaaatttattgaggctcatttcatggcctatcatatggtctaccttggagaaatttccacgcgctgttgaatagaatgtgtgttctgtggttattggatgaaatgttctgtatatawctgttaagtccatttgttctaaggtataatttaaatccattatttttttgttgactttctgtcttgatgaactgtctagtgctgtcaatgaagtattgaagtcccccactattattgtgttgctgtctatctcatttcttaggtctattagtaattgttctataaatttgggagctccagtgttaggtgcatatatgtttaagattgtgatattttcctgttggacaaggccttttaccattatataatgtccctctttgtctcttttaactgctgttgctttaaagtttgttttgcctactcactttggtggccatttgcatgaaatacctttttcacccttttaagtggagcatttaggccatttacattcaatgttagtaatgtaaatgcctggctatgccaggcaggaatggcctgctcagggacccagtgagctcccagggcctttctcactgcttcckctacacctgtattttgctcagctctctaagttaactcaactccaggtaaggtcagaaacttctcccacaaacagaccttcagtttctccagtgggagtgtgtgtttaggagaggaggatctccctttcccacttccgcagttggggcactcacagtatttggggtgtctcctgggtcctgcaggagcaatctacttccttcagagggtctgtgggtcctctcaggattgctggtttgttcttgcagtctatctgsagctaaaattcacaatgcgagcctccacatgctgctctgtccatctgagttggagctgcaatctaggcctacctcccatccgccaagatcctgagaagttggggattatatttcaacatgagatttggagggaacaaacatccaaaccatatcagcagtccagttttattcttttgcacatggatatccaatggatatccaattttttcagcaccatttcttgaacactgtgtcctttcctcaatgtatattcttgtcacctttgttgaaaatctgttggctataaatatgtggatgcatttctaggttctctattctcttccattggtctaagtgtctgttctaatgtcagtatcatgctgtttaggttcctatacttttgtaatatactttgaaatcaggtagtatgatacctctagcattgttcttttttcacaggatgactttggctactggagctattttttaatttcatacaaattttagattggtttttccatttctgtgaaaaatgacattgctattttgatagcggtcatatagaatctgtagattgctttgggtagtatggccattttaacaatattaatttttctgatccatgaacataggatatctctccatttgtttctgtccttttcaattcttttatcagtgttttgtagttttccgaatagaggtttttcggttccttggttaaatttatccctaaatattttattttttagctattgtaaatgggattgccttcttaatttccttctcagctagtttattattggtgtgtagaaacattgcttgtttcatatgctgattttgtctcctgtaactttactgaatttatttttcagcgctaagagtgctttggtggagtcttggtttttctaggtataaaatcatgtcatctggaaagatggacagtttgacttcatcttttcctatttgcatgccttttctttctttctttctctgacctgaaagctgtggctaggacttccagtattatattgaataggagtgatggaagtgggcatccttattttgtttcagttcttagaggaaaggcttccagcttttcccaattcagtatgatgttagctgtgggtttgtcatatatgacttttattatattgagatatgttccttctatgattggctgcagatagtttttatcatgaaggaatgttaaattttatcaaatactttttctgtatctattgagatgatcatatggtttttgttctttttgttgatgtgatgtatcacatttattgatttgaactgttcttgcaaccctagtataaatcccacttgatcatggtgtattatcttttggatgtactgttggattcagtttgctagtattttgttgaggattttcacacctatgttccatcagggatattgacctgcagttttatttttacttgcatccttgtctggttatggaatcaggataatactggcctcagagaatgagttagggagaattccttcctgtttaatttttaaaagaatttaaggagacttsttagttttctttgaaagtttggtaaaatttgacagtaaagccatctggtcttgaaattttcttttttgrgagactttttactactgattcaatttcattattcattactggtctgttcaggttttctattctttcttaattcaatcttggtaggtggtatgtgtccagaaatttattaatttcctctagatttttcagttttttagtgtatggttgttcataatagtctctgataatcttttctatttctgtggtatcggttgtaatatattttcttttttatttctgattttctttatttcagtctctttttcttggttagtctagctagagcyatatccattttatcttttttaaataacaacttttcattttgctaatcccttgttgttgttgtttttctctatttcattaagttcttctgttcttcattttttctttccttctgctagttttgggttttgttcttgcttttctagcttgttgaggtacatgattagattatatatttgaaatctttctatgtttttaatttaagtgtttattgataagcttctctcttagcactgcttttgctgtatcccatggcttttcctatgttgtatttcaattttcatttgtttcaaaaaatttttgatttccttcttaattttcttcttgacataacgttcattcaggagcatgttgtttaatttccrtgtatttgtataggttttaaagtttttcttgttattgatttctagttttattccattgtggtctgagaagatgcttaatatgatttcaaatatttcaaattagttgagacttcttttgtgttctaacatatggtgtatcctggggaatgcgtcatgtgctgatgagataaatatattctgtagctgttggatgaaatattgtgtaaatgttagatccatttggtctaaagtcaagtttaaatccaatgtttctttgttaattttctgtctagatgatctatctgatgctgagattagaatgttgaaatccccaactattattgtattggattctatttcaccctttatatctaataacatttgctttacatatctggatgctctggtgttgagtgtgaatgtttaraattgttatatactcttgctgaattgttccttttatcattatgtaatgacttttgtctcttagtgtttttyatttaaagtcaattttatctgttataggtataactacttttgctcatttttggtttctctttgtatggaagatctttcatctttttactttcagtctatatttatctttacaagtgagataagtttcttataggcagcttacaactgggtcatatttttgttttaaatctatttagccagtctatatctttcaagtaacaatttaatccatttacatgcaaggctattattgacatgtgagagcttattcctgccattttgttaattgattcctggttgttttgttttttttttagtttgtttgttttgtgtttttttcttccttccttccttttctttctttcattctctctctctctctctttctttctttctttctttyttattatttatgattgtggtttggtgattttctgtagtggtaacgtttgagttctttctcttctttatttgtgttttgctctaccagttagttgtatacctttgtgtgtcttcataatggcagtgtcctgtcactttcatgtgtaggactcccttaaatatttcttgtaaagccagtctagtgatagtgaattccttcaaatttttcttgcccagaaaagattttatttatccttcatttttgaagaacaatgttgctgggtataacatccttggtgtcatttttttctttcactattttgaatatatcatcccatcttctcctggcctgtgaggtttctgctgagaaatctgctgttaatctgttaatcttgtggaagttcccttataagtgactagacattttgcttgctgttttagagttcttactctttggcttttgacagtttgactataatgtgctgtggagaagagctttttgcattatattatttgggaatttctgattttcatttgtctggatgtctacatttcttgctagacttgacaagttttcagctattgtgttgttacgtaggtttcctacacctttcatgttctctttaccttctgggaaactgcaaatttgaatatttgttcactttatagtgcctcatatgtcacatacactttgttcattctttttttttcctttctatcatttgaccagctaattttaaaagacctgtcttcaagttctgaaatttttcttctgcttgatctgatctattgttgaagtttttgaatgtattttgtatttctttcaataaactcttcagttacagaatttctgtttggttcattcttgtygtatctatctcttgggtaaatttctcattcatatcctgaattgtttttctgatttctttttattgtttatctgagttctcttgtgtctcactgagcttccttaatatcaacattttggattcttttttccagaattttataaatgtcttttttttccactggcttatgttgctgaagaattattaaattcctttggaagtgtcatatttcttcacctttttatgtttattttgttcttgcattgatatctctgcatctggtgtaatgattgctgcttccagttttgtaaatktgtttttgtaggggaagacttttttctgaagatgtatcttggtgttgattgagtagggcactttgattttgatttctaggtgcatacagcagcatagtcttcatattattttttttcagctgccaacagtatcatcagtgtctgtgattttttcagtggcttagggtgcatttgttagtgaaggtggtgatgaggttgtgctggagacaagaatatcaagtgggccagtccttggccccagtggtggtggtgggcctagcattcctgtccttgggccccatggctgtgtacattggcactgatggtaatgagtctagttgggttgattctttggcyttcaggcagtttgcttgggtgtcagtagtggccatagtagactgggctrgtgtgtgggtcctcaggcttctggrcagtgggtgtggtgtgggtgatggctgtagcaactgcaggacaaccctctggctcccaagcagtctgcactggtgttggtggtggctgcaagggctgaatgagccagtcttcagacccacaggtggcacatgcaggaggtgccagttgtgatggcagtggcagattgggtaggcccatcatcaggcttctgggagggttgcttaggtaccagtcatggtggatggcacaaggctgtctctgggttcccagacaacttgcttaggcattgaggaaggcaaagccaggctgggtgttcctgacctcaggccactcagtggtgtgtgtggacaccggctatcataggctggagtggagtgatcctcaggcccccagcagaatgcctgagtgaattagcagctactgcattgytgccctgctcttgaaggggtgcggggtgtgttgctttcagtggcagcagctataaatgggttgctggtgggcatgtgtttcagccccagatggtggctgcaagtggggtagcattttcttagggagcttataaatgtgtagcagccctgctactgggggtgggggagtccacttctaatgacacactttatccctggtgacagcagccagcagtagcactcagctgtgggtgggggatgtcagcagagcttcagggatgtagagatgcagatgatgttggggtctgaggaacgatgtcatctggtgggtgttgggctctcaaaatggcaccttgctgctcagtaatggggatggcaggggtgggacccagtgagagctccttctctggagcaatgcctttgtgcgattgctgggcagttccttatgatagtctcaaggcctgcatggtcaagggactctcctgtggctaggattcctggagtccataatgcagatgtggaccactgggagtcagtcacttaactttcgatgcactggggagcctctctggcctcacagaggatccctactgggtaggcttccttgcttccctccccttcattgccttagatgcttcctgtcacttctctgttgaattccagaattctctcttatgtgggattttctacttactattttggttctttgtggaggaggtgagtgtcagctgcccttagtcagtaatcttcaagccccttcccttgaaattttttaagctttatgtttttatttctaatagactgaaagagcataatcatattttaaacactctraggctatatgggggactatctgaaggcctcagatgagtaaaagaagtagcgaattagttaactatgtttttcttttcatttcatttcccaaatcaaatcatttgtttcttcaaataaagaatctctatttcccccttatgttcttcagcaaataaaaatgtttgcatctaccaaagtgtatatgaatttgaaatacgtaatctaacaaacaaggatgttttaagatytytgagtaagatgcatagttgcaaataaaaggagttttcaaggataaaaaatgtaaataaaacatctaataaatgtgtaccatcagaaacttatggtatattctcctggaaaagatgaagatgaagaaaataagtctacagaagaggagaaattctttggaaattttgcatttttgtggatagtggttttgaagaaagcttagatatatttaaatatgttgctaagatgtgactcccacactttaaagaaaagttcttcattttagttgcccttgcaaattggctaagtttatttttcctcaacaaataattttgatggtttctaaaattgtccagaatttgaggaaatacttagatgtagtagatgacatcaatttatgttaacttagatttattgttggatggttaagttaatcatgtctgttcttgtccagtctagaagtttctgcttcctcctcatgtgttctattctgtcctcatcacataacatctgaactgtgatttgacagtgtccttattatcagactctgctcaatgacagtttaaacttctttttgatacagtaaaaaacttttccttaaagatgaaattcttaaggacaattagcttgtgtagactcatatgaaaattgcttgcattttggagttacattagctcttctcctttataaattaatgaatcctattggtaccatataatagcatcaacatttgccttttgtgtctcgcctttcaaagggcaattttccaaaaagtatattttgcatggctcaggctaaaagtaatgtctccagatgaagttctactttgtgaccattgattgtgactattgataagatttactatgtaaagtataagttactggaataatacatttaagaaatatagtagctattaaaacctgtagtctgatgaaatggaatatgttttgaaagacagcagtgaaaaatgagaagtaatatataagtaataaaattgctttttgcaattgagttgaagattgatgccaggatcttattacctccaggatttcacaaaggatttcttgagtcatccccttgctctagctcatgaacaaagtattgctcaagtaatcgacagattatttgtgtattctcacatgtgattattatttagtgctgtcacgggaaatatcctgcctaagtttactggaggtcttcctccccttacccctccctatgtcctcctacctggttatccttttcaatcctattactctttccttgcacactctactccagcttagggcctgggctctgaccattacctctgcctaaaaattcctcctcatgacatccatttgcccaatttcttcacccttttaattaccccattaagtgatattttgcttgctcaatttttgccttttcaatcagatctaatttattttatatttttaaamtttatttatatatatttagaaggtatgtactagttcgttatcatgctgcttataaagacatacctgagactgggtaatttataaggaaaaaacgtttaattgtctcacagttccacagggctggggaggcctcgggaaacttacaatcatggcagaagaagaaacaaacatgtccttcttcacatggcagcagcaagtagaagtgccaagcaaaagggggaaaagccgcttataaaaccatcagatcttgtaagaactcactatcacgagaagagcatgagagtaacctcctctatgattcaattacctccctccaaatccctcccacaacacgtgaggattatgggaactacaattcaagatgagatttgggtggggacacagtcaagctgtatcagggtacaagctcgggttycttacatatgtatgttgcatagtggtgaagtctgagcttttagtggaccatcacctgaaaagtgaatgttgtatccaatccgtagtttttcagtcctcaccatactcctatcctcccacctttctctagtctcaagtgtctattatttcattctatatgtctatgcttactcatcgtttagctcccacttggctctcactaaatgagaacatactgtgtttgactttctgtttctgagttatttcactgaggataatgtcctccagttctaaccatgtttctagagaagacatgatttcattcttttttatggctgagtaatatatatgtatataaatatatatacaccacattttctttatccaatcgtccattggtagacatttaggttgattccatatctttgctattgggaacagtgctactttgaacatactaatgcagatatcttttttaatatgatctctttcactttgggtccatacccagtagtgggattgcaggattgaatggtagttctgtttctagttctttaagaaatcttcatgctgtcttccataaagtttgtactaatttacattcttaccaacagtgtataagcattttcttgtctccacatcctcaccaacatctgctgtttttgaactttataatgatagccattctgactggcataaggaggtatcatatggtggttttaatttgcattctctgattattagtgatgttgaacttttttttgacgtttattggccacttgtatgtcttcttttggaaaatgtctgctcaggacctgagctcactgtatttgtcagggttccctagagagacagaactaataggagatagatagatagatagatagatagatagatagatagatdgatatagatttagatataaaagggagtttattaagtagtgttaacttacacaatcacaaggtcccacaataggccatctgcaagcagaggagcaaggaagccagtccaagtcccaaagctgaaggacttggagtccaatgtttgagggcaggaagcatccagcatgggagaaagatgtagrcttggaggctaagccagtccaggattttcacatgttttttttctgcctgctttatatcctggccacactggcaactgattagatggtgcccacccagattaagggtgggtctgcctttcccagcccactgactaaaatgttaatctcctttggcaataccctcacagacacactcaggatcaatactttgcacacttcaatccaatcaagttgacactcagtattaaccatcacaagtccatcgcttgtcaacttgagcctatacacatcccctgaggtcatacattatcttcaaataaagacaacaataagtcataattatgcctaacatactaaaactatccttcgtgcaattgaaaatgcaccaatccccattgcaaatgctattacataaacttaacaatacttaaatgctgatatgaagtcaataaatsttatgtcacatgataaaggaaaaaggaagtaaaatgtatatattttcttagtacaagtgtatacagacacgaaggtgtttttaacaaaagaaggaggaaatactcatgacaattacagtccttgtatctgcaattggtcacgtgatcgtagctggtattgatgactaccttcttctgctacatattctgtattccctttgccctcagcaagcacctcagcaggtcttgtcttttttttttttttttttcctggtggagtgacccaaacctttatttgtagtcctgcctggaatggcctgtagtagtttcccactgaccttaattccaggacatggtaaaactaagagacaccctaatggatctcctatattccatgcatacgcttccttacctccattgtggagttgtagactgatttcatcttgatagtctgggttaatcaccscagccaacactgtaactctcttcttagcctgttgacttaaaggtgggaggagcccaaagtgtccaggtggcaatcttaatttgcagtttaatggaatcattattgtgtcacctggcggcagtgttcctccctctggaactaagacctctaagccagcagaacataatgccatgggaacaggaagcaaaaattttgctagtggaacactaggggtgatggtgagtggtgccacttccacttccacttccaccctttgattcctggacccgtgaatcctgtctatgggagaaacagtaccatatattggacactgattcagagcatacacagccttctggagaactttgccccaggcmtgcaaagtattgtcacctagttggcattgtaatcgtgacttcaaaaggccattcaaaagctgcttcaggatgatagggatcatggtaagaccagtaaattccatgagcatgagcccactgtcacacttctttagccataaagtgagtggcttggtcagaagcaatgctgtgtggaataccrtgacagtggatacggcattctgtgattccatggatggtagtcttggcataagcattgagttcaggattgggaaacccatatccagagtaagtgtctattccagtgaggacaagcctctgccctttccatgatggaagaggtccaatataatcaacctgccaccaggtagctggctgatcaccccgaggaatggtgccatatcaagggcttagtgttggtctctgatgctggcaagcagtggctgtggccaggtcagctttggtgagtggaagtccatgttgctgagcccaagcataacttccatccctgcaactgtggccactttgttcatgggtccattggacgatgacatgagtggcctgggaaaaggctgagtggtgtccacagaaytgatcatcctatccacttgattattaaaatcatgagcactcacatgggatgaaaatatctttgtagtttttgactaatcatagaggtccatccacatacctcttccccaaatttctttgtcatcaattttccagtcatgctttttccaagtccctgaccatctagccaaacctttggctacagcccatgaataagtatataatcgcaaatctggccatttctccttctgtgcaaagtgcacaaccaggcacactgctcaaagttctgccaactaggaagatttcccttcaccgttgtccttcagggatgtcctagaaaggggctgtagtgctgcggctgtccacttttgggtggtgcctgcatatcgtgcagaactatctgtgaaccaggacctagtcttctcttcctctgtcagctgatcatagggaactccccatgagaccatcggtgcagtctcagggagagaaagcagtgtgtcaggagtggagaccatgggcatttgagcccctttctcatgtaacttactagtgccttcaggatctgctcaagcccaatcgcatatataccacttccatttgctgatgcaatgctgctgtgcacagcccactttatggctagatggatcagaaagcacccagttcatgataggcagttcaggtcacatggtgacttgatgactcatagtcaaatatttcgtttccaccaaagcccagtaacaggccaagagctttctccctaaaagagagtagttatctgcagaagatggcagggccttgctccaaaatcctagaggcctccgctgtgattcagcctgccaaatgctccaaacagcatccctatctggcactgacacctcaagcatcattggatctgctaggtcatatggcccaagtggcatagcagcttgcacagcagcctggacctgtggcagagccttctgttctggactccactcaaaactggcagccttttggatcactcgataaatgggccagagtaacacacccaaatcaggaatatgttgcctccaaaatccaaataggcccactaggcgttgtgcctatttcttggttgtaagagtggccaaatgcagcaaattatccttcactttagaaggaatatctcaaagagccccaaaccattggacccctataaattttactgaggtagaaggtccctgaatttaatcagatttatttcccatcctctgtcccacaaatgtctcatcrataaatccagtgtgtttgctacttcttgctcactagttccagtcagcatgtcatcaatgtaatggaccactgtgatatcttgtggaagtgaaaggtgagcaagttctctccaaataagattatggcacaaagctggagagttgatatactcctgagttcatcattttctttcatcactttgtccagcgaacttacaagcaaccaaccaacttcactatgttccttgattctccacatatagtcaaaagtattatgtatacagtagctaaattccttgcctctcacaagcgttgaatcaagagtgtcaaatgcatttattttgcataactctctaaacaattgatgccaaggattatcagtgttctccataccattagaagaagagtccttagcatatttgggtctaatcatattaagcagccaactccagaaaccccaaaaccaatgaaagaactccatccttaatattctgttcctctagaaccactcctggtaccaaaatctgtattagggttctacagagaaacagaattaataggagatatatatctatatctatatctatatctatatctatctctatatctatctctatatctatatctatatgagagtttattatgtagtattgactcacatgttcacaaggtcccaaaacwggccatctgccagctgaggaacaaggaagctaatcggagtcccaaagctgaagaaccyggagttcgatgttccagggcaggaagaatccagcatgggagaaaaatgtaggctgggatgccaagccaatctagccttttcacatttttctgcctgctttatatcctggctgtgctggcaactgattagatggtgcccacccagattaagggtgggtctgccttccccagcccactgactgaaatattaatctcctttggtaacaccctcacagacacacccaagatcattactttgcatccttcagtccaatcaagttgacactcagtattaaccatcacagtcactttctaatgaggttggtttttttgttgttgagttccttgtagattctgtatattagccttttgttgcattcatagtttgcaatttttttttctcattctgtaggttatccgtttactctgttgattcggtcttttgcggtgcagaagcattttagtttaattaagtcccatttgtctgtttttgtttttgttgtgtttagttttgaggacttggtcataaattctttgcctaggccacatctaatttttaatcctcttttagagcctgtctttccctccaaactaaatattattttacccccatttgacacatgagctaattgagccttctgtctgttaagtaagttgactagttcagtgtaagttgtttctaattttttgccatcataatgctttagtaaacatccttttcatactctccttaattttcccccaggatggttttctagatgtggacttgctggatccaaagtgtgcatattttccaaatgtatccatatattgtggctttgtgttttaatagaggtagcagcaatattagaggagagaattaaggaacsattctagtgtagcaggacaagctgcatacaaaacccctcagacaccgagttaaagaaggaagggctttattcggctgggagcttgggcaagactcacatctccaacaaccaagctctcagagtgagcaattcctgtcccttttaagggcttacaactctaagggggtacatgactgggggctgcatgcactggtcatcagaatggaacagaacaggacagggattttcacactgcttttccatacagtgtctggaatctatagataacataactggccaggtcaggggtytatctttaaccaggcccaggatgtggtctcaggctgtttgcctgtggatttcatttctgccttttagtttttacttcttctttctttggaggmagaaattgggcataaaacaatatgaagggtggtctcctcccttactaggaagagagaaataccatgtgagaatgaaatacgtatttgtgttattggatttgacatcggggttggaccaagcatcttctatgaacatctataagcacgttctccttatcaaaaggtactttgcttggtgctttaaaagataaatgactatgtagcttaggagatttcttcataattgaaaaccacagcagctgttatttgaacatacctgagccccttctggaccactgtaggagaaggaggaagagaggtgaaagtgatttctgctgctgagggcatgtatgatgacaatgggtatttgtcctaactttgacactacaaagtgactggagctttaggcaagtagttactccaattgtcttttcagactctttctttttgaggtatttgacctctttgcggcatcagcctgctgctatttcacatgcacctagaagggactttaaaacatgcacagaattgaacaaagcagtaaccattcgttggtgtcccttaacaatatgtcaaatactattatttttgaaaggtaaataaatccttgggcttagtggatcctaaatgctaatttaaaaatctgaactcatttccatcccttattactttaaacaaattgctaacctgaatgataatagaaacttttttccttttaacagttggaggcatctatactgtgattcagacaaaggccaaaacaacagcagatgaatggggagagaactattttctgataggtccatattttgagcataatatgaagactcaggtggaacagtgtgaacctgtaaatgatgctgtcagaagagcagtggacrcaatgaataagcatggctgccaggtaaaggaactgacacttcacttggcaattctcagtaaacttatgggaaaaaagactgtaactaacatgaactcacaagagaagaccattcacttacttaaggaaaactttcaggtttgtgagaaagatgatgaacttgcttttaaatggattgmatttgagacaccttgtgaaaaccgaggaggaaggataattggtttggagttcagcagaagatacagagtaaacatgtttttgaggaagtcatttgtacataaactgaagtcatgagtgttgttaaaaattattcagtggaaatgtttagacttggagtaaaggttttcaaccaaaccttgtggaatgtcagcatgttagggcatctacattaaaagaagctagagattgcaaatgtagaagcaaagctaatgatgtacaaccaaggatgttcaagtcttaatcctcagaagctgtgaatatgctaccttttatagcaaatggaatatggcagatgtgattaagttaaagattttgagaaggggagataatcctgagttatctaggtgggtcctcctaagagggaggccatagaattagaatcaggcaggagatgtgccaatgaaagcagaggttgaagggagctactttgcagatggaggaagaggccacaaggaatataggtggcctatagaagtaagaaaaagcggccaggcatggtggctcatgcctataatcccagcactttgggaggccaagatggatggatcacctgaggtcagaagttcaagaccagcctggtcaacgtggtgaaacccctgtctctactagatatacaaaaattagccaggtgtggttttgcaggcaggcacctgtagtcccagctactcaggaggctgaggcaggagaatcacttgaacccaggaggcagaggttgcaatgagctgagatcgtgccattgctcgcctgcttgggcaacaagagtgaaacttcatctcaaaaaaaaaaaaaaaaaaaagaagaagtaagaaaataaattcttccctggaaactacacatggaatgtggctctgtcaacacactgattttagtctattttggactactgacttcaatatctgtaagataataaatttgttttaagccactaggcttttggtaatttgttacagctccaacaggaatcgtgatgtcaagtcaagggaggagagaattttaagtatgaagaagggattaagtcagcaaaggactgatccagggtctgttgggtttggtaatatttgggccattggtaacatggataagtacagtttcagaggagaaaggaaggttaaatctcatttcagtgggttaaggaataaatacgtggtaagaaaaaagacacagaagttgtgattatgagatttttctatgaatataaaatataataatgtagttgcagaatgacatggttttgagaattggtgtgttattaaatatgggtaagacctgagcatgtttatttgcaaaaaggaaatacctagcagacagggaaaagctaaaagctcagaataaatggaggattgaagagaataaagtcgctgagaatggggaaggggacaagatccaaagcaatactgaaagaatcatttttcgcttgtctcactcaaaaaaggaaaaaargataaatgcaaatactagatacaagttaatgaagaattcaggacaatcttacccaatgtttttgatgatctcactgaagcaggtattaaaggtcattttatgacaattaaaaggcaagtgtagaaactagggaagttcaagaaagaagttctgaaaaagtgttcaaggaatttttggacatgtttgagatgtagtcatgactttatagtggcacaaatacacacggctgtgactttgtccaggagcagtctgcagtctgagtgatggtgcaggaagttgaatagatgaagatccagtgttgtttaatttgaccattcatgcaatgggtcaaggtggcccaagaattgaaggtaattgtaaaagtgattgaattaatagtttaattcatgggccattgcattggaatagatagaaaaggaaggaattaaataaggaatagacaggaaagaaagtaagcaaagccagaaagaagatgataatgtaggacaaaatggagggttataggaactggaggtcttaaaggggagaaagaaagaatatatacactggcagaaacacagtgacagaaatggaagtacaagagttgtaactgggtaacagaatgccgaagtggaatattttagagaagaaatcatttgggatttgacaaggaaagaatgcagtcatgatcctgagtagctgaaatcaggtggacatgaaagtcttttaagtccataaggtcaagtaaccatgaggttaagtgtgcaggataaaaaatctggactttgaagttgcttaggataaggtcaaaaagtaaccttatctttgctgagcaaggaaaggtaatatttttggatagcaaacatttcaaaggtgttttatatgtaaataaagaataaggctttaaaagcttcagtagaattttaaaaatcagtaactttccttcctactcatcccaggaatatagtttctgggggtgaaaaaatgcaaagtcttcacttgagatgctgtgtgggtagtggtgtctaggaggtgcatgcaaggtttaaagagtggaatgcataatttacaagggaaattgagatcccaaagagtaccggaaaacatttcttagtgaaggcagcatagagaatgttagaaatgtgatagaacaatgcctattgtactatcaggatgcaaataaatgaaatgttagaaagggcttgcatttgaagttctggtgaaggaagagttagatgagaaacacaatggaactgactggtctcaagacttcatggctttctagtgtagggatattttcaygttgcagccaagaactgactggaggtcaatgccaattggcttacattctctatttgtgtaataggttcagctcttctttatgatcttagcttatgtatcatgtggcacatattaggcagtcagtaaatattatatagtaatattacatgttattcacagtgtataaatacatgaagcaatgaatttcccaaggagaaaaactattgaaaagtggtttggggctcaggaaaatttcatcttaaaaggaaacagtggcatgataaacactaaattataatggaaacaactgaaacataatgagggtctttcaaggttgaccaaggaacagatgggtgagaagcatccccacacatgcctgggtcccctggtaggaaatgatcaaattgggctttgaagtcctgcaaaattcagccataggtggagtcataagtgtcaatatgtaagcaatattaatatattttattttctagagaagcctggatccacattgagaaagactcgtagcctctgctgagttccagaaagggtttgaagtggtttatgaggttgtatatcatgtaaaaggagaataaacataaaawgaaaattaagacaaaagaacaagtaaattactatagaaatatggagacaaaaaaggaagttaaaacttggatatgcaagtgatgatatacatacaactggaaaaaaatgagagagctaattcattaaaacttgcagaagataaaacatttaggaatcaacgtcaatttgaagaatgtaatagaattatactttgagttactagattaaagagataatgtatctagggcaatgtgtttagttaaacctctggcagcaaccatactgggaaacattttgcatcacttcttttgataggaatagtaagataaatcatacatattggactacagaaatagctttttcttctagcaggaaatattgttagtcctgttccataaaagaaaataagcgacactggagccattatatccaactacccaggttttcagagatacaaagcatttcatggctctgtcataaaagcagacactataatattaatcactgtgagttcatggtcacaagagagtaactagagacagatgaacagagattacatgatttagatacattgtttttaaatttaatgaagagcaagaatttggaggttctagatgaatggatttatgcccattccagcttgaggctcaaacagcagaggctatatgttatcaatattcttttctaagtagcttgtttaayttgctattgagtactacataaagtttatatcctcagagtgcaaatacattgtcctgtcttgcatgacttaatatcactacatggctgygttctttatatgacaggtgcattttggaagatggctgatagaaggaagtccttatgtggtactttttgacataggctattcagcttggaatctggacaggtggaagggtgacctctgggaagcatgcagtgtcggcattccttatcatgaccgagaagccaatgatatgctgatatttggatctttaactgcctggttcttaaaagaggtatggtttattatatagtgatacaacggaggagcagcacaactgctttcagtgcccaagaatgatcccatgatctttaaatgaggcagattttgagatgatgccattatggcttgtcctaatacaattgaaagaaatctgaggaaatgttgagcattctgcaaattaaatggaatagcgtaataatgatacttattactatttacctcatgtcaaatttaaatggcatgatgtgtatcaaacacccaattatattgccccatatatagatgatacttaatatatatatataagaaaaacatgaagtatagaatcttaagagtagcaaatagcttaataagctatttgtttaataagctttccaggtgatcctgatgtacactacatgtgataaccactgttttaagtttactctccaaatttcccaattctctgctcagccttcttcaatgacagtgttttgctattgtctctattaaggaaatgaactctcattgtggagtcagtgtgaatgttaatattttgtaagggcaaacaaaataagttgtctctttgtaaggcaaagatacggatgcccacctgatttggaactagaccctggggtggaattagaccccgatcttcagtgtgttacaaagctgctatttgattctaggcatgttttttattagcctctttctctctaattccatattcttaataatatatcagttaaattttgttggcttcaagaaaaagaaaacccaaataagataaatttaaaacatggaatcatttattatttattataaaatgatgtaacggcattttatctttgtttctcaaaatcaaatatgcaaatatatacatgaaaatcattgtatgcttttagagttttcaagtcattgaaaatccaagtaattatctattagaaaaaaatgatattgtaaaagtcactttttcttcatatgcatttttttttcattatgattgttaaatagttttaggcaacatttgcttctccataattgggccactacaaatatacaaggcattttcaagtctcttcctggccatttctttartaaatatcaaaatatatactataaataaacacaagtctagtcaattaaaaaaaatttaagtagttttttaaaaataagcttataagtaagtggtcccaattgattcagctgttcagtgatmtctttaagaatttatttattcttaaataaatattttttgagtgcctactttgcatttattccatttatttattaatattcattacctgttattaatattagtatttattcttctgtggatataaaaaatctgctccatcactgaaagggaggattaagacctaaaaatatatggggttaatgaacatgccactgaatcctgtattatccttgctaaatattcatgctttatgtttcgactcctttaagttgcaaaataatttatagacaccataactccacttatgatgtggaccatgakyacaatcaagcttcatcaacaacttttctgaatgctttttttttcctaatgtaggtgacagatcatgcagatggtaaatatgtcgttgcccaattccatgaatggyaggctggaattggactgatcctttctcgarccaggaaacttcctattgccacaatatttacaacccacgctacactacttgggaggtatctctgtgcagcaaatattgatttctacaaccatcttgataaggtaaatattccttcctccctccctcttactcacccttctttcagattgctgaagctgaaagataagtattgatctgtacatttcatctgccaaccagatggcagaaatgcccttttagctaatcaatattcatgacaaagcttcccttgggttgaaagacagctcatatagttcaactttgttcagagtacactagagtatagaggtgagaggcctgatttctgtcccactttggaacaatagttccagagggatatggtaggagtaaagacatggtgtaggtgcaaggttgggcccttgttctagcctaaggctatggaagcgctgtgaacaccctggatccacatgcagctctgagtggcaggtagataattgagatttgagacatacaaacttgcactatgagacttacttcctctatttcttctatcctccaagtaaacaattgattaaaagccacattataggttgataggttcagttttccctgtaactttgcaatgcacagggggcatttttgtgggatcaagtaaaacagaagttattgcaaacagggatatgggtccttggtgaacaagaagttatttttgctcatcttagcaggttacctgagtctatgacctgccaaagtcattcagttttgatttatttcttctatttttcatgtcaatttagattaatgaaagtatatattttatatcatcatgttaataatattaacaaaatgtttgagtagtataaattcagaggttttgcagatttggtgtctatattaacaatcaaatctatttagtactctagggttcagttttgctatcaggaaaattaggaagttagaaagttgatttttaaaaatttcccagcttaaagagttctaggattctataaaatagaatgtgtatgtgtgtgtaatacacaaataatactcaaataatgccactgaaaagttatactactgtctcaaagacacttagagcgcaagaacgttctttctgaaaaactttaacatctgtaaagcaatgagtggtcctgatgagcccttccctataaaaaggtcagcctaatytaaaggtcaaactagaaacacaagctgtacatttaaaataaaatcaccaaggaattcagaaagcctggggatctgggaggttcttagcggtatatagtaatggtggactaataagggcaaaccagtgatctgtgataagctggtaagctcaacaaccatgcttcctggagaggagtgcactttgacttcagtgaaggagaaaatattagagtggcagattgaatatttcacttcagaattcttgaatcttgtatagtaataattaattttaaaagctactaataatatacataggatatttttctttggttttaaggaagaaatgcattatagtatatagttatatattacaattttacccttttgatgaaagggcagtatttttcatactgtctttagatataatcacacatctctctagtttaaagcccttcactggttgagatacttaagtttagtcagatccctgcccatctttctagtaaaatgttctatctagcaaaatgactagtagacaacaagcagtcaagaactagcttttgggttaaattcatagtcattttacacagcagaagcccccatgctcacactaaatttagaatttgggtgacacataagaataccaaattatatacatgaaaggtttttaaaatttcagtataaggaagaagtcatagtttaatctttgatgcaggaaccaggatcagcttcagtaaattctgactcagacaaatgaaaatagggcaaatatgagaacaagaataagataattaaacttttgtaaaatcagaaagattagaacgattttactcaaattactgctaactgaaaacaatttttgttagtagccaattacaaaaactctaacgctggtttaagtttttagtaaaattcattatttaaaataagattttaaccattttcagccagcgtatgaaatttctgagaatatgtctccaaattcattttttaaagtccaatcattgatcaattatcctctcgactctaatgactacataataaattcttttytttcctctaaagcctttagttttcttgttttgccccccgccccaccccccctcccattttatgttgtttgtttgtttttgtttttgacacggagtcttgctctgtcgccaggctagagtgccgtagcgtgatctcggctcactgcaacctccacctcccgggttcaagcgattcccctgcctcagcctcctgagtaggtgggactacaggcacgcacaaccacagccagctaattttttgtatttttagtagagacgagttttcaccatattggccaggatcgcctcgatctcctgagctcgtcatccgcccgcctcagcctcccaaagtgctgggattacaggcgtgagccaccactcccggccttttttttcttaattgtagcagaatttcctagatggaaatctgaggacagtgccgtttgggattggaaaatggggaaggaagccatggacaattatttggtggatttaaactctttcttctgatcaagctttgagctagtcaacttcaattacagggttatccacatgtgtcactggactgtgttttattgattaatatgtactttacccattttttgtttttctatacacattatccagaattcaataaaaaaytatgagatatattaaaatgcaagaaagtaaaaacccattgtcagaaagaccaggtccagatatgtcctgtgttggaattattgtacagagattttaagatataatcataaatatgtggaagaatggacaacatgtgtaaacggataaggtttctgtaaagccacaggagtggccacgcgtactacagacctaaaagataagtgtgccccatgggaggagggaaaggcagaagcatgcacacccacccgacttccccaaggcctctcacggggtctccaggctcttgctatcctgcctctgtatttgtgcatactcagcctgctcatttagaaaatctatcttcccatctctaaatgtccaaatgttaaatgctgtcttatctgtgacatgtgattctctacaacaataataataattaataataacaatggctaaatttattgagcactttccatataccaggcacttttctaaacatttgacatttgttgtctcatttgaaattcacaaaatactcaatgggatagaaaacattctttacttctttccagagttatttttcttaaacactggctctgtctttaccacacctctaaataaacactttcagagtggcttttcttgtttacaggacaaaggcaaaattcctaggctcatcttcagggatttcagtgatctggccctattgtatcygaccagcctctgtctcttacattctacatccagtgctacagtcacatcagatgtcctgctattttctgcacatgccatagcattttctatacttgttctttagggcagctagcatttcagctaaaaataactttcccagaattaaactttcatatcctggtccaaatgccattttattcatccaaccaatttggagatagaaagatgaataagtcttcgtctttgcacttgaaagtcttacatttgtagagttgatactgactacgcttactgcgtagtatgagataattttgcctaccttcagccagagtgaatcagtgctgctttgatcctataacttattcagacacatactcatttcatttctacctgtttttaatccattttccattaatttataagtttcttaaagttaatagatacacataaattgctcaaaaaagttgattaaatgagagatttggtttcattaattaggctggccacatagagcttttaagaaaacttctgctgatccaagcatgtcatatacaacctgattcaaacattttcagagagatgattccaaatattacagtcatgaaagaatgctctaggagttttcttgttctaatcatgagattcctctaatgggtctctttttagtatttttctctatatgatgccataattattgggactaacttcttgatagagttgaagtctcaatgatataaaaacagatgaatacaagactgtattcattaatcagtcaggctgattaaggatcaaattagggttctaccaagattcttaatagcaatgtgaccttcgacaagtttcttgacctctaaaaggttcaatttccttctccataaaatgaaggcaaaatatgtgtctcagtagtttataagaattaaatatgttattgtgcgtagtggagtgcctgacactagtgctgaagagctactaaaaatcttcactatgaaaagcaccctacttacataatgtcagaaactttacatattctttttgtcttagacactgctagtttcatatggagctgcgtgagacactacattcagtaactaagtgaaatggcaaaagcccacactgttgccagttatttaagtgattgttgggaatttgactttttttaagttaaactacccagaagcatagataattgcataatctagcacaatatctaactagactaactatacactctttgcaattataaaggggaagttctataaccaaggaaaagcgtttgtctttctctttttcaggttccctttcagtgaattaagcattataataattattcttattttcgatgtcaactttaatgtcaactttgtttcattgtttatgggaaaatatataaaagactttggagaaaggcattagctcagtattccaagatgtagaataagtaaaagtgtaattaaaatgtcaaaaattcaagaattctatgtgattacagtaaggtagaaacatcatttacttagggagttaaactgcagtttagagggagaaatggagtaaacaatgtcttttaaagtgtaattccttatgtatattgtagtaatgggtttaattcaagtttttattacttttttgtggtcataaatttttacacagccttgaggtaagccacttggtgaaatrtgtgattttgtttagcttgtgtagaagggccattgttagcaaatgtgtgttttattttygtttctaacagtttaacattgacaaagaggctggggaaaggcagatttaccaccggtactgcatggagygagcttccgttcattgcgctcacgtgttcaccacggtttctgaaataacagcaatagaagctgaacatatgctgaagagaaagcctggtaattattatccctggatcacctatctttcagttccgaatgatgttacactatgaggattttgttttccatcgtgaagtagtagtttgaggaaaaattgcattcagttaccacgcagctctttttatgtattttaattctcaatttcagtaggtttgcagggaarccaactcaaagctatatctggaacatggctaagtgttcaatctgtgcttgttgaataaatgagctatgcttgaaataaccttggtatgacctgggttgtcataatgagtcggtatgtgtaaggaagttcggttgactcttgtcttttgagaaaatgaaagccaagaaaacagaaatttgtgtgagactatcccagtcctacatcttgtaatattgcctcattggtgctgtgttggtagaaacgttttatattacytatccccagattccttggaaatttttccaggaactatctacagacccaaccagagcttgcaatgtgaagaactcatgctcataagacatggccctgtcacccggccacggctgattggcccaaaggaagacatctgacataagctgggccaatcagaatgctcccattcaaacgagtctctcaatgcactgtcatacaatgaaacactaccaataactcaaagctattggtagtgttcatttttctactttgttgcactggatgcaaagaagattaaactacactgaattgttataagaagcaaaaacagactgagagagagaactagaggctctccacagtgatttcgacccctttwtcttttttwtttttgagatggagtcttgctccattgcccaggctggagtgcagtggcgtgatctcagctcactgcagcttctgcctcccgggttcaagcaattctctgcctcagcctctcgagtagctgggattacaggcacctgccaccacgcccagctaatttttgtatttttagtagagacggggtttcactatcttggccaggctggtcttgaactcctgacctcgtgatccacccgccttggcctcccaaagtgctgggattacatgtgtgagctaccgcggccagccagttttgaccacttttaaaaatcattcctaaggctcagctaaatatttgccatgagacactccggcatcctattaataaattccttgttattatacttaagccagcattagtaggtttatattacttgcaacgaaatcatcctaattaatatatcctccttgcttaatttctgtggtcttgtctctagttgtccttctttcagatagcagaatgtgtagaagaggtatttcaaggtgctaggttaaaaaaaaaaaaaaaaacaagatagaacaagaacccaactaatttgaatagtggcagcattaagaacctatagtagccttttttctttccaaggattctcttgaattcgcttggattcttactctcattcttcttttgggagtttattccatcaatatgctcatttctctcttggatcttcctttttcctgtctacagttatctttctctgagctcacaaaaatactttctttgtttttgcctattctaaaatgaaaatttctcttgaggtttctaccctgccaaatatcataccatctcctcctttctcctgctgccaaatatcttataagagtaaaccataattgctaggttcacttactcattagcccctgggactctggcttccgacctccaactctggcctaaaattgtgtttccaaaaatcatcgaattcagggtcatctaatgttttttatttttctttatattctctagcatttaaaggcggtgaacatctgtttccattatttttcatgacactgcacattctactttctttccagtataatcttttctggtgcctctaatcatttttctactttcttttacttttcaaagtggacattctccaagattctattctaggtcctgctttctctatatactattttcttaaatttttgttttcttaagaatatagctacagagtagtggtcaaagcatgagctttttgccaaactgcctgtattcagtaccaaaaatgattttatgttgagtatacgttactagctgtgtgacattataaaagttacttaagctytctgtgtcttatctgcataatgtggataatcctttctcttatctagaatcattgcaatgattcaaacgttaacatatggaaaaaactcagctcagtgcctggtacattgtaaagatttagaaaatatcgattattattttgtgtggatcactgtctagattttccccaagttctcatctattactgagtgcccacaagctagctttctctggaagttctaccagaaaccataaacactgcaatctgggcttcttcagacttgcagtagaatcatgtggtggctctgatggaaattgtgaaatctctgaacattttgtggctcaagaaggtcaatggacttttagtagatcattaaacatataaaccttcccaagagcattctgaaaaaaaaaaaaagatcacatagtgtaactatgactttgtattccttgatttttcttgaagtcttccccgattaaaagtttaactacagccattacttttaacgctgagggtgcaactacagagcaagaggaaaattggctgggtgaaaaacatgcatgggaccagatatttttcaaaatgtcactatataataataattggcaaaagcttatatttattactatatcattatgcttttgccataaatttgactcaaaatagtttaagatgttgaaaaggtgatattttcttaaaaatattggagagaaggcagtatgataaatttaccaattacagatacaaaactgaatacaacatatgccttaaatatcttatgttgctttaaaaaaatttgtcattttccctttaatatagtcattaatagtgttgcarttattgattttggagcccatgctaataccttactatgaactctagctaataccatcctttagtcaacgtttttcttttgtgttggcgttgttaacatcagaaaggtgggtaacattgtcttctacttgggaacaatagcaagaaattagtgaccaatgttgcttccagggaaaggaaaaaattatggaacggaagtgaaaaggagatttttcaaggtcaatattttgattttttaaaaatttaaatgatatgagcatataacttatatacactaatttattatgtaataatacatgtatttatataaactaattaaattaaattaatcaaattaatttaactaatttaacatcatttcctggttattttactacattttactatgattttaggttatttgtatatagtagtgcagtaataccattatatgttactgcgcaccattacatacaaataacctaaaacctataacctatataatggtgcagtaacatccatatatatatatatatatatatatatatatatatatatttcatggatggaaatagtataatggtgttactgcacttttcttcccaactctgcatttacattggtagcttgaaatcagtcatgatgggaatatttacaccttggagaaaggcaaacactaaaattatctctctctctctctctttttctctctttttcctggagtactctttgttaaattttaccagcatatgactgcacataggcctgtgcatgtgagattattctgttataaatatggatattagaagacctcactggcctaacactttaggctaatgaacagacaatttcaggacacagatcttttttttataattgtttgtgaaacaatttggaaaactgctgaggattacaatccataataagctggtatccacatacattcttgccttctatagcttttgtatggtacagttgtatgacaccactgcatcaaaagggtggaaactcctgagccaggctgctttggttctaaatccagcctctgttactttgtgcttacttgacattgggcaaatgacttaatattctgcaggccagtttcgttatttgtaaaatggggacagtgaaaacaatttacctcatagggatttttaaaaattattatatatcaaatataatagggcctggcacaaagtgagccctacataattgctgtagaaagataaatacattttaagatgtaattgtcatactgtacgaatcacattatayagttcatttaggaattattcacatgaaagctttcactggaaaccttggctacttaaaattgattctactgtggccatgtatgtaaaagagtgtaacaaaggtcagattacttaataaaaactcataaaaatcagtaagtttttattttccacaaaaaatgaccaaaaagcctggattgattttgtggaaccatgtcaagaaaatagccagttaactgtaaaagattctttttttttttcttttgagatggagtctcactctgtcacccaggctgaagtgcagtggcgtgatttcagctcactgcaacctccacctcctgggttgaagcaattctcctggctcagcctccccagtagctgkgactamaggcgcacaccaccatgcctgastaatttttgtatttttagtagagatggggtttcaccatgttggccaggctggaaaagattcttaaaattacaaaaatcttcatagccctatgccacatttttttttaacatagcttcttttttcttgtttttgctttatgctgctaaatctgataacccatgtattcaactcagtaggtagtttccgtcatatgctcrgagtggtccctctctttcttgtcacagaccaatgttttgaaaaccaagaatgtcttcctgcctgagcaacaaaatctcctgggaagaatgaatcagttgtgttagaaataagagatggaaataagaatagaaattagaagtaagaggtttccttttccaattttycaaatgcacaaaaggtgtcccatacacttgtggaaaacaaratggcaggaggtagtttagtgcagggttaaggaaacagtatgtggggtcagactgcatggattctgcttcgacytaccagctgtgtgttcttggayggcgtctttaaacaactctgtgcctgagtttccacctctgaaaatgcagataagagcactcactcccttggtttgttgaagagattgagttacactctaagcctttagagcaacacctggtacacattaaataatcaataaatgagtactataataaccattattattgttattgattaacttgtttcattgtaccagtgcttcattgttattttggtmaggcatttctgatttcctatttcaatcagtagaccaaatttgttgcgaatttttatgaattttttatgaactggaagttttataaattttaaattttatggtagtcagaaagtagaatgtcaataaacatctaactttatagttttaaagatrcttttttctacaatggtaccctctttgaaaagagaattttcataataattttgttttgcctttctagatgtagttactccaaacggcttgaatgttaagaaattttcagcagtgcatgagtttcaaaatctacatgccatgtacaaggccagaatccaagattttgttcgaggtcatttctatgggtatgattttctttattaaaaagaaaaagaagtatcagatatgagtgatctttggtagagagaraacagaattgtaataataaatgtttatctttcccagccccctktgtacattaacagaattcatgtgtacattttgttactgttgctgtatttcatttgaaactgtttgrttttgttttgttttagtcatctcgactttgatcttgaaaagactttgttccttttcattgctgggaggtatgagttttcaaacaaaggasctgacatcttcctagaatccttatccaggctaaatttcctgctgagggtaagaaagctctaggacatggtataacactcttgtagggagaactttctyctgtgggaagtgaagaattttttggcttcttaaatagttttcaagagaataaacgataatcgtattctaaaaatggcttcagcctttcaatttacatattggagttaccacactgttgacttgtgtgtttgtctataatgtcatcttttttttttttttttttggagaatcttaagcttatcccattatatgtctcattaagcttatccccttctatgttttaataagtcattataacatccctttcccctcacatgagtttgtaatcaattgaaaagtaaatatagagaaatccagtaaatgcagagcaaaatatcaattttcagaaaatcagtgaagactataatggaagatgtggcttatgcacatgacaatacgcatcctaatactgaaccttgttatgactcttagccatttaatcataggaagctctgaccatcactctcctctcccgactgaagcaggccttcagagtagcacgtgccacatagctggcagccaaacccgacagcaygaactctctatagaacagggcagacacatacacactcggttcactcacctccccagccacaccacctccctgcgactaagagtyttaaactcttgaactagtggatgtcacaccacatgaaagcatgaaggaggaaaaagaaggttcttactcccaaccatgtgaaatcattttttttactcaggaaggtgggatacaaagtgggttctcaactaaccgagcaayacaatatgcataaataaaagcaactataaaaaaagataccatgtcatagctattgatggcagctattggtttatattccaatcccatcacataaaaatgtagaataagtaataggaaaatattcacaggagaagagtgtagaatttcamtcttaatgagataatgagaaaatctaaactttcctgagttctgtactaccctccagttaaatttttatttcttggacataaattttttgctttagagcagacattatgccaaatatgctaaaaaaatttactaaagccacgttaataarcaagcgattyattaataaaatccaactatgcaaaacagaactgaagactaaaaagattattcttaaataaccttacttaatatttcctagtatatattcattcaacaagctttataatggactcacaactatatcacatatacartctttagggacattattaataaatgcatttatatagttattaaatattcactttatttatagatatgaagaaaagactgattactattatactagacataaaagataactgcaatacttggagaagttaaaagaaggaattctctttccacatagtcatttattttttgatagcaccttggctgttcctagggtgagtttcctattgtatgccttcagtagctttccctaataaaatgtcaggccctagagggccraggctgcatactagacggtaaagtgccccacactctggagctagtcagtcatttccagaacacataaaccttcatagaggttcatgattttaagtgagtttatgctttcattcttacagcttcttaacaagtcatttccttttgagagatgctaagccagcagtttaaatgtcasctttggcactaacctgttataggactcagagaaaatatttaacctctcattcctttcttttgacattaataaaatgaggagagaaatgcctattgtacatgattattagtagtatatttaaagcacccagcacagtgtctgctatcccaaaagtgctcgtcatgtgcttgtttctttgctttagggctaaaaaccaaaatacaacatcatgagaatcaagacatttagcggaaaagtaaaaataatctatctgtcatcaatcaacatgaataagcaaaaaaattgaaatattattttagcttttaccaaagcttaaatcttcattaaacttccaatctgaaattttaaagaactaattttggtcttktaatattagctctcattcatgctatttttttaaccacagaaaagcacagtgtcatcaatagcaattgttatctattctagatggtcaaaggcacgaaaatattttgtttgaattttcaaattgttaactgacaaawactgattgaaagtcaatttgttyattggcaagtacagactgaaaatttaaaatttattttgattttaattaaaatttctgaaaaagtctcaggaaggtgaatataatctctctgtgaaacataaataactataccttttatctactgatattttaaaactctacttttcaatgtttaagttccatctatcatactttttaaaaatctttgatagttgactctgtgttttctaattcctcatcagatgcataaaagtgacatcacagtgrtggtgtttttcattatgcctgccaagacaaataatttcaacgtggaaaccctgaaaggacaagcagtgcgaaaacagctgtggtaatctcacawcctgtgaatgttctctagcaataaatgtgaaaagatttcttttaagtgaatgacatctcatgtatcgccttgaactttgttttttccttaagattattacagacaaataatacttgactctcttttcatcgtgctactattttaggttatcgtaatgkttataacattataggtgttatacaaattttggaatgagctaccattgaaggaacaaggccctgtagaaatctttaaagatgagtcaaacatttttwaactttctattgtgaaattctaagaacatgtcaagtaaaaagcttagtaatatgactccctgtatactcatagttcagattcaacaatgatcaacgaattcccgtcttgttacacctatacctycatctactccccctctctgctctctatcctgttscaatcatcatgaagcaaaaaaattttaagctctttgtgctggccatggtgttctgttgcctcagctctggagatgtcaacttaagctgaattggcaagtagtaaaataatagaagagactataaaaaagatacctgtaatttcaaagaatgwcaamaaaacaatagcattatcgtgacaaataaagattaaacattgtcatactgtttaaatgataaatctttctgtttcaaacagggatgttgcacattctgtgaaggaaaagtttggaaaaaaactctatgatgcattattaaggtaggtgcttraaatgctttctacttcaatcacttaaggyttcactattcaaatttaacaatttagacatcataacttattaattttgttccaaatatcaaggaattaataacctttgaaaatgtgttatgtcatgtgaacagtattttacccttcatttgacaaaacttgtaaatagctgtacaaataagaatacatttatatgcaggcaagttctaattcaatgatgaactcattaagggttgatatgtcartctsaagctgagagagacttcatgagattttaattcaaaatatatattgacaatgtgtattaaatatgtacttaaatattaagtctatgtgaacacatttacttaatagaataatcaacattatttattaaaatacatgaaatatataatatataatctgatgcttaggaatcactgaattagtgccagctgtttttatttttgttattaacattttttccctgcagaggagaaattcctgasctgaacgatattttagatcgagatgatctaacaattatgaaaagagccatcttttcaactcaggtaataaggaaaaaagcacccactatgtcccatagttattaaattctatctaatcagtattttaatttattggaatgtgctaatttggaacattttcagacctgaggctagaaaagacattcttacatagtcacttaaatgattactttggacattttttcattagtggttttaagagctcctttaaaacatctcatgamacttgtccttccacttgcttacaaaattatttttgaattaatatattcaatataaaaattatgtatagtttagtaactacaaaaaagtcctaaatacttccaaaacatagaatttgagtcacattagagaaaagaatatttcttagtcgagtggaattattacaaaggagataaaacaaatgtgtcaggcttgcatcaraatgcttgttataatagggargaatcagatactggaggacagccttgctaaaagaaatcagtaaagttcatcttaagtcaagacttcaggacacctttatattccaaataagtcccggaagcaatcaagaagtccaggtctctcatatagtagctgcaggcggaaaacaaaagcttcatgtattcatagyatgcaaaggagattcttcaacccatatcttcctttgacacacacacaagasttartcatcatcattagtgccatctcaaaagactgaaggtgtgaaggttggatgaaatgtcaatgacctattgttgaaattagtcacccttattaattctttccgcaattgatatttccttccctctcatacttcagcgacagtcattgcccccagtgaccacgcacaacatgattgatgactccaccgaccccatcctcagcaccattagacggattggacttttcaacaaccgcacagatagagtcaaggtagaacaaattgttcatgtggsgaactttaaacttacttaaaatatattttctgagaatttattagctttccttagttgtttttacatctacaagaaatattttaagtattttaaaggaaaatkggttcagtttcttgtcttggataactaaagtataatgaatattttggtataattcttgaaaattgaagcatattcatagctttgagctacaattctagcatttatttccactgtacaatactgctaataagcataaggaaattacttacttttttatttcttttttttctttttttgagacggagtctcgctctgtcgcccaggctggagtgcagtggcgctatctcggctcactgcaagctccgcctcccgggtycacrccattctcctgcctcagcctcccgagtagctgggactacaggcgcccgcaaccatgcccggctaattttttgtatttttagtagagacggggtttcaccatgtaagccaggatggtctcgatctcctgacctcgtgatccaccygcctcggcctcccaaagtgctgggattacaggcgtgagccaccgcgcccggccagaaattacttactttttaatgataccaattattctaagaattatttgaatgaaagaatcgttgatattaacatggatagtgtttgtttctttctaataaagttcaacttaaggggataatatgaggaacttccagtttcagagaatgtggctgataatgtttttataaaattttctatagagcaattcattcttttgacttgagtttccacaatgactaggcacaatgttacttgctgagggcatttatatgaataagagctggtttcttccactgtggaccttaaactatatgatgtttactgagggcctgctgtattccaggcatggttttggatattgaagacaaagatgaacatgcaaacagataattgcttacctctactaagctccatccactaatgttcaagatcaaatagccacaatgaatcttttcaaatgaacccattttcacttctttctttcatttttagcagatgacctaattgataattaaataaattatgaactccttcagtgtcccccccatgctggccccaaatgtagattttgacctatccttacattttttccttcaggttcttacaactattctaagatttcaatccccacattcttaggaaacttgccttatcttttttccttctgttgtattgtacatttcattcttatcactagcttcttctcttgctatctataaatattccttaaatttctccatgttaaaaaaatcaaacaaataaatttggccttcaccctctttccctttgatgtttttacaaaaccatgggagagacggttgcatgtagaaaaggtcatccttagtgactgatggatactgggagtaagaaagagggaaaattcaagaataatagcctcttggctttagtatttaaccaatgcttcctaaaaatcaaaacaagtctttcgcacaaactggtttgaggatcatgtcatgaactgagttcggtttctgattaattgagtttgagttacatgtgagatatagaacttgagatgtttaatgggcactgagaaaacataggcctggagcttatgagggcaaccttgaaggagagacattggtgcatgggcagcagtggacatcaatgaatgatgaccctgacacactcaaaaccaggttgagggctgggtgcggtgcttcacacctataattccagccctttgggaggttgcggtaggtggatcgcttgaggccaggagttcaagaccagcctgggcaacatggtgaaaccctgtctctacaaaaaatacaaagaaattagccaggtgtggtggtacacgcctgtagtaccagctactagggaggcataagtgggaggattgcttgggccctggaggtagaggctgcgattgtgccactgccctccagcatgggtgacagagtgagactccgcctcacaaaaaacacaaaaacaaaaattaaaaagactaggttgaatgagtagagaaaaatgtcaatccaaggaaacttcaagatttaagagaaaattagaggaagaaaagtcagggaaagaaagagcagaaaataaaaagaaaaatatttcagaaattgaggtaggagaaactttcttaattgtaggaagacctcatgatacagcattaagtaacacaagcagtttataaaatgttccatgctgtggaacatttatatcaaacatatccacatgcacatagatggccctaggccatagaattgttactgagatgccatgtttttgatctgggtccccttgctggtggggcagaaagccagttactgagaaaatgagtattgccagggaagaaggctttttcrggtgctgcagcctaggagaatgagagatcagcctcatactcatctccccatctgactaaaattgggggatttatataaacagggaaggaatgtaaaacaggaattaggaaaggataaagaagcaatcatgaggaatgagggktctggcatctcattgtctggatgtgatgatctggtgagcttcagtcccttacctgaagatcagtttcctaagggaggaactcagatgagacaaatgtaaatttcaagttttaagatcagaagtgtcaatttctatgtttatttaaaaaccagtaagtattatttctataggactatggggcccctttcattataagtggtttttattttytcatttgtgtttctgtatttctgaaatatctacacctagcacacctcctataataagtgagctacatccctgggaatgcaggaatgtatccatcaaagtgaaaataatactaagggacagaaataatttctaagagatagaaaaatctatcccttagattttttagtattattatatccacagagacttatacttcattgcagagtatgtcagtactaactaggcctcattctcatatagtttaacctaagctggtctttctgtctctgtctcctggaaaggaaatagtagaggcagggaaastttatttccctgtagacttctgtttttctcagaacattttgtgtcacacttttatctaaatctataggtctttttctgaggatctgtctgctgcctggcacatgttacgtacaatacatgcagacagaagggagggatgagggaaagtgggaaaargrgggatgggtcatgcagctggcaatagttcatgcttcccttggccttgggaagactgaggctggaaggttcattgaaattggacgytctaaatgaagaatgccttgctgatccgtgttttaaaagtgtkttgcatcagtgaaacaattttccaggaatggaaaagtaccttatttcctaaacatacgtaacacttacatacctctgtgtccttcctgatgttatcatctcttctgaaatactcttatctgttattctaacaattcttctgggttccaacctaaaagtcgttatttccttgcacctttccctaacacacattcctctactccagacaggaacggttgtttccttatctgtattctcgagacactttatatctgctatarttataggagtgattacaataaattgtgtttttaaaaatgttatgtgtccatttttctagaataactcagttatttgaggcagcaatcattctcatatgtattgtctctgtttaggttctctgagaagcagacaccaaggtgagattagatatgcgaaggactaattagagaaagccctgtgaaggatgaaggggtcgaaagcaagtacaggcagggagatgcaggtcatgcaggtcaatatacccatgaggagagagcaggaaggaaggatgatgtaggaagaaccacagactgcagcccagatttaaaaatgcctcagtctgtccttcctccctccctccctccttccctgcctctctccttcccttcctcacttccttccttccttgctcacttccttccttcctcacttccttttttccttcaccycctccttccttccttcttccttccttcctcgcttccttccttccttccattcttctttccttcctagaaaggaaagtcaatgtatttaataaaaaaacaagaattaataaaaattggctaatatacaaaaaatatacacacagcagcagcacttgtgcctcacacaggggaaaagcagtggtcgaagaccactcaacatggcttttcagttaatggaagagaaaaaggaatacatacatayacatgtacacagacaaataggaaaaatagttttcgatagtgtaatctacagctaacacaaattcagaactattttacagtgcttcatttcttaatacaaaagaagcctattttatgtgtgtgtgtgtgtgtgtgtrtgtgttatrtgtgtgtataaattggtttactgttaacttattttaaatatattagtgttaatgttactacataccacttttkcctgtattcagcaacctttccattctgttttacctttatatgtacctcccacttaccagaatagtttcagattggcagacagataggtgtctgattctatgagcaattgaatatggattcctattaatagggatagggattccccaaacaaaaattgcccattaaaggcacctgttgggcagaaatgacttcacactggtaccagtttctgccagtcctgtaagttaggagcagctgctgcaatagatccagagggaaggcaattggtgctgtcagtcaagattcctggggctaagatctctagaagtaaagctgagctatatttccagggttggcagatctataaagaaggcagcagactaagtccatgamgactgtatttaaatccctgacacttatcaattttgtaaattcacttaatctctctgcacttcagtcttctcatctgtgaatggtcataaaataaccccacactcatagaactgtaaggattaaattagacataggccaagcgcagtggctcctgtctgtaatcccagttactcagaagactgaggcggggggatcacttgaggccaggagtttgaggatgcaatgacctatgaatgtgccactgcactctagcctgagcgacagagtgggaccccatctcaaaaagaattcataaataggtgctgcatttaacagcttggcacatagtaaatacataataagtattagcttcttttagttcttagcccagaatctgacacatgatkggaactcattatttttaggagagatgtgaatagggtttggtgagaggtgaagaaagcggatttatcttctcctgcaggatttggtaagacgttttataaaagagatgaygtgttagctagatcttgattaatgatctggaatttgtcatgcaaataacaggaaaggggactcaccaggcagagaaaaaaagtagaggagaaggcacagagatatcaaagcacatgactttcatagggtgagtggagatgaaagtttgtctcataatttatgtctacacagttaaaatgaatattttgagatgctcatttattatcataaggcagccacagacacacacacaaaataaatgtacagcaccttcctgacatttgctacatactcaaagcactgagagaaactcccatcaatgcagaattaggtattatattttattaacaattcttcaaaaatttggcaataacttaggcctgtgctgatttaagtgcctatttaatcacctgcttaaagaactstgtagaatggttctaaactctgagtgcattgataagtttttgatatgaatgtcatatttgattcagcaaacattgcagatcattttgaatttgaatttatttatcattttgccttagctacgtagtgtggtgaggaaagcccaggctgaagatttcatgtctcagctctgggctgccacggtgtaaaaataaactaacttcctgagaccttacttctgtcctggaataaataaagagtcagacaagcctttgtctctgtttcttgttttgtttttcctactgatctaggtagggtctgctgtgagccaggagctttcctgggcgmtttttgtacaggatctcatttaatcctctttataaccttcagctgacctctaatatcccttcctcatccctgggcttctgcaattggctggtttagagccagagcagctgttttcttattttagttatgctgtcattctgtttggctgggagcaaaacaaatgaaccatggtgttttcatgttccaaaatgggctttggagagggcaacttttcctaagcttggaaacgctaaagtagacacaatgcttttcaaatccccctttcttgttctttgccaagagagtacaacgggttgccagtttgatgattgcccagatacagtatctgtgtcttttgtctttttttgtagtgagctactttgcacataataggaactcaaatcatgttctatgaatgaaaatattgtattcacttttactttgccattttttaatttctgtgattgaattcttaagtactggrgtttgcatatcattttattcttaagtttaacttatctcytacttatggatctgctgagatataattaatgtttgtaatgtccttgaggatccaaggggtaaatctctccaataaaacaaagacttcagactttttttttttactttaatccttggcatatgataagattataaagtgataaaatcaatttaaaattgataattcaacagccctytttatgtcttatcttctttaccaattgcacaaggtcactaagattaaatgaggtaatatgtatatttatagtatataaaatgttatacaatataatgataattgttacatacccaagttagggtttttcttcaaagtaatctcttctgaagaatgcatacttattatttcgtgaataaacatgaaaagtgtctattctcactcataggtgggaattgaacaatgagatcatatggacacaggaaggggaacatcacactctggggactgttgtggggtggggggaggggggagggatagcattgggagatatacctaatgctagataacgagttagtgggtgcagcacaccagcatggcacatgtatacgtatgtaactaacctgcacaatgtgcacatgtaccctaaaacttaaagtataataaaaaaaaaatttttaaaaaaagaaaagtgtagagtgcttgtgtaaaaatagtttgtcttctttctctctctctctgtttttgaaatggagtctcgctctgtcgcccaggctggagtgcagtggcacgatctccgttcactgcaacctctgcctcccaggttcaaggcgattctcctgctccaacctcctgagtagctgggactacaggtgcatgccaccacacccagctgatttttgtatttttagtggagatggggtttcatcatgttggccaggctggtctygaactcctgacctcaggtgatctacctgcctcagcctcccaaagtgctgggattacagcagtgagccacggyacccggcctgtctcctttttctttgtctttccttttccttccagaacaattcagttctaaagccatttggtgggcaacataaggtaggtatctgcactagaacagggagggtgctgtggaagtccagagaaaggcatcagagtccaagcagtttgagaaatgtctacacaaagaggagcagcctaaagcagtgtcagagccagaatggagagaggagggcatccgtgcatgtgagggagtgtatggagaaagattagttacacagaagaagattgacccaatatgtagcaaattaaaggtagyaaaaaccaggggtgtgtgtgtgtgtgtgtgtgtgtgtgtgttctttctgtctactcagagcacttgggggaagtaataggccaatgacaatgagcacacctagtagccacgtcttgattgctaaatgccatttgctactaaagggaaccagggctgcctttagaattggctgattttagaactgtgacaggtaaagtacaagttgagcctggaacttcttgtgtcaaaaatcaaagaaatgctcaaggaacaatgaagttttgttaaatatatacagaaacaaacttgaaggagctcccactggccaaatcatggacaatttgagtgtcaaaataaataaagatagtaaggaattaggatgcattgaatgacataaggaatcagaagtccaatacaaatattaattaaaagtttaattaggaatgagagatttacacagcttcsaaataactgcctcaatacttgttaataacaaagagtaaaaagaataactttatagtggagaagccaaaaagtcttggccttaatcaagagatcaaaataaacatcatcattaatgaaaaaaatagaaaacctttaccacctgattaaaatgcaatgaaaagaacacagcaccacttctgtgatatatctgccaaagatgtgtgaactaaatctaattatgaagaagcgtaagacaaacccgcattgagggacatacatcaaaataaatatagtcttcaaaaataccaaagtcagaaaagccaaaaaagcccatgaactcttccaaattgaaggactctaaagsgatgtgacaactaaatgtaatatgtaattctgaactggatcctttggtttaaaaatcactatttgaatcatcagaaacacttaaatggggtttaagaattatacggtagtgatgcatcaatgttaatttcctgacttttatgtttgtgtaagattatgtaagaatgctcttgtttgtgtatttcccacagtacagtttatgaatggttctgaaaatatatgaattctcttcatattgtacttggaactttctgtaaatgtgggattcccagtacttttatatcagatgtcacttattttcaataaccccttaggtatgggtgaggctgagagataatctaataatagctcagtgataactgtagtaagtgggagaaataggataattcattcacagagttagcaagttaaatagctattctagtcacaactttccaattatagccatgctcttgtcattagtaatattttgtgccactcacawtgtaatggctacagrtacaacacattttaaggctaaacctkaactattaatatttttccattactttcttgagtccagaaatcaatacacagtaaatcaagccatgatttgtagtatatgcctattttcattctatgaaaactctcactgccaccaaggccattgtcaagctaccaatgcgatgtcactgaattaagagaaaatagtaggaaatagaaggagaaaatagcatgttgggcaaaatacgtgccccccaccaaaaaaaagcgctgggaaaaatagcacattgtgcaaattaattgactatatagaattgacaatatggagtactgtatatatacatttttaatagactttatttttagarcagttttaggttcacagcaaaattgaacagaaagtacagaatatcgatgctcttgtttctgcgtttccagtgtgggcccagaactggctcatacaagtgcacaagagccagtagttaaatgttcagaagctttgtgaaccagttttaaatacagctattgctaaaattaaattatataaattttaaaataagtcaactatattaaatgaaaggtarttctcaaaattcatcacatcctaattatttacttcatattactatgacctatgcagttgagactctatgtctgtcagatcttcgtggtgcaaatgctttataatgatgtgctactgctttccctgtctctgaattcrgcaacatcatattggtagcttaaaaatggccttggtggtagtgggagtatttatagaatgaaaataggcaaacactacgaatcatggcttcatttactgcgtattgatttctggatctgtaacctgtacattgtgagtggcaaaaaaaawattttctccatgttcaaaaactaatatctgacccagcaaagaagtcacttgcattactgatgaactcatgaagttccaacaaatgtctctgttatttccgctccttctactcataacaaaggaaatcaaccaacatttatgtcagagctatattcagccatcaattgaaaccataaattggttatgaatacaaaattttggaaaaataaaaatagcaaattgtgagaattaattgactatatagaattcacaataaggagtattgtatatatccacttttaatagagtttgctttttagaacagttttaggttcacagaaaaattgaacagaaagtacagtgtccatttgctctctggcccttcccatgcatagactcccccattatcagcatcccccaaagtggtatatttgttccagtagatgaacctacattggcacataattaccacccaagatccatagtttacattaggattcactcttggtgttatacattctatgggttttgacaaatgtattcatcatcatagtatgatacagaatagtttcactgccctaaaaattgtctatactctgcccactcatccctccctcacccctgacgcctggaaaccacagatcttttcactggttccatagtttaactttttcmagattgtcacacagttgaaatcatacatcatgtagtattttcagatgagcttctttcacttagtagtatgcatttatgtttcctctatttattttcatggcttgatagctcatttctttttagcactaaataatattccattgtctggatgtaccacaatttatgtattcattcacctactgaaggacatctgtgttgcttccaagttttggcaattaggaataaagttgttataaacatctacatgttataacatcttttgtcatttggtaactgtatatacatcatttatctcattaaaaattacaacaaatttaagtattaatatatatttatacttcagtgtctcagttcttaaatatttaccagcataccactgcttagaagccatggtaaacactttggcttttactctgagtaaaatgggaagccactgaacaactttgagcaagggaatgactgacatttttaaaggatcaatctagttgtgttgaatagagaccccagtgggacagaaagaagcaggcaagtatgttaggaggtgatggtctctagytgagagaggakggaggtttgcaygaagtcctctagcatgatttaatctagatggcattcctagaacatcttccctgtcccttagttccatttcagttgaataactcatgcttaaggcatgtaagagtggtctgttacacagccccctcttccctgctcaagttgggaacaaayagataaaaagacaagagcaattagataaccaaatataaggtttattgcatgtcaaagctggactggaggatatagtttagtgtgagagcaaaaatgagcactctaactccttatccttcaacctaagccttggaacctgagggaaagttaaatatgcagcatagacacttctacagaatggagagaggagaacaaaccaccacggcttttttctttttcttttgtcttatctctttttttctttctgaatctagaacrtaaggattctatagtasagtactgaaataaccaaattgtaggagatttttcactttacttgctcctttttctttttttttaaattagaattttccttttttaggtgattttgcacccagagtttctatcctccaccagtcccttrctacccakggactatgaagagtttgttagaggttgtcatcttggagtatttccatcatactatgaaccctggggttatactccaggtatgtgtcatgtatagagtgtggaatgttttgaattttgttagtatattattttatgtgcatatatataatattcaargttgatattaaatttctaataagatttcaattcttcagttttaaaaaattttggttggatttatcacagggattaatttatgrtttgtagataattacttaagaataaggatgaagattatataagtataccacggtttgggcatattttaggaggtatgtgaggtattgcctcattgaattccaaagaaaaaggaatgtgatataaaggttgtatcttatttagctatctctatctgccccatttattagtgtgaaggagaaattgactgtaagtaggattaatataataaataatagtctagcaatgttgttctttaaaaattattttagaataattctttttaaaatttaatgaacatatttaatatgtaatgggtaacacagtcatatggttagggaaataaatataaaaaggtgtacagtgaaaagtcttcttcacattcttgtgcctcaaaataaaaggtactaagagagattagcaattcagtggtattgtcaacaatgacatcattccattcagaaactcctccttcttcaccctcctttgttattttattttattttattttttaacagatggtagtttctcaggtttactatgtatttttcttttctggaccgaactggcatggttgccattagcatcaagagcgaccaatttgtacttgtactgaaatgtctaattaaaagggaaacaaatactttaaatacatgccaatgcaaagaatacaacaataacttttccatctcttattaataatcggatatttttctgcccaatgtaaataaagtttcacttgtgattttattattatttctttgagacggagtctcactctgtcacccaggctggagtgcagtggcatgatcttggctcactgcaaccttcgcctcctgggttcaagagattctcgtgcctcagcctctygagtagctgggattacaggcacacaccaccacgcctggctaatttttgtgtttttagtagagacaggtttcatcatgttggccaggctggtctcaaactgttggcctcaactgatccacctgccttggctccccaaagtggtgggattatagacgtgagccatcacacccggcctcttcacttgtgacttttaaaaagttcagaaaacatttttatttataattgagatagtaaatgttgccttttgtatctcaatgttatcattgatataaagctcaagtaaggagcagcagaggccaaggtgagagggaataataggctgaattatgaagaggaagaattttttctattatttgcatctttatcctagaattaaaatacagaatttaaaagtytacaaaaataggatcctgtattatttacagcaggaacaacatgagggctgggcatgtttggtcataaggtcctattctattgttctagcttcaccaagcataatttgccagcagctataaaaactttaaaatttcttggggaaaatagacaaaggattgtcttgaaacatgacataggaaatatttgtatctaactcttccgggtatctctcttgcagatctaaaagtggcctacttttgtgaaggtggtgtcttcttacttaggaaatgtccacataaatatctcaaattgcttgcaatgcactatcttttgagatacataaagcacacgtttcactgatgaacttaacactttgtttttgaccttgttcttattatttctagtaaaayaatttactattggaagtatcatggatagaagagtatacaaccaaatgcatgagtgactgaggcaatgtgggaagtcctttctgtcgggtcaagaaaatgttatagaactaacagctgactgtccaccaaagtgtcattttatagggcaaagttaaacttaacaacccaaaatgatagaggagatatatctactgttttaagataaaggccaaagaagatgttacaaaggatattataaatagacaaataagggagtttgtggaakagtccatagtgaatgagtcatgctgtgttttacattaaccaaagggagctggtcactcttcccctaacctatagttacaggaagaatgcgacttctggtggtatacatttaacattagcatattagataacttgctaatgtttttagaataatctttttacgtgttactagacttaactcactctagaaagcattcatccaaatgtgttttcagagagccaaataaatataagcatttatttcattaaattaattcaatgaacatatactaaacttcatgggtgcctggaatattactacatagtgaattgatggccatttaataaacatgaaggatctgtgaactttcacggcattgtagacaaaattttgtatacatatgtgtataagaatatttctcttcatcatcctcagcaaactaacacaggaacagaaaaccaaacacygcatgttctcactcataagtgggagttgaacaatgagaacacatggacacagggaggggaacatcacacatcggggcctgtcgggttgyggggcgaggtgagggagagcattaggacaaatacctaatgcatgcagggcttaaaacctagacgatgggttgataggtgcagcaaaccaccatagcacatgtatacctatgtaacgaacctgcacgttcagcacatgtgtcccagaacttaaagtaaaattttttaaaaaagaaaataagagatactctccaactcccaactcccatagaaggtggagctgagtccaggaggaagwctgaggaaataaaagtgtgtaaaaattaaaaaaagaagaatatttctggagaggagttccaaaatgttcatcagactctcaaaagggctgatagtccccatcccactttcctcctctgcaccacccaccactaaaattagagaaccacaactccacagctatacagctaaaccaagaggaaacatttgcagagcaagagataaggttgctgtctagattgtattacttcatgggtaatgggaagatctttttttcatccaactccactcaccaaccaagggtaattccattatcaaatataaattcctaaaaatgtagacatccttgagactagtaaaatttttaagacatatcagttatttcctggaaaacagattttgattaaaaggtgagggaggactgcaagagatcatccatttattgagctcctgagagagtggaaggaatatgtgccaagggagatttaaatgggggaagaagctggtcgcatccaaaacatatttaacctacctcataaacttgccaagtacttagaaacacaggctagaaagaagcaagaaacaaaaccagctgggattgaagctgcagtggagcccggcagttcygcacaagggttctgcagccgggtgcctgacttcaaatcccagctataccacgaaccctggctttgtgaaggtgggaaagttattaatttctctgtgcctcatttcttcagctgtaagatggggataatgatggccccacttcacagggttgttgagagattaaataagttagtgagacatgtaaagagtttagtgttgtgactgacacatagtgaacatygctattcttaggaggactagggccttttcctcctctgagygcatacaaggatataggcgctggtctgaagccaagctttggtctatttcccctggcagctgaatgcactgtgatgggtatccccagtgtgaccacgaatctctccgggtttggctgtttcatgcaggagcacgtggctgatcctrctgcttacggtgagggttttcatcattaacccatgctggggagacatgacctctaaccaaacaaagcacagggtctttacagagcctaactctaaagctatcctgataattaaactaatgtttttatatttcttgtttaattaaaagtcaatttaggctgggcacagtggctcatgcctgtaatcccagcactttgggaggccgaggtgggtggatcacttgaggtcaggggttcgagaccakcatggccaacacggcaaaatcccatctctactaaaaatacaaaaaaattagccaagtatggtggtgcacgcctgtaattccagctactscagaggctgaggcactataatcacttgaacctgggaggcggaggaggcagtgagctgagatcgtgccactgcacacctgcctgggtgacagagcctcaggctgtctcataaaaaaaaaaaagtagatttataaatagaattctgtcctttgcagcaacatggacgcagctggaggtcattatcttaagtgaattaatgcgggaacagataaccaaatactgcatgttcccacttataagtgggagctaaacattgaatacacatagacacaaagatgggaacaatagacatctggggactgcttgagtggggagtgggggaaggggcgtgggttgaaagactacctaccaggcactatgttaatcacctgggcgatgggatcatttgtacaccaagcctcagcagtatgaaatgtacccatctaacaaatgtgcacatgtaccccctgaacctaaactaaaagtggagaaaaaaaagtagctttaaatatgtggcccacagataacataagaatgctattaatattaatatattgcccatgagacaaactgcaaaaagagtgcaaaacttggacaaactttgtcctttacctttttcctccctgaattttgatcccttctgctgcctagaaatgatatgacaataaccatggtcttagagtgcatatattggtcattagatagtacatatattattattattgttatcattactgttattattttaaaggcccgtgacaacttagcaaagttcacctaaattgtttaagatggcagaataatttgcataccattatctgtctgttcatattccctagcagcaagaaaagttaaaatgggatatattgtctgccaatacattgccatttccctgggttttttttttttttttttttttttttttttggaaacatggtctcactctgttgcccaggctggagtgcagtggcctgatcctggctcactgcagtctccacatttctggctcaggtgattctcctgccccaacctcccgagtagctggggctacaggcgcacaccaccacacctggctaaattttgtatgtagagatgggatttccccaggttgcccaggttggtcttgaactcctgggctcaaggaatccacccacctctgcctcccaaactgctgggattacaggtgtgarctaccaagccctggccttccctcagtcttttatgggtgtactgtggctctttcctcaggctagatctggggttttcagcctcggctgaacagtgggaacactggggaacataaaaggcacagatatccaggccccgccctggaaattctggttagtgagcaaccccatggaggatcactgatccagcgtatccctagactgccagagtttttttcagcaagatccacttcgttggctgtgtgtcagtgatggttgtaaaccattagaagggaattagggcctcagaaaagaataaagtgggggtaattcctgagtcagggggtagataatgcataggtttttgatggaaccaaagagttagtaaatcacaggagaacaaatgtttaaggttagtcctacttttacttgtgctttggcttttgtgttcttcaggtatttacatcgttgacaggcggttccgttctccagatgattcttgcaatcagctgactaagtttctctatggattttgcaaacagtcacgccgccaaaggattatccagaggaacagaactgagaggctctcagatcttctggattggagatacttaggcagagtaagcaagtttagataaacacagcagaccacttaaaaaattccactggactataaacatattgattctagtcataatctctaaagttaatccaatattwwaattgttaaaatctcagtgtctccatgtactttttaaaatttaataagtttacaaagtcctatatgtatttcttcatgtttcgtttgagtctattcataatagcaagtccatcaggatctagcactgatcttactagctattccattgtcagtgcctcacttgatgtgttactggtataaggaaacattttatgaagttgaagaaaacatcaagagaaaagtccctactttgtttctctctagagaaatagtgtagtcatatttctcaactgtagtgagtaatgggtataatayggtttttcaaaatgatgactacaggaaatacctcctttcagtcatgcaataggtttataaacacctggatgctcacacagcttagcagtggtgatttaataataaatgaattgactttgccttcacataatgtgtctgtttgcacagtgctgaacactcttggctgaatgagagatgctgccatttgctgagtatctgcacacacaaatgccagtgctcattacaacctggatgattaattttactatctccatcttgcaatgaagatagatacactaggcttttagaagtgatgtttcttgcctaaggtctgaagcaggatttacacccaatttatctgaatattcaggccctatcttttctccatgccacactgcttctctgtggaatgaaaccagtgttttcagtcaccttaatgctcaattcagagctcaatatgaccagtatgggcattcttccccagcattttatagtattactctgcctatgggttgaaaaatagtaaaactataaactgtaatttctttcctgagtctcaaacttagactgcatagattctgtcactttaaaaaatacatatgtttcagaactaggagaataaggccttatttaataacttgattattgagatatctaagggtttttattaacctgtgatttggctttctatcaatagtattaccagcatgccagacacctgacattaagcagagcttttccagataaattccatgtggaactaacatcaccaccaacggtaaatattcaatgtatttttttttgaaagctatatttctttttataagtttaaataatacatttaaatttggaagtagctatgcacacaagctatgatactttttcataatgttgaatcaaaccaaaggagagagagaggaactcacaaatcagactgtcctaaagctctcaagacagttaattcatctcattggagaagcatctctgaattaaaactttctctgccttaatrcttgaaatggttctgatggacatttattctttggggagttgttcaaaaacaaactggactgctttarttgaaagtgaatttgctctccaaggaagtgtttaaatatagggtgaccgcttggcaagagtaaaatagagtaagttcagcaccccaggaggaattgaactagatgagcatttatggtccattcatcagtgcccaccagggtgtcttcttctaaaatccaactagacgtttatgttcataagactgctataggccacatttgtcatcagattcacttagcagggagaagacatgaggtgccacttgaagcaggggagcgtcaggcatttctctttagtgggatcagtccttgcagtagtctacacagcaatccaagagctaaacatctttggccgcctacacactaggtgacagcttaggtgcaagaagataagacccataccattgcaaatgagatcaccttagcttagtagctgcatgccccacaggagcctctatctcatgtaaatctccgcaaaccagctttcatgctccctgcaaggaatatgcccaattatgagtcatcttataagagtcattcagagattcccaaaaactctggcgccttatcaagtatttatagatttttcagttcagatataatttctcaatcaggggtcactgtwaccataaacaaccatccctaataacatgacttatattccacctatatcaggtttccagaggaacagatctagaaagttaacctgaagtaaaatttgcccgtaaaaaaggtgataaggttttcttaaaccctcaggctacaaattctgactttcatgtttatgattctagcattcagagttgattgcttagcttattcagaggtggtcattccacttaatgataattcagcaatattcatccatttatctgcttatctacttatttatccagttattacgtctaataagcattgagcacctacttcaagctaggtctcaagtgcagaactcagttcttttgttgtattgctgacaggtaaagtatctgaaccttaaaatgactgtacatgtatgacatgatataatgtataaagtaattgaaatacagagtgacgagcgctataacacttttacacatctgtctccccattcaattatatgcactccaatcatgttttttcatctggtttcttwagtggcattgcagtgtgtgtttatcaaataagttatctcagtatctcaagtagaagggcaaattaattaaagtctagtgatattttctcattaactgaaataacagcaactagtggaattgtagagtcaattaagtgacctgacttccaggatgccttctagtggtggccatccatggcatttccaggctatccacatccaaaagctttgctgaacaaatttgagacttagagactaacagtatcagcagtgtaaggtggcagttgacattaaagtttctggagtcatcacagacctggtacaaatctttgctctaccatttatgtgctgagtgatgttgggcaagttacttgacccctctaaccctccattttcttctgtactgaaaaaaacatakttatcagagtgttgttaaaagataagatgataataatatgtatataacacttagcacatttcagtacttaataaagaatagctatatattgaatgaatccctcttgagattggtggtatcaaaatcaaaatgaatcaaagtttaatagcacccagactacaaaagatagataactacttaaaaaattgatagtgcatgcatagtatttacatcgttgaaagccaagaaactgttgtgatgtttatgtcttatttttgtctttggcagacagaaggatttaaatatcccaggccttcctcagtaccaccttctccttcagggtctcaggcctccagtcctcagagcagtgatgtggaagatgaagtggaggatgagagatacgatgaggaagaggaggctgaaagggatcggttaaatatcaagtcaccattttcactgagccaygttcctcatgggaagaaaaagctgcatggtgaatataagaaytgaattctwcatgtgctgcatgaagagctaatttaaaaaagcaaagtaagactaattatttaaaataaaaatgccacaaatttmattttctccttctaagtattacaatggagtttattctctgcctaaaaagtggaagaahttgagtgaatgayaattttgtaatttaggataagatccaagttattttccccaactcttgtttcccccataaagttaggcatgaggaggagcactcattaaaggcagaagacggaaaagtgtttttaaaatggtgaatttaagtggtaaggattttctcttactctgtttatttttaaatgatcatcataatcctttgcttactatttatgcagcttctctaccccaccacacaaatttcccatttcccccccgaaaaccttgatcttacccatgaatgtgcactacctacattttttaaatagctaggtttttactgattattttcatttttcacatgcatcagaaccatgatttagatgtagttttgcagagacaaaaatccatgagtgaatagctatcctaagtccatattttgatgcatattaatggacatttatgtcacttttgaaatctagaattgatgttgtaattaatgcaagatattaccatgtacatggtaccaccatcttactgtaacatttttctattgtttaaatagaaagcctttttaaaatttggtcaatcttcatagatgataacttgtaaaatccaagtaaataaacacattaatatttaataacttaactttcactggtaatgccttgtttcttcatagatgataagttgttaaatccaagtaaataaacacattaatattgaataacaactttcactgataatgccttctttaaaaattgtttagacattcgaataacatgtgggaagcagctgttatgaataattcctagagaagctatctttttaaaaaatagttagaaaaaatagaacatctattcagttgtaataatgacaatgtctcaacatattctgtgatgtgcatagagtcatagatgaatgattattaatttagccgatttatgttttaagtgtaattaagtctaaattggcaacaaaacaaaaacaaaaatcacactcttggattgcttttttgctaactaagtagttattcattgtgagttccacttaactcacagtgagttcctttattgacatatcaattggccttgttctgaagaggttctaaaaaagttttggtcttctcagtgctggattattgatcacaaaaatggaatagcagcaacgacaaggtgtcaggtggttcaagaccactggaaaactgtaatccagccctcctattgctgcagtagctagaaaaaagtagaaaactgttggatacaagcagcaaatcagacaaaaatggaagatagctggaaatttactttacttagatgtccagaaagaagagaaataattgacctaaaatctagcctttgacaaatgccctgtggatgccaattaaccgagcatctgcagagcagtttgaaatgctctgtactggagagtagaaaaaatatgagaaggacttatattataggctcattccctgaagtaccagaaagatactgtgataaactagggttcactgttacaataaccatgaaaatgtatccccagtaaactagcttaacgtgtctattcaaatgatactcttgattggtaactggttgcttgactgttattgaaaacatgcctacacagtaaaatacctgaagatgtaagtgctttttgttcaatgaaataataatttgatgataataagtgtgtacaaatgatagggcacatggaatttagctgacttacaaatacctggctttggcagtatgtgtaggaatcaccttctatcctctactcagtcccctattcagacagctgctgccaggtgactccatccctccactgtagtcatttcttcatccttttccccaagaccgacaaaagctggtgaggagaagcaaatatgatttttagtagaaggctctgtgtctagtacagtgccttgtacataatagttgcatagataaatggtcttattgggagacatagaggttcaaaaaattttgcttttaaagaatgtatgtattcataaattgaaggacaggaactatagaaaacgtgtgtggtgcctgatcagctgagagaaagacccgttttatggattgtaccacctgctatggtttgaatgtttgtgtgccccccaaattcatatataggtgctcctcaacttacaatgggattatgtttggataaacccactgatattttttctttcttcctttttctttctttctctctttttttctttcttaccttctctcttttttctttctttccttctttcctttttcttttctttctttttcctttctctctttatttctttccttctttttctttttctttttgacaagagtcttgctctgtcacccaggctggagtgcagtggtgtcatcttggctcactgcaacctccacttcccaggctcaagcaattcttgtgctgcagcctcccaagtatctcagaccacaggcatgtgccaccacagctggctaatttttgtattttctttttagtagagacagggtgttggcatattggtcaggctggtctttgaacttctggcctcaagtgatgtgcccaccttggcctcccaaagtgctgggattacaggcatgagccaccatgcctggccagcccactgatatttttaatttataatgggcctatcagaatataaatccatggtaagtcaaggagtgtactgtgtgttgctttcatcccatcataaagttgaaaaatcataaatcgaaccatcataagttgggcccgtctgtattgaaatcctaatccccaatgtgatggtatccacaaaggaggcagagcctttgggaagtgattagatcatgtggacagagccctcatgaataggattactgcccttataaaagaggccccagagagctgccttgccctttccaccacgtgaggacacagcaagaaagcgccatctatgagaaatgggccttctaccagacactgattctgttgacaccttgatcttgaacttctcaggctccagaattgtgagaaataaatttctgttgtttataagccacacagtttgtggtattttgttttagcagcctgaactgatcaagatactactgtctcttccatagtaagagttagagtgaacagaactggttttatatatgcagatgagaacataaatgttacaaggtgttatactaatagttttccagggtacaaggaagactcaggagggggactagttaagtctacttagggaggtccgaagagtcttcactgaatgaacccaaatttctatgagtactaagggcaataaaatggcccatttcacacagttgttgtgaggatcaaatcaaattaaaaatgagctctttctaaaggaatttatagcccagtatgaagcgaccgaacagaatgaagttacattcccaacttccctttctttgtggtcaagataaaataatgtaattcaagattgtaagatacacattttcatttatcataaccaggtaaagaagaaatgcaagctggaggctaatctgaacaagccagggtcacttcgccttcttctctcctctcttaggaacacaatgatggtattgagggagcgaaggcaactactggaaaacaaagaataattaagagcccaggatggaggccagatagccgaggtaggctatagaggcaaaaaagagaagggcaatgagaactgtgcagaaagtggctgaaagcgctccctgcagatcaaggtattctagtgcatgtatctgtgtgttgaagccagaaaattcccaattttaaaacacaagccatataatgtgaaggttttctgatctatgatcacttgttcattttggttttttaaaaatctagaaataaacagaatatagacaccataagagagttggaaagttatagaaaattgggaagagggaccttttaattaatcagcatatttgtacataagaacattcaaggaatttgagtacttagaatacttggagctatattttaacagctattgatcattgagacagcttttaaaacaatggttagtatgacatttttgagattgttctggttagttgtaggaagaattatttcataagatagatgttaaaagtgttctttgaatacacatactattttgaatagtcaatttgtacaattttatgtctgatgggtaaataatttttaatgtcccacccctcctaatggtgaagtggttaggactgtataaataaaagacaatgcttttggaaaaaattttcaataaatcagatgtaagcactacctagtaagtctactttcaaatcaaatcataattaatgacaggtgcctattataatgccatacagatattttaatgctcacaagttatttttcgacggagatcaacattacattaacttgaatttagtttcattattaaattatgaaacaagatacagataaatcttataagcagagttctgattacttaacacagtgaaattgcaattccaagttacagagacattcacataaagatattcttgagctactaaataatggctaaatactgatgacaataagaattaatactttccacttatgacatttgtcaataacaactctgattaggtaaaaaataattaacatgatggtcatattataattctaaataaatacattattatgtttgccacaggagtaggtgtgtatgcgtgtgtgggtatatgtgcatgtgtgtgtattcagatggtactgaactcaagttggcttttaaaaaggaagagatcaggcatattactgtgcacttatgttatcagagtgatttatgtaatgctatgatgtcaaataaaacctagagtctagtcaattagagtaagcagagtacttgaatctgttgagtctgtttggtcatggaaaatgagttacctctaacaaaactggcttgttcccttcttccaatacgtaaacaacagagtgtgtctccatctgcttatttcccagtaacttttagatccatgtttctaaactgaatgcaaggtaattcccaaagagcacaaagggagctctgagctctggatctttggcaaaccttctacctcaatgactgtctcctctcagcaaccacactgaagtgttcctatcacagagcttctccacagtcatccaatttatcttcttaattgattactcctggatgagctatagagagtcatactctcctatttcccatcctgccatgtttctcaccttccttccacattcttggggatgggataaaaggaaaacagagaaggagaatttctgctgagtgaaaacaaaatgcaagtgggtaacaaaatgaaaaaaaaaaacacaactaagatcaagacaggtactggctatagttaaaaggaaagaacactttagtcttcagccttataattataaatattctaagaaactcaagagtaagacacaaggtgatctgaaaacatttttggtcatctaaacaggacctgaagcaatgaaagaagatgatgttctcagctaagcatcctatatatattttgtttctgaaagaataaaactatctgtgtgtgttcttaagattacaaatggaataaaagggtccaaaggttttattcacatggttcatgttttcaaagagaatagaaccataattaaacataatccagtatattttcaccagttaagcagactgtcttccaggaatctggtttgatcaaagtttttttcttcatctgtaagaaaaaaaaattctttaaaataaatatacactctgcgttttaatagaggaaaaggtaagacaaagagaatctcaggaaataaacatttagccttctaagctatgttaacttatggactctgctactgaaaatttaaacaatatgggctttgatttgctcagtttaaaatctttttttctcagcttgggacacattggggaattcatattttacatctgaacctctataatgactgaaactacagtatggtatgtctggtaaaaatctcaaaagtcatgtgtcttgctctcacagattgacttatatctaaaatacccaccattaaaataattcacttgcatcaaaggactgtctctttatatttcctgttaaaatggatcttgctcgggaaagatgacatgggaacacatttgcaaatgttcttttattaggggagctagagttctggggaggaaatgagacaaaaagaagaggcactcgtttgctggctgggatcgcgaaactttagagcatgaggtatcacttctgaggtggggatacttaaagagttagacaatagcaggttcctgggactctaaaaataggatagaatgactaaaagttacaatacggtagggagaagcagtggccaggggcaaagtgcatctactaatttcttctaagatcacctctagataaaagcacattctttcagttagttgcaatataatttgaatgtttgggttacatcttaacctgaatttctagcacactttaaaccattgcagaaaatgggcttctctttaaagggaaggaagaaaacaaaacaaaacaaaaccaaaccagaacggcgtccctgtataaattccactgaaaccataattcactaaataagagccttctaaataataatgaggtagtatagaataaaaatactaaagaagactagtga

SEQ ID NO: 95238 - DNA, 45285 bp, Homo sapiens
ctcattctgttgcccaggctggagtacagtggcgcgatctcggctcactgcctcctgggttcaagtgattctgtctcagcttcccgaatagctgggattacaggcgtgcgctgctacacccctggtttttgtatttttagtagagatggggtctcaccatgttggccatgctggtcttgaactcctgacctcaggtggtccacccgccttggcctgccaaagtgctgggattacaggcgtgagccaccactcctggccactactcttcatttagtgtcttccttagcagcgcttgtggctgtcactccagaaggcatccccaggcaggcagtgctgagggccacttggccatgacaggagatcatgacgggagaacagacgggcaggggggcggtggggaaaggccactgatgctttctgtctcccagggcgggggctgtcggttcctgcgctacaactgttccatccgagccccaaggaagggctggaccctcatgcaccctggacgactcacgcattaccatgaggggctccccaccaccaggggcacccgctacatcgcagtctccttcgtcgatccctaattggccaggcctgaccctcttggacctttcttctttgccgacaaccactgcccagcagcctctgggacctcggggtcccagggaacccagtccagcctcctggctgttgacttcccattgctcttggagccaccaatcaaagagattcaaagagattcctgcaggccagaggcggaacacacctttatggctggggctctccgtggtgttctggacccagcccctggagacaccattcacttttactgctttgtagtgactcgtgctctccaacctgtcttcctgaaaaaccaaggcccccttcccccacctcttccatggggtgagacttgagcagaacaggggcttccccaagttgcccagaaagactgtctgggtgagaagccatggccagagcttctcccaggcacaggtgttgcaccagggacttctgcttcaagttttggggtaaagacacctggatcagactccaagggctgccctgagtctgggacttctgcctccatggctggtcatgagagcaaaccgtagtcccctggagacagcgactccagagaacctcttgggagacagaagaggcatctgtgcacagctcgatcttctacttgcctgtggggaggggagtgacaggtccacacaccacactgggtcaccctgtcctggatgcctctgaagagagggacagaccgtcagaaactggagagtttctattaaaggtcatttaaaccactgaagggaagatgctcagggcgagtgggtgtgtgtgtgtcttggtgtgagtgtctgcagggagagaggttttaagagccctctttttttttttttttctttttttgagacagagtctcactctgtcttccaggctggagtgcaatgacgctatccccgctttctgcaacccccgcctcctgggttcaagtaattctcctgcctcagccttccgagcagctggggctacaggcacccatcaccacgcctggctaatttttgtttttttattaaagaaagggtttcaccaggttggtctggctggtcttgaactcctgacctcagatgatccacccacctcggcctcccaaagtgctgggattacaggcatgagccaccgtgcccggccaagagccctctttttagagcctttaagaaaggtcatgctagcctctcgacccctgagtagctgggattataggtatccatgcctgacacatttttgtattttttgtagaaacggggtttcatttcaccgtgttggccaggctggtctcgaactcctgacctcaggtgatccatccgcctcggcctcccaaagtactggattacaggcgtgagccaccatcccaggcctgaaagtcttttaaaaaagatttttgaggccaggcacagtggctcacacctgtaatcccagcacttaggctgaggcaggcggattacctgaggtcaggagtttgagaccagcctgggcaacgtggcgaaaccctgtctctactaataatatgaaaaaatcagccggttgtgttggcatgcgcctgtaatcccagctactcgggaggctgaggcaggagaatcgcttgaacccaggtggtggaggttgcaatgagccaagattgggccactgcactccagtctgggtgacagagcaagactccatctcaattaaaaaaaaaaaaagattttttagtcttttcattttcaaaattgactcattgtaaattcaaacagcacaaatcttaatctttctgtcatcctttccccccagctgctcagttcctctctctgaaagccaccatgtctaatctgttttttgaacgttcttgagctggtttgtgccgacacaagcctgtgtgtgtgtttgtgtatgttagggttatttttgtttttgtttttgagatggagtctcactctgtcgcccaggctggagtgcaatggcatgatctcggctcactgcaacctctgcctcccgggttcaagcaattctcgtgcctcagcttcccgagtagctgggattacaggcacccgccaccacgcccagctagtttttgtatttttagtagatatgaggtttcaccatgttggccacggtggtctccaactcctgacctcagatgatccacctgcctcggcctcccaaagtgctggcattacaggtgtgagccactgtgcccggcatagggttgtttttaactgttaacttttttctgattacaaactcatcttcaccatgaaaaagtcaaacaaaataggtaacatggggggccggatgctgtggctcacatctgtaatcccagtactttgggaggctgaggcgggtggatcacttgtggtcaagagtttgagaccagcctggccaacatggcaaaacccccatctctacaaaaaaatacaaaaattagccaggtgtggtggcaggtgcctgtaatcccagctacttgggaggctgagctgggagaatcacttgaacctgggaggtggaggttgcagtgagccaagattgcaccactacactccagcgtgggtgacagagcaataacctgtcaacaacaacaacaacaaaaagtaatatggaccgggtgcagtggctcatgcctgtaatcccagcgctttgggaggctgaggtggtaggatcacttgaggccaggaattctcaaccagcatggccaacatggcaaaaccctgtctctattaaaaatacaaaaataaggtgggctttatggcacatgcctgtaaacccaactactcaggaggctgcagcacgagaatcgcttgaacccgggaggcagaggttgtagtgagttgagattgtgccactgcactccagcctgggtgagagagcaagactcttgtcttaaaaaaaaaaacaaaaacgtaagaaagaaaggtctcctggagttgtacatcagtgtgctctgcacccattcccaataacactcagcactgctaggagagttttgtcatcccgagggttgaaacgaggattcagccatctcaatgagaaacacatgttaatgggttgaaacatatctccaaactgagatttcctctacttgctgggcaagtatgcagatgtgtttcagagataaagcccagctgctgggcagagtacaagactaaatgcctgggaatggattcagaggttcctacagcagtccaggcaagtgaccaggacctagaccaatgcttgcagggaaatttagggaagaggagggagtgggcaggggagatgtttaggagagagaacatccaggctttcacctgacgggcaagattctgctaaaaaggaaaaggaaggctgggcgtggtggctcacacctgtaatcccagcactttgggaggctgaggcgggtggatcacctgaggtcaggagtttgagaccagcctggccaacatggtgaaaccccatctctactaaaaatacaaaaattagccaggcatggtggtgcacgcctgtaatcccagctagtggggagactgaggcgggagaattgcctgaggcggaggttgcggtgagccaagatggtgccactgagctccagtctgggcaacagagtgagagcgagactctttctcaaaaaaaaagaaaaaaaaaaaaaaagaggaaatggaatttatagttcctgccctcagagaatggaagtggaatttagagttcctctccttagggagtccagagattgtggaggaggaaacaatccgacccagtaccaggcagctagcagctgaggccccaaggcacgctacatcccagacagggccctgtctacaccctgaggctgagtctgcgtgtggccccacagtccacagtcagacccgcggggcactaggctactcagagggcagtgtgggcaggacagctccctttggccatcgtcatgagactgataaaccagtcacttctatatcagagtactgatttgcctcttgaggttgtttgtggcaataaattgaggttgttctaccatggttatagagcagcaccatcccacagaattacagtttgacccacaaatgcaagctacttatgtaattttaaattttctagtagcgacatttttaaaaagaaacaggtgcaattaatcttagtaatgtatttaacccaaatgacccaaaatattatcacttcaacatgtagtcagcatataaatagtaatgggctaatagccctgcactgtggcaggtacctgtaacccggcattttgggaagccgaggcaggagaagattgcttgactccaggagtccaggagttcaggacaccagcctgggtaacaaagtgaaatgcttccccatgtctacaaaagataaatactaggcatggctgcagcatctgtggtcagctacttgggaggctgagtgaggtgggaggattacttgagcccaggagttcgaggctgcagtgagccgtgattgcaccactgcactccagcttgagtgaagagtgagactctggctcaaagatagattttttttttcttttttgagacggagtctctgttgcccaggctggagtgcagtggcatgatctcggctcactgcaacctccaccgcccgtgttcaagcgattctcctgcctcttcctcccgagtgcactatcatgcctggctaatttttgtatttttagtacagacggggtttcaccatgttggccaggctggtcttgaactcccgatgcacccgcctcgccctcctaaaatgctggaattacaggcttgagccaccgcgcccggtcgatatttttttttcctaaaaattgagatagtttaacagccttttttgtcctaagtcttatagcgcatctccgtttgcactggctcaggactcgagagccacacgtggctagtgcctactgttctggcgcgctcaggcttggagccttctctgcggaggccaagtcctgcaagggatctgtttgctgcggtttcctagtagtgtctgccgcatcactggggcccggtgatctgggtaaccatgtgagcttgggtaacctctcctctccctctcctgggactgctgtggacgttaaatacagcggtggatgttagagacgcagttcagtcactggcattgattcgccgttgttgctgctcttctttcctcaaaggcgactgaagggcagcaggcccatgctcgcttctgtctgcccgatgagtcacttcaccctaggcctggccctctagagaacactcctctaagattacagaatgcaaatctggattccagagctggcagaggccccagggtcaggctctaggacaaccggcgaaaaagcgggaacctctactccacgcccttggtttttcgccccttgacagcttgaggctccgccccgctttgccccgcccccccagctccggccgacgcccaccggaactacagcccccatgatgcagtgggagtccgagcctctgcgtcgtccgcttgggacgcgccggcggaggagtggcgcgcggaggagtggcgcgctgagrcgccgctcgaagcgccgagtcgcggggcagcagaggcgtaaggagtaggcggggcgagccggctgggctcagggtccacyagctcacccgggtcgaggggcaatctgaggcgactggwgacgcgcttatccacttccctcctcccgcctcccccyggggtggcgctcgctggtgacgtagtgagtgtgatggccgccgcgaggccgggaaggtgaaggtgagagggcgagcaagccggggtggcggggactggcccggcccggcccggcgagtcctgagcagctcggcgtgggccgacgggattctggggccacgggggtctgggatgcagtcaagcggggtccccactctccggcctcgccgccgggccctccccggccctgagaggagggggcgggccacgggacctgggactggtcggtggggtcccctgtagcttctcatcgcccccgcctttccacccttcacggccatgttctacccctgccccttctctatttttcatcctgtcttcattttgccagcatttactcagcacctgataggtgtccacgttcaccgcgggagcgccctgccatccccactttgggcagttactgccttctcgttcagccctgtttacttatatgacttctcaccggactgtaaggccctggagggcaggactgtttcttatccatttctaacgtggcgcctgacacacacagagaaggcacacagaaaatgttgaataaatagctgttaagacgcacgaaggcagaactgcccgttaccccctctcgtaatccttcattgccctctttaaattctcaatcatctctctctcttctacccagaaaagggctctggttatctcttttctacccagaaaagggctctggttatccgcctctggtgtcccaaggtttggggcttgggggaggaaggcagctcaatgtagttaaaaaaggaaggaggccggtcgcagtggatcacacctgtaatcccagcactttgggaggctgaggcgggcggatcacctgaggtcaggagttggagaccagcctggccaacatggtgaaaccccgtctgtgctaaaaccaaaaactagccgggcttgctggcacacgcctgtaatcccatctactcaggaggctgaggcaggagaatcgcttgaacccgggaggcggaggttgagccgagatcgcgctgctgcactccaggagctttggagtcaaagggagctaatatttcagatcccagcttagacaaatcttcaagtattccagccctctgtcccacagaatagagaattaagtgagatactttacagtagctgaacacattggctttcagtcagttcttctgttcctcaatagtcagctgttccacagtcctcaagcccagttttgttcctagttttgctctgtcctcttctcccctctctggatgtacctttcccagggctcctgcagggacctccgtggtgcctcaaacccgcacatggcggaatacgtgtgcacagtcaggattggtcccacacctctgcgtttttttccccagggcacttcctcacatgccagcgcaactccccaatacctcaatgagtaagcttccctcagggatgagtttgtttggcttgaaacctgattagacatgttttgtacaccagtgttttttttttttggacaccggatccatctcccttttcttttctaataagtcaggactggtggagtcaacacagtcaatcaatagccaacctcaacytgagacaggacagaagagaactcagaatctttttgtcttttggacttcagccatgtccatgatgcctaccctgtgaagatctctcaccatccaaaaaagtaagtagtagctgtgacttctggcaccctggatttgagctgagtggacaggggtgtgctctcctggacctctggtggcaagtctcttgratggcatcctctttgtatagagccacagctttctaacttgtgttgaaaaactaccgtatcttttacttccgtgaaggatttcgctggttgcttagagagcctgtttaaaagttgacagttcagaagtggctgggatctcttgggctccctgaagagttagtctctgtctccctcatttggtytctgctgtgctggctcttccccatctcggcccagcacaggttggctccttgtcactgctcttytaagactctgctctgtcccctttaccctgtatactctttttgtttcgatttctcagcttctcctcttttccagttgtgccagcagacgatccgtggatccattttattttccctgctaggagttgctgtacataacactgggtaaggaggtggtgtggattcagggactgtgcttgggatccaaacacaccttgcagtgaattttgctactgctgtctctacacccaagatacctaatactcctcaacraatagcctaggttgaggcaaagctgttgaccaccttggagggctaatagcagtttccatttagaactgggttcatttctggtcttaggttaatatttattaatactgtgccctggcactttttaggggtaggggcaggagagtaccagaaagagtgggcttttccctaaagtgtgatcctcgggattttaaaagctattacacagaagggttttttcattgattatatttgtgaaatgctgaattcaacacagttaaactagtgtctttacaacaaggcttccttcccaaactcttttgctgtgctcacgtgctccactgaggaaaatggtagcatatggtgttttttgtttgtttgtttgttttttgttttttttgagacagagtcttgctctgtcacccaggctggagtgcagtggcgcgatcttgcagtggcgtgatcttggctcactgcaagctctgcctcccaggttcacactatcctcctgcctcagcctcccgagtagctgtactacaggtgcatgctgccatgcctggctaattttttgtagttttagtagagatggggtttcaccgtgttagccaggatggtctcgaactcctgaccttgtgatctacccacctcggcctcccagagtgctgggattacaggcgtgagccaccgcgcctggcctagcatatggtgttttacaaactgattctactattgaaccttctttacatgggatattgggtgcaagtcgagttctgtggaccacgctttgggaagtgctgccagaaactatccaaaacagtaatctccagagcacttatgaggcagtcacagcttgaagtgtgacgcttagtgtgtcactgatgttggagctgggctctcaggctatgcttgcaggatggtccccacgtgcctgtggcaaggtctgtggtgaagcagagattatcaaggctttccagaggcagaggagraacccagctgccctgcatcaccctggaggagtagggagtcagcagtcaaagccttgagataattggggaacacaggatgtgataaaaaccagaagtctgtgatgttgtttgttctctatgaggcatcagaggaggcttcatggagcgggtgacacttgagttgggtctagaaggacagtaggagtatgccaaatgggtggaaaaggaaggaggattccaggcagaaagcagctcatgcaacacagatgtggaatctcagcttgcaagttagcagagccagataaatcaggcagagtttggaggggttgacagtaggttttacgccaggggtttggatgcagctgcaggctgggtattagtgagagcagggaggctcctggaccggctgaactcccagcagaccttgtaacctggagctcccaagcttctactggtgtacacgctgtygagtcttgcagttagtgagcactaatgcttttggttttatatctcctgggcttgcaaacattgaccagaacttaaaagcacctgcttctgatggcagggaacttgcttcctgcagcaagtcacttctggagtggggtatcgctgatccttccccagctgacctgtttatttgatctccgtgatagcgggtaagggagtggtgtgtgtggtgtgagttggcggagttgcctctgccctccctgaaggctgggtgttcatggagagagtcttgtgatcttgctggtagagtttgttgttattgttttataacatgtaaagctgcctttagctcttactgtagtgaagcatgttgcttgcgtcatcaactttagtcttctcacagtttagatggtattgtggtattaggatattggttttcatccacggatccaggctcataactcctatccacagcccttgttatggttttttgatataatgttagatgtgttaggcctcaggggcaggcctctgaccttctgctctccttccaccctaatctttccccacctgattgtgggccttaaaaccctcccctgagaggggtggaccctgtatcctgggggaaggaatgctgatgtcatgaagcttccataaaaatccaagaggacagagttcagggagcttgtggatagctgaacacacggaggttcctagagagaggcctgctcagggagggcacagaaactacacgcctcttcccccatacctcgccctaagcgtctccttatctgtatcctttgcgatatccctcataataacctggtaaacgtaagtaagtgtttccctgggctaggtaggctgctccatcaaattaattgaactcaaagagggggtcatgggaaccccagcctgaagccagtcggtgagaaattctggaggcccagacttgcaactggtatgtttgaggggtggtggtggagaggcggggcagtcctggggactgagccctcaacctgtgggatctgacactctctccaggtagacagcatgggaactgaatgagaggatacccagctgctgtccgctggttggtgtgtggggaagaaaccccctcacatttggtcacagaagtctcttgtgttgatgattatggtgtgagagtagagaaaaaagataatttgagacagtttctctctccagtaggtgtcttgtttgttgtacacatgaagaaaccaaggttctgtgatgaaataacttgcttaagtttaagcagcccagaaataatgtagtcacaatttgaacccagctctgcctgattacaaaacctgtcataggtagtgctatatcatgccccatccttgatcccttttttttttttttttttttttttttwaaagagagagacttcgctctgtcacccaggctggagtacagtggcgagatcttggctcactgcaaattctacctcccaggttcaagtgattctcctgccttggcctctggagtagctgggactacaggcatgcgccaccacacccagctaattttttgtatttttcatagagacggggtttcaccatgttggctagactggtcttgaactcctgacctcaggtgagctgcctgcctcggcctcccaaagtgctgggattacaggcatgagccaccgtgcctgacccctgatcccttttctattccttttggatggctttcctcttgtgcctgccacatcccctctttctcgaacagtctgatctgccaggccatggcaagcctsatttcagcgcactctcctttgctgctttggaagagtgagagtagcattttctttgcagtttcctttctcagagctgtactgtctttaagccctggacatatggcttccatgctgagaaaacatctctcatagctgtggcktcatgctgaggaggaatgtagaaacrgaagtggggtcacttccttcccttgtctccagaggaatcattaacattgcacaagaacttgttggtttgggcacacatgtgggtccctatcccgctttgggtcggtctgtcttctgcccactctttgggatggttagttactaaaagtccgttttggcatttggtcttcatgtacctcttccgggtgttctttctgcttttcaggaccttgtgcaacatactttggccccatttggaagtttttsacgtgtgcttgctggggagcaacacctcatttccaatctagagagagtgagcttactgctgggtggagaactgagcagtaagattagggtggctggggaggcagtgacagacccaggcacagtcagctgtgcacacaccccctcatccaggagggcctttgccctttgacttcctgggattggtgggctctgctcaagaagtagctttcgccgtggtgggaactctgagggacctggcaggggtccacttttggggtcggaattcccagtcttaccctgggcactccttctggtgtgtacgcctctttttgatctttttttttttttttttgagatggagtcttgctctattgctcaggctggagtgcaatggcgcgatcttagctcactgcaacttccagctcccaggttcaagcaattctcgtgcctcagcctcccgagtagctgggattacaggtgcctgccaccatgcctggctaatttttgtatttttagcagagaaggggtttcaccatgttggccaggctggtctcaagtgatccacccgcctgggcctcccaaagtgcagggattataggtgtgagccaccatgcccagcctcttttgacctttgaccaaagacctctaggactttggagtcaagtctcatgacctctaaaatgttgttatatgaaaagataagctacaaagatatgtaggattgagtgagagcaagagagacagtcacacaaaaatagactgtgataatatggctgggtacggtggctcacgcctgtattcccagcacttcgggaggccgaagcagatggatcacttgaggtcaggagtttgagaccagcctggccaacatggtgaagccctgtctacgaaaaataaaaaaattagctgggtgtggtggtacatgcccgtactccaagctactcaggaggctgagtgaggcaggaggatcgcttgaacctgggaggtggaggttgtagtgagctgagattgcaccactgcacccagcctgggtgacaaaagtgagactctgtctcaaaaaaaaaaaaaaaattataataaacaaaatgttgggccgggcgtggtggctcatgcctgtaatcccagcactttcggaggacaaggtgggtggatcatttgaggtcaggagttcaagacctacctggccaacatggtgaaaccccacctctactgaaaatacaaaaattagccgggcatggtggcgagtgcctgtagtcccagttgcttgggaggctgaggcaggagaatagcttgaactcgggaggtggtggttgcagtgagccgagatcatgccacagcactccagcctgagcgatagagcaagactctgtctcaraaaaaaaaaaaaaaaatgttggctgggcatggtggctcacgcctttaatcccagcactttaatcccaacactttgggaatccaaagtgagaggatcattggagcccaagagtttgggagcagcctgggcaacataagaagaccctgtctctacaaaaaattttaaaaaaattagtggggcgtggtggtgcatgcctgtggtctcatgtactcaggaggctgaggtgggaggattgcttggacccaagaggttgaggctgcagtgagctgtgattgcgccactgcactccagcccaggtaacagcgagatcttgtctcaaaataaaaaataaataagtaaataaaatgttaacattgcttatcacaaaatgatggggttatgggtttttttccccttcagtttccaaattttctgtagcacacctgtgctatactaaaatagaccaatagtttttgtgtgtgtgtgtgtgtgtgtgtgtttttctttgttgagacttggtctggctctgtcacccaggctggagtacagtggtgcgatctcggctcactgcaacctccgcctcccaggttcaagcaattctctgcctcagcctcccaagtagctgggattataggcggccaccaccacacccggctatatttttttgtatttttagtagagacggggtttcatcatgttggccaggctggtcttgaactcctgaccttgtgatccacttgcctcagcctcccagagtgctgggattacaggcataacccaccatgcctggctgtttttttttttttttttaaatagagacggggtcctacattgcctaggcttgtctcgaactccaaagttcaagtgatctgcctgccttggcctctcaaagtgctgggattataggtatgagccactgaacctggcccctaaccaatagtgtttttatgtggtcttgctctgtctcccaggctagagtgcagtggactgatcataggtcactgcagccgaaactcctgggctcaagtgaccctcccacctcagactcccaagtagctaggactgcagatgcatgccactgtgtcatgctaattttgttttattttttgagacaaaatctcgccctgtcacccaggctggagtacaatggcatgatcttggttcattgcagcctccatctcccaggttcaagtgattctcctgtctcagcctcccaagtagctgggattacaggtgtgtgccattgggtctggctaattactgtatttttagtagagacgggggtttcaccatgttggccaggctggtcttgaactcctgacctcaggtgatccacctgcctcaacctcccaaagttctgagattacaggggtgagccaccgcgcccagcctgagacactgttcttatctcaccgtcctttgttctagtcctggaggttgcagtgacctgagatccccatattcttgattctccccaaagcattccgccatctccctagcaggatgtcccgaggtaggtgttgctgggttcgctcacgttagcttctcttgcagcgcaatgtccctgctcttctctcgatgcaactctatcgtcacagtcaagaaaaataagagacacatggctgaggtgaatgcatccccacttaagcactttgtcactgccaagaagaagatcaatggcatttttgagcagctgggggcctacatccaggagagyrccaccttccttgaaggtaagggggcaccggctcagccaggcccgctcttacctgtttagatatttagctagtgggatttgcgggtggggaggtatatctctgctcccagggaagtcataaccagatagccttagaaatgctctgctcttgaaatcatgtggaattggagtctggggagatgaggccaggaagacaagggaactgccatttagtaattactttaagaagtccacatgttttgtttcatttaatcatgaaagataggtgaatcttatccccatctacaaggcaagcaaattgaggtttgagagttgtccgataccttgtaagtaatagatcagggttttacccaggtgtctccaactccggagcccacgtgttttcctttgcctagttctggctgccattaataccaggcactgtttgggtgtcagtgatccctgaccagggcgccctttctttgatatttttagattggtgacagaactataggaaactcacgtcacctatgccttttctactagttactaatttgagcccaacctctagttccttgtctatcagcagagaaggactggttcccagggccccgctcgtctgagtgtcaactccagcactggcttcctcaggctccctctttagaaggacactttggcgccaggtcctgagattgtctgtggagacccagtaactgagtcttatctgcccttggtttcctcacttgtgaaagtggggctcaggtgtgaacagtggtttcagattctagtctgcagaaccctagaagttcagtggtggtgcttcgggggttggcccctggctcaggggggccaccttctttccattctgctttcaaatagagcagcttggcttctcgttgttttacatgccaggctgctacacgaggctccctttgaagaaagagactgtccaacttcatgccctcatctgtgccctgccctttgcgtggcgcttgatgccacagaaggtgtttcctaaatacttgttgaactaaaacaaatctgaattttaaagtagtatgattggtagttgaaataatcccaactcattgcctgtttatcagtggctatggtgtgccagccgtgtgccaggtgctgggcatgcagagatggggtagatcaggccgctcccctctgggagcccagactaaccctcttggaagctctgagtcacctactcagatgatgtggtggacaaacacatgcgtaatgcaggtgtttatgtgatgcaygctttgatttctctgtgtgtgaaaatatgaggcctcccctgttgtttaaatggaagggaaagagctggagtgatcctgagctgtgctgggtcagggaaagaatggttcctgcctgggcactgtttctaacgggcaggtaacaagagcttgttggcctgctggctctcgcttttaagtgtagtcacatgcttgagagccagcttcctccgagggacattccaaaggccatgcccaggtgcccatataagggaggaatattgatgcatctggggcagaggtgaccggtggacatagcgggaggggagatgggggtgttgttgacttggtcatttcctttcatggcgctggctgtgggggaaattcactgggcaggcccttgtcatgcttcagatgctttcggagtgttctcagggctggggcctgtcagcctcatagttcccaggagtgtgcagaggggctaaacacccgtctgtgttccagccagctgaagcacctgtctggtgcgagttctagacaggacagtggtgggatctcactcagttgctcctgtatggagtaatttgttggccatctgcctgttaagggcactgggaaaaagcagtgcagtgatccaaaggtctgctcacgtagcaaacatttgtgcacctgctgggtgctggggtcagatagtgtggccctcatgaggcagatgacacagacaggtgagctgtacagttaccttatggtgaggtgagagctgagatgggagaagtgcagggtgctggggcacacagagaaggggtccggggtcctgactcaggttagaggggtggtcagagaaggcttcctgggggcagtgctgtctaagctagaccggaggccaagtgagaatgagccacgctgccccaaggcagtgtagtgtgtcagttcttcagagagtggggagggggtttgggcagcagggaatggagccagagggccgaggaagctggtgagtttggggatatggtgagggagaccgtgaggcagcgggtggcaagaggccaacagggccagggcagggagggcctcaagaagtgacatagaggccgggcgcggtggctcacgcctgtgatcccagcactttgggaggccgaggcgggcggatcacgaggtcaggagatcgagaccatcccggctaaaacggtgaaaccctgtctctactaaaaatacaaaaaattagccgggcgtagtggcgggcgcctgtagtcccagctacttgggaggctgaggcaggagaatggcgtgaacccgggaggcggagcttgcagtgagcccagatcccgccactgcactccagcctgggcgacagagcgagactccgtctcaaaaaaaaaaaaaaaaaaaaaaaaaaaagaagtgacatagagtggttaagagcctggactccagagccaggctgcctaattcaaatcatagctctgccttttactaactccggagccatgttaataaagaggaccaaaggagagaatgaatttgaaaagtgaaaggaacagtgcctggcatgtggtaagaacttcgtaaatatttgttaagaaaaaataaacaaggaaggcagttaacatttaagtattcatcttctaccagccgccattcacagcatttgtgtttcaattcgtttgatcctcacgatgttctcatgaagtagataatgtagttatctccgttttgtgcttaaggaaactaagacccagaaaggttcttttgcttgaggccacagagctagaaagtggtaagaaccagcttcaraaccaggcagtgttgctcctgagccatcttcttaaccaccacaccgtggggccaccatagaggatctggagctcagcctgtcggctgcagggtgccagaggtggactcgtttagggtaagcagggccggcgctctggcccttccagacttgggactgtggaactcctctgaccacgtggtgacccattttcaatccccacctccagacacgtacaggaatgcagaactggaccccgttaccacagaagaacaggttctggacgtcaaaggttacctatccaaagtgagaggcatcagtgaggtgctggctcggaggcacatgaaagtggctttttttggccggtaagtccttgaggcacccaccctttctttcttcctggctaggagggagggaggcactttgtgcaaggtcacagaacgttccaggcagggacatgcttcagaattcattgctttcctcttaatttatattttatttatttatttgatttttgagacagggttctctgtcacccaggctggaagctcattacagcctcgacctccctgggctcaggtgatcctcccacctgagcctcctgagcagctgggactgcaggtgcatgccatcaagcctgacttttttttttttattttctaattaaggttaaaggcatataatataaaatttaccaccttaaccattttaagcatayaattcactagtaggtatatttgcaaccagtctcaagagctttttcatcttgcagaactgaagcttgtattatagccattaaacaataactccctgtcccacatgtcccttgccctggccaccaccattctactttctgtccctatgaatttgactattctagaygtctcacgtaagtggaatcatacagtatttgtttttttttctccattcataaaacttttattccacttacatgaatttaatacacgtgttcttaacaattgtgcttgtattgttcatgaaaatttcgtaagacattaaacaaagctagccatcatctcaagttatttccctgttaactatttttacagtgcatgcatgttaggcaagcatcaaaaaaaaatcacaaaagcaaagaatctaaaaatatgccgggcatggtggctcacacctgtaatcccagcactttgggaggccgaggcaggtggatcacgaggtcaggagatcgagaccatcctgtctaacacagtgaaaccccatctctactaaaaatacaaaaaattagccgggtgaggtggcgggcgcctgtagtcccagctacttgggaggctagggcaggagaatggtgtgaaccccrgggggcggagcctgcagtgagccgagatcgggccactgcactccagcctgggcgacagtgagactccatctcaaaaaaaaaaaaaaaaatctaaaaataagttaaatacgtgttttttttgttttgttttactgctagcttgatatacatgaagtattcatttttcctgcatctttacttttacatttgttcttaggttgcctgaaacattttaaatacaaataaaatgagtgtagcaaaaataatgaaagctaacagcagataactttacaaataatggagtgtgaaccatttctgcccttatccagattraaatgggtcacaactttgtttaaaggaacacttccacagctgtagtcaaaggtgtgcacattgagattgagtattccacagacacacatggtttaacatgtgataaccatggggtatctgtttctaccacagccttgtaagtgctccaaaccttaaagtacccacatttactatacctgtgactggaaccaatgatcctttttattccccaccaggacaaaccaatatgtaggcagttttctttgctttgacatggaagcagttttaacactggcccttgtgaagccacaatgtacctaaagtactaggccaaacatttataacttgtataatgaccaggcacggtggctcacgcctgtaatcccagcactttgggaggccaaggcaggcagatcacaaggtcaggagattgagaccatcctggctaacacggtgaaaccccatctctactaaaaatacaaaaaaaattagctgggtgtggtggcgggcgcctgtagtcccagctacttgggaggctgaggcaggagaatggcatgaacccaggaggtggaggttgcagtgagtcaagatcgcgccactgcactccagcctaggtgacggagtgagactccgtctcaaaaaaaaaaaatctaatacaagaaaaaaggcatctagacagattgtatgctaggcacacagtggtagcctggggaataggcactgtgcctagagtcttgaccctgatgaactgtaacctcaggtgtggtcctctactcctctgaactatcatttcttcatcctcacctgggaggtatgaccccctacttaggtgagctagtgggcttcctgtctcactgggtgcaggtaaggtcattgtagttctgctctagtgatatggctgrgaaacttcaactcagaatgagaaacactgtgtttagcacaggttgaaagctctgagactcagagcagatgagtctgctgagcagagctattctcaagaagcagaaatggtggggtgcagtggttcacacctgtaatctcagcactgggaggctgaggcaggagaattgcttgagcccaggagtttgagaccagcctgagcaacatggcaagaccccatctctaccaaaaatttaaaaattagctgggcgtggtcgcagctatagtctatatataggtggtacctatagtctaagctacttgggaggctgaggtgggaggatcattgagccctgatggtcgaggctgcagtgagctatattcatgccacacgctactgcactccagcttgggcgagaaagcaaaatcccatatcaaaaaaaacaaacaacaacaacaacaacaaaaaaccccaccagaatacatgaaaggggtgtgataggtaagaatgagaaagtaggctgggcatggtggctcatgcctgtaatcccagcactttgggaggttgaagcaggcaaatcacctgaggtcaggagttcgcgaccagtctggccaacatggtgaaaccctgtctctactcaaaatacaaaaattagccgggcatggtggcacatgcctgtagtcccagctacttgggaggctgaggcaggagaattgcttgaactcaggaggcagaggttgcgatgagctgagatcgtgccactgcactccagcctgggcgacagagtgagactctgtctcaaataacaataaaaaaaaaaagaatgagaaagtaaccttccctttagcctggcagttgtcagctgggactcacaaggtggagcttcatgtgtaaggaggagcgtgatgggagaaaagcagcgaaacatgccctgtgtaggaaacactggggtcatttagactgaggaagacactctgggggttagtcggtgtttcaggtaggcctgaattaaactttggagacagacagacagtctctataagtgttgctgagggtggctgtgtgattcaaggggcagacagcacgcagtgagcctcttgtagattgatctgaaatgatgaaccaggggcatgtcagaggtttgggcctgggggtgtttattcattttaataaacagtgcctactstttgtctctcagcactgtctgggcactggcaacattgcactgaatagggctttggccttccaggctggtatctgcgttgtgaaagtaattcaggtcagatactggtggctttgctgacagctgttacttccttctaggacgagcaatgggaagagcaccgtgatcaatgccatgctctgggacaaagttctgccctctgggattggccacaccaccaattgcttcctgcgggtagagggcacagatggccatgaggcctttctccttaccgagggctcagaggaaaagaggagtgccaaggtgagggtgccaggctggctgtcagccctgtgcctgctgggggagcaagtcctccgttgtgacayggctgacctcacctctagggagggggcagcaccaccctgtggaggtgaatgggagaccctattttagatgaactttttgaaggatgtaagagcttttgggggctggcggaggtggttttcagaaacgtggatcaccaagaatgaggaccctgctgttcctcatacagctctgagtggccactgacctctcttcactaattaaggaagacagtatgtgctgtgttcttccttgggatattgccagagaggaattcctgcatttgctgtgtgtctctgacctatcagtcagggaccgacactctgagttttctgagaggcagctgcattcttgtttggggccagatgctcaatttgcttcataaagaatcaattggycgggcacggtggctcacgcctgtaatcccagcactttgggaggccgaggtggatggatcatttgaggtcaggagttcaagaccagcctggccaacatggtgaaaccccatctctactaaaaatacaaaamttagctgggcgtggtggtaggcacctgtaatcccagctagtcgcgaggctgaggcaggaggactgcttgaacccaggaggtggaggttgtggtgagctgagatcacgccactgtactccaaacctgggtgacagagcgagactccgtctcaaaaaaaaaaaaaaaaaaagaatcaatyagtgcagaacagatgactttagggtgatatccgggaaagaagctcaaaagagcagtgaagaaagtgggttcttattgacaactcccagctgttaactttttatatgtggaagaagaaagggtagcagatgggcagcattcccagccactgtgctgtgatgcagcggcacaggaaatctcctggcctggtggttcctcctcagcctctttctttccttcctctgccatcagactgtgaaccagctggcccatgccctccaccaggacaagcagctccatgccggcagcctagtgagtgtgatgtggcccaactctaagtgcccacttctgaaggatgacctcgttttgatggacaggtaagagggaggtgccctcctaggaggtccaaactggaaggcaccaggtttccatttctggataatctaggccagggtccctgggccccatccttgctctgcttaagtattactmcctttcagatgggctcaaccaaatcctctggcctcttggctttcctctggagtctggttactatacctatttatcagtaccctgcagatgtcccagggatggtctgtaaaagataggagggatgctcaaaagttggtgggggaggttctcaatctcagcccagtgccagcatgtgtactgggggtggggagttgtggcggagtcagaggtgtattttatttcccttgaagaaacactttgccttggcttggtggactggttataactataccaacatgtacagtattgtagtgtttatctggactcacatcaagtcacaacttcaccttaattgtatatcatcttttttttttttttttttttttgagacagagtcttgctctgtcacccaggctggagtgcagtggtgcagtctcggctcactgcaacctccgcctcccgggttcaagtgattctcctgcctcagcctctggagtagctgggattacaggtgcccgccaccatgcctggctaaattttgtatttttagtagagacggggtttcaccatgttggccaggctggtcttgaactgctgacctcatgatccgcccaccttagcctcccaaagtgctgggattacgggcatgagccactgtgccccgcctggtatatcatctttaaagtagaattacaagtaattctgtttttataaaagcaatagatatatgtgtttaaaaacactcatttctgccaggcacggtggctcatgcctgtaatcctagcactttgggaagctgaggcgggcagatcaggaggtcaagagatcgagaccagcctgaccaacatggtgaaaccctgtctctactaaaaatacaaaaaaattagctgggcatggtggtgcgtgcctgtagtgccagctacttgggaggctgaggcaggaggatcgcttgaacctgggaggcggaggttgcagtgagccgagatcgtgccattgcactccagcccgggcgacagagcaagactctatatccaaaaacaaaacaaaacaaaacaaaacactcatttccaggcaatctggaaggataggaaatgggaagtaaaatccgttaatgagggccaggcctgatttctctcccgtccctggctttctcctccatgacctgcctgcctcacaagtcccaggtctgttctcagcaggaagaatagggctcctgctctgcctgatgayttggtttacccctgtcacctttagccctggtattgatgtcaccacagagctggacagctggattgacaagttttgtctggatgctgatgtgtttgtgctggtggccaactcagagtccaccctgatgcagacggtaactcctcctctgccttctcccaagctcccagcaccccctgggcaggcagctgatrgggccttggctgtcaagctcctgctccaccgaggtcttaccctttatctaggaaaagcacttcttccacaaggtgagtgagcgtctytcccggccaaacatcttcatcctgaacaaccgctgggatgcatctgcctcagagcccgagtacatggaggaggttcgtgcttctgtttggcagtttggggaatgcaaccccgagggagcactgcctgccactggggccacttcctgcacccctggatctrgtgacttccctgaattaattttattgccaaagaattctccaaatactcttctgtggtatcttctggtggtctttcccctctcccatccactttgctggatgcaccccctcttcaagccactctcccctaggcctaaaaaggatccctgctgcattagtgcatcttcagtgcyggtgctcagtttggtttctgaggaattaatacagaacaggctcagctctagggaggcctctgggaaagaggctggaaagaggaatggagaataactggttcttactggtgacttacaactcttagctatttacttatttatttagagactgggttatgaggctggctaatttttgtatttttggtagagacggggttttgtcatgttgcccacgctggttttgaactcctgggctcaggtgatccacctgcctcagcctcccaaagtgctgggattacaggcatgagccaccacgcctggcctcacaactctttaaatatgtgaaatgaaagacaaaagggtaacaaacggcatggtggtgcacacctataggctgagagaggatcccttgagagtaggaatttgaaaccaccttgggcgacgtagcaaaacgccatctccaaaaaaataaagggtaggccgggcgcggtggctcacgcctgtaatcccagcactttgggaggccgatgtgggcggatcacgaggtcaggagatcgagaccatcctggctaacgtggtgaaaccccgtgtctactaaaaatacaaaaaattagccgggtgtgatggtggcaggcgcctgtagtcccagctacgcgggaggctaaggcaggagaacggcgtgaacccgggaggtggagcttgcagtgagctgagattgtgccactgtactccagcctgggcaagagagtgagattccgtctcacaaaaaataattaaacaaataaagggtaataagattgataatatggcaatatgggatgataaaacatgcagttgcagtcagtaggccagagtccaaattatttatttttttcgagatggagttttgctcttgtcacccaggctggagtgcagtggcacaatctcggctcactgcaacctccacctccagggttcaagcaattctgcctcagcctcccgagtagctgggattacaggcacccgccaccacacctggctaatttttgtatttttaatagagatggggtttcaccatgttggccaggctggtcttgaactcctgaccttaagtgatccgcccgcctcggcctcccaaagtgctgggattacgggcgtgagccactgtgcccgcttgtgactgacactaggcagtgtgactttgttagcttccttgacccttctggtaatccaatttcctggccagtgtgatggtgtgataaatagacttgttgagaggatgaaatctgtcaaaaacacctgacacgtggtaggtgtctacaagaagctattgtcacattttatcggtagaaccccaggatgtcagagccaggagggatgttctagtgatgcccactccttttataaacaatgccccaggaggacacagcttgtcagagtataggtcccagatttaggtttcttgacctcagggttcctttcctgccagggcaccaaaatgaggcactatataggcttaacaagaggcagtctagggcacgtttaagcatttctgcttgtatatgcataaaatatctttggcacgctcactgccaagtaacccccacacgttggtctgggaaacttggtggtgagagagcagaatagtgggggacattacactgtgtatgtgtttgtgcctttggctgttgagccatgtgaatatattgcctattcttttttttccctcactctgtcgcccaggctggagtgcagtggtgctatcttggctcactgcaacctccgcctccaggttcaagtgattctcctgcctcagcctcctgagtagctgggattacaggcgcctgccaccatgcctggctaatttttttgtatttttagtagagacagggtttcaccatggtggccaggctggtcttgaactcccgacctcaagtgatccacctgccttggcttcccaaagtgctgggattacaggcrtcagccaccatgcccagcctcttatgacctattcttttaataaaagaggcaggtgggggctgtggggccacctacactcactctggacacatttgtttgggctccaggtgcggcggcagcacatggagcgttgtaccagcttcctggtggatgagctgggcgtggtggatcgatcccaggcyrgggaccgcatcttctttgtgtctgctaaggaggtgctcaacgccaggattcagaaagcccagggcatgcctgaaggaggtaatgatgagaacagatrtcctccttttctctgatgtttgagacattttgtctcgtgctgaggagtctgtcagtagaaaatccttctgagaaggggatgctgagaagagcagagaggctcttgctctttagccagtggcttggtttctggggatttcatcgttttcctctgctgccaagttgtttctggactaatgcagtacaatcctcctagggggcgctctcgcagaaggctttcaagtgaggatgtttgagtttcagaattttgagaggagatttgaggtgagtcctctgattctggtatctggcgattctgtgcctccccagctcccattggctgtgtccctggcagtgaaaaccagagtctggcccttggttgtaggcccctggtggcccccacctccctccrtgcctctgtgtgttccaggagtgcatctcccagtctgcagtgaagaccaagtttgagcagcacacggtccgggccaagcagattgcagaggcggttcgactcatcatggactccctgcacatggcggctcgggagcagcagtaagagtccaagactgcagataggtggagagagctgccgagacragggtgctccacccctgccttgggcagttaggacacgccttgatggcagggctgagtctctgggctcccatccagagccctttccctggccaccagaccatgttagaaccacatagacagcctggtgaggagggcggctgggtgcttcatcacccsacctggtctgtgcagcacgattccctgtgttggaggtcttggcccatgccctgctgagctctgcagccattctcagagcctgaacacatttttcaaaacaacattccagccaggagcagtgactcacacctgtgatctcaacactttgggagaccaaggcaggaggactgcttgaggccaggagtccagcccagataacatagtgagatcccatctctacaagaattttaaaaatcagctgggtgtggtggcacacacctgtagttccagctacttgggaggctgaggcaggaggatcactggagcccaggagttcagggttccagtgagctgtgatcgcaccactgcactccagcctgggcaacagagtgagaccctgtcactaaagaataatatgaaaacaccttgcttctatcacacagaattgactttctcagttgtttatgttaagttaaaattttaaaaagttcagttcccttttgattcttttgcacttgtcccagtgtcactctgccctgaggcaccataatcatgaatttacattgttctatcacccaaacagtactttttacataaatgctgaggaatatgtcaggtttttacatgcttcagatgtacagatgtggcatcacactgtctgtcactgtacctggctttgctttctcaacatcgtttttccctctatccttgttagtatgtgtagtttgtttatgaatcggaactgctgtagtatattccattgtgaatatgcctcattttcctatggatggaattttagattttttttttgctattggaaaccctactgcagtggacatttgttcatgtgtccccttgtgcacctttttaagagtcttcctggggtgagttcctaggggtgtggcaattctgttttagggtacacgcgtttccagttttagtcagttttcttgatgctcttcagaacagccgtacccattcattgcatgaccagtactgtccataggccttccatttcatcagccctcaccagaacttcagacctggtcatttttgccaggccttggtagaaaatagtgcctttaaaaatttcatttacaactgggcatggtggctcacgcctgtaatcccaacactttgggaggccaaggcggatggatcacctgaggtcaggagttcaagaccagcctgaccaacacggagaaaccctgtctctgctaaaaatacaaaattagctgggtgtggtggcgcatgcctgtaatcccagctactcgggaggctgaagcaggagaatcgcttgaacccaggaagtggaggttgcagtgagtggagatcgtgccattgcactccagcctgggcaacaagagtgaaactccatctcaaaaaaaaaaaaaaaatcatttctgtgattactagtgaggttgagcttttttccctatattaattggcagaatttgtttaaacccccttaaagcgccctccctgttttgtgcccaccacctgacccacatcgaagactgaagagtgcatggttggctgcagggtcctcttcttacctgggaaggggaaggccatgcccctgggtgcgtgtgtgcagccctgccaggcaagatagcgggcagggcggcgtgggatttctggcatcccctcttgctcctctgcttagtcagacaggaacatggatttctcaccagtactctgctttcagggtttactgcgaggaaatgcgtgaagagcggcaagaccgactgaaatttattgacaaacagctggagctcttggctcaagactataagctgcgaattaagcagattacggaggaagtggagaggcaggtgagaaatgaggaggaggcattctgggaagatttggactccgagtagagtccagaagaaagcagacctcctcctcttagggacttctcagcctttcagaagaaagttgtggccctgtttcaagaatacagagctgccgtttgggttccattgtcgggttgtgtgatgctgggcatgttccctttcctctggacctccacagatcatgtgggcgtttgatcagccagtttcccagaccctctcacttcagaggctttaattccatagaggagctgaggaggctgctggtttgagaggaaggatgtgccatctgctaggatctctcctggtgctgcaggagtgaactttggtcttccttgatacttaacagtgtgcttccttttgctgtaggtgtcgactgcaatggccgaggagatcaggcgcctctctgtactggtggacgattaccagatggacttccacccttctccagtagtcctcaaggtttataagaatgtgagtcatggagcaacaggtcctcttggcaggaggcccccaaaagtgattcaacccctgttggtctgggtcagggccccccagcagtgacagtagaagccacagagacaaggcccaggcttccgtcagccttctggggtcacctggtggatgtggcctgaagggaattttgatggacatgcttctcttaacttccctcttctggtggcaggagctgcaccgccacatagaggaaggactgggtcgaaacatgtctgaccgctgctccacggccatcaccaactccctgcagaccatgcagcaggacatgataggttagtgcccatggggaactgggcagctgtggccctgggctgcccaaagatcagatgcggaggccaagctaaagaaatcaggactttccttatctgtcacttttcatgatgattcaactcgataccttcaggttctgggtacatgttctgaactcattcttgtttgctttttgagacagagtcgcrctccgtaacccaggctggagtgcagtggcatgatcttggctcactgcaacctctgccaccgaggttcaagcgattcttctgctccagcgtcccgagtagctgcgactacaggcgtgaccaccacacctggctaatttttttgtatttttagtagagatggggttttgccacgttggccaggctggtctctaactcctgacctcaagtgatctatctgccttggccttccaaagtgctaggattacaggcatgagccaccggccctggccttgtgaactcattctgtacacagggttggggagcccatcttgttctactacatgggtctaccctaggctgagaattgggcctgctcctttaagtccacgtgaggcataagtgttagcagtatggcatctgagtccacacttgcctgggagagctggcctcaagtgaggcatgctcagtctcacgggccaacttgactggggtgtggttcccaggcaaagctgttcagcatccctggcagtagctggtagagccctgtctccaaggcttggtgccgctgtggtgcagggctgagcygataagcttttcctccatttctcttcctgacagatggcttgaaacccctccttcctgtgtctgtgcggagtcagatagacatgctggtcccacgccagygcttctcyctcaactatgacctaaactgtgacaagctgtgtgctgacttccaggaagacattgagttccatttctctctcggatggaccatgctggtgaataggttcctgggccccaagaacagccgtcgggccttgatgggctacaatgaccaggcaagcaaagttcctcacctcaagggcattgtggggsgtcagtctgtaccctgcctccagacacgggaaccattctaaaacgggggttccctaaggtcagcagctgtggtggtgtgccccaccacacagtacaccacagacagaatttttgctactgattgacctggatttgttctaagcagtgatatttgtgaaatgacagatgctagtatttttctctaatacacattaaagtaagtatgtaactattaaaaatagacgactttaaaaataaccacctacatacgactattttaaagttcagattttaaaaacattcatctctaaaccacttgrgttgtcacatgtactgccctctgtacacatcccacactcggggaagctgccaggcgggtcaggatggctcctgctcacattttgcacgtcccgtggtgctcacctgagggtctcctctgctacatctgaagctagttgtcccctttttgccttttggaaattgaagagccactctgtgtccctgttccccagactagggcaacactgagggttcacrtgaatgagagactcaatacgtccccctcacccctctcatgtttctctcctcaggtccagcgtcccatccctctgacgccagccaaccccagcatgcccccactgccacagggctcgctcacccaggaggagttcatggtttccatggttaccggcctggcctccttgacatccaggacctccatgggcattcttgttgttggaggagtggtcagtgaccagttctgctcgggaaggtgggggcggagggcaggtgggcggggcctgagggcyaggttcctgctgtggcccctgcattgggccacactccacagtccactgcatactttctcctctgtgattgcatggggagcgyttactccctcaccaagtttccctcacttcctgctggacatggtcccagaccttctggcctcggtgggatcaaaggagacattgaaagaggaactcagagtagaaacatgaaggctccttggctggggcccttcagatggccctggtagkgatgggccccagaggagggtgggccacagagaggctgcactccaggctgaccatgtgctctgcaggtgtggaaggcagtgggctggcggctcattgccctctcctttgggctctatggcctcctctacgtctatgagcgtctgacctggaccaccaaggccaaggagagggccttcaagcgccagtttgtggagcatgccagcgagaagctgcagcttgtcatcagctacactggctccaactgcagccaccaagtccagcagtgagtggccctgtcggaccccagcagggsacttcctttaggcagggtcagccccatctcccttccccatctctcttcccaygtggcctggaagccactgggtcctaagcatcgtasaccctgggccttcaggtgtgcagggccagctttgaggccagtcatggggagaggggtctcccagggacactttgcgtcttgggctgggacggggtaggcctctgggccccttggtgaggaagaaatgggaaggcaagagatattcctagtaggagttttagaggttgccttgaagagcttgggctgtggatgtagttttgaagtttttgaacccagcctgatcttcgtgcacatcttaggtcaggtgggaatctattgcctaatctggggtggtggggatgaatatcctcgcttccttttttttattgtgtgtggcagaccctttgctctagacattttgcacctaattatttctctgactcttggaggtagatgttgtcttatagccatctcctttttctttctttcttttttttttaattgatcattcttgggtgttttggcagggtcataggacaatagtggagggaaggtcagcagataaacaagtgaacaaaggtctctggttttcctaggcagaggaccctggggccttccgcagtgtttgtgtccctgggtacttgagattagggagtggtgatgactcttgacaagcatgctgccttcaagcatctgtttaacaaagcacaccttgcaccgcccttaatccatttaaccctgagtggacacagcacatgtttcagagagcaccaggttgggggtaaggtcatagatcaacagcatcccaaggcagaagaatttttcttagtacagaacaaaatggagtctcctatgtctacttctttctacacagacacagcaacaatctgatttctctatcttttccccacatttcccccttttctattcgacaaaaccgccatcgtcaccatggcccgttctcaatgagctgttgggtacacctcccagacggggtggtggccgggcagaggggctcctcacttcccagaaggggtggttgggcagaggcgccccccacctcccggatggggcggcggccgggcggaggcgcccccacctccctcccggacggggtggctggccgggcgggggctgaccccccccacctccctcccggacggggcggctggccgggcggggactgaccccccacctcccggacggggcggctgctaggcggagacgcttacttcccagacgggggcggctgcctggcggaggggctcctcacttctcagacggggcggctgccgggcagagacgctcctcacctcctagacggggttgtggctgggcagaggcgctcctcacatcccagacggggtggtggggcagaggcgctccccacttcctagatgggatggcggccgggaagaggtgctcctcacttcccagagtgggcagccgggcagaggggctcctcacatcccagacgatgggcggccaggcagagacgctcctcacttctcagacggggtggcggccgggcagaggctgcaatctcggcactttgggaggccaaggcaggcggctgggaggtggaggttgtagcgagctgagatcatgccactgcctgggcaacattgagcactgagtgaacgagactccatctgcaatcccggcacctcgggaggccgaggctggcagatcactgccggttaggagctggagaccagcgcggccaacacagcgaaaccccatctccaccaaaaaaatacgaaaaccagtcaggcgtggcggcgcgcgcctgcagtcgcaggcactgggcaggttgaggcaggagaatcaggcagggaggttgcagtgagcagagatggcggcagtacagtccagcttcggctcggcatcagagggagaccgtggaaagagagggagagggagaccgtggggagagggagagggagcgggagagggagagggccatctcctttttcaaaatcaagaaactgagatttgaaaaatagtgacgtgtcctctgctactcggctgatgagcagcagagtcaggatctcttgtgcccaaaccagggtgcacagctctgtgctgttgcttctcaggccgtggtgatgctgagtgtgtttggttgttatgattattcagtctcagcagggtgtaggagattctgccaaaccaggcctggctcagggcagagctgctggcagggatatagacaggcccagctgctccctactgtgggtgggctaagccaccagtggcatcttgctccacacaccccaactgggtcccttctctctcctccccagggaactgtctgggacctttgctcatctgtgtcagcaagttgacgtcacccgggagaacctggagcaggaaattgccgccatgaacaagaaaattgaggttcttgactcacttcagagcaaagcaaagctgctcaggtgaggctggcccgygtggccaaaggttagggctccagggtgcagcccaggcacactggggctcagctgctgggcttgcgtcttgggtgtggacacaaatttttctggtggggatttagctcattcgtgttagatgtgtaccatgggctgggcacggtggctgacgcctataatcccagcactttgggaggctgaggcaggtagatcacctgaggtcaggagtttgagactagcctgaccaacatggtgaaaccccgtctctactaaaaatacaaagattagctggtcgtggtggtgtgtgcttgtaatcccagccactcgacaggctgaggcaggagaatggcttgaacccagaaggcggaggttgcagtgagccgagattatgccattgcactccagcctgggcgacaagagcaaaactctgtctcaaaaagaaaaaaaaaatggatgtgtaccacgtacctcatggatgccagatggtgctggaggctcaacaagacacagcgtcrctgccttcaaggcacttgcagttgaaggcatgatggcatcacagtactgcgagactgcagttcacagcgccctgtgctgaaccgcagggcctacagcgcttaacatgtgctatttcactcagtcttccctatttctccattttctacatagaaatgttggggaacttgtctggcatctcaaaaaatggccaggctaggaggggagcccaggtgtacttggctccagcagcccccgcactctgattctccttacctgccactctttggacccatgaagagggcatagccccccatttacccacagagaagctggttacttggctggggactggcagagctgggattggaactcagatctccatggggtctctgtggagctttcattaataatttgctggaaagaacatcagtctgaggagtctggagtcctgggttctctccagccactcatgtttggcccaagctcttaactctcctgtgtctcattattttcatctgtaaaatgggagtaagatttcatgacacagctgcatgactgaatgtaaaagtgccctgcaaaagtcctcggcctgcccagctcatgataacatcagcacacggggaccctgcagaagtcctcggcctgccyagcccatgatagcatcagcacacggggaccctgcacttcctgccctcgcccctgacgtcagagtctgcagggtggcagagccagaggggagatggatcagagggtgtcagctccaaccctcaccggatcactgggctttccctgccctcgactgcggatgtgccccccccgcacccccacctggggacagctgcttcctagggacacactgcttgccctctggggactctcagaaagggggaatggggggaactgctgcttgtcagccacagtgacacagctgaacctggaaagggtctcctgtcagcacctcaaccccttgcttggcaagcagggaaactgagttcccgacagctcagggacttgcacatggtcctgggtgaaggaaacacagggcytgagaatcagaaaagcctaacttgtagctccctggcttattagccgtgtggccttgggaagttatttaacccctctgggcctccttttccccatctgtgagacagggataaacasgattgttggaggatgatgtaagggtgtgtgtcaagcgtccttaggatggtgcctggcgggtagtcctaatactgcctatcatcagctatcatggttacaaaagaaccatttctttgcaggaataaagccggttggttggacagtgagctcaacatgttcacacaccagtacctgcagcccagcagatagtgggcacctgaggcggagtctgcgtggagaggggcggtgctgccagccctaagtgccrtgtgggctcccccaggggcacgtgtggctcctgccccctggccactgccaagagaatgaagcacccagtctcgtaccattttgagccctccagcactacttattttcccccacctttgcctgctgttgctggaagagctggctcatacccccaaaggacactttcagcgacagctatggacagcatggtaccaaggagttaagttgaggctttttccagctttctctggttcatttgattgcttgataaggcctcaggatctcagcattgcacaatgcctcatggaagcctttgagggtatcacacagacacccccaccttcctccagcctgtgcgcacctgccctccttgcagcccagcacacctgcaggtgtaagggacgattggagtttcttcccagagagtctgtcccagaaggactgtggcttgtgtgtgtccatctcgcctgttggctcagtgcttcatcccatttgcagagcctcagacacgtcttggtggtgaggctcagttacccctgggcttaggctgaggcgggccctgtgctgggggtggtagaaaggatgctgctgaggcagctggaggagtgggagtagctcagaggggagggctgttggatgtatggggagctggcagagcaggtggcagtcactgggacaaggagggacttgcctctcttctcattattgtgtcctttgctttagtgtcagtcctggacttgtgcaggcctgttttgtgtagatctgttttggaagatggcatggtctaggtggttgaaggatgtagtagaaggatggatggtggaaggtggggacgttggtggctggctgaggtgcatggsccccacacaggacagytggagaatgggccgtccacttggcctcgttctgcgaggggctcatgggtctgagagcccccacccactaggcttgattgcatccctgttgtgccctttaagagacatgtttccaccccacccccaaccttgtcccaagtgccctggactaaatttcctgtgccagtgactgcagttggccaagggacaatgtggaaaacccagtgtccatctttccaccctccctgatctccagaaccttcgactgacccccttgtctttatgctgatgttgagttttgggattgttactggttgaagtgggggcagatgcctgtcaccaaggtgttgactgtgtgagaaaagcagtttgggtgacaaatcctgtgtggcacaagttggatcgcttcctagaaataagcaacacctctcccaaaaagcagcccacaaggcaggggcccagcagcccagccatcactcatctttgaggaaatgagttggtagcctctgtgcactgtttggtggycacatcacaggtgatgtcctgttcacatacctgcttgtatttaaagccctcagtctgtcctgttgtgtggggcgaagtgatggactctgccaggtggacatgctgtgggtggatgttcccggcgtgtgccrggcctgaatggacaggggccacttcacagcatgtcagggaaaatcactgtcacacaattccaatggattttgtgctctttttgaaaaaaaaaaattctttagcgtaaacatgaattttttttcaatgtagcccctggggaatgaatgaaattttgagcttcttcaatacgtaaaattaaatttataccmctgagggagagaccctttytgaaagaagtatggccaaaagcactttaatgctgctgacattgttgtttttatgttcatttgctggagcgcaaracgtgctgacacagtgagttttytctgatgtatttaaggtgatgtatttgcttgagttactcctgtatcattgctcataatattggaaactaaaataaaacctagttggaaatcctttgtgagatctgtctttttgggttcttgtacaaactcctctttgacatggccagctgtattctgaagtgaccataactttggggaagttcccactataatctggctccttattcttggaaggaatttgatactctcaaaagaacagatggtttaactgatctttaaggatcaggaaatcgagactgatttctttacagatttctctgtaactccagaccatttttcacttaaaaagtaaatgactcactgttccatcctgctttgccttctgagaatttggttgccactattcttttttttttttttcttttttgagatggagtcacgctctgtcgcccaggctggagtgcagtggcacgatctcggctcgctgcaagctccgcctcccgggttcaagcagttctctgcctcagcctcccaagcagctgggattacaggcgccgaccaccaggcctggctaattttggtattttagtagagacagggtttcatcatcttggccatactggtctcaaactcctgaccttgtgacccacctgcctcggtctcccaaagtgctggcattacaggtgtgagccaccgcttttttttctttttttttttaagggtcctcaggagtagatacaggggtagtcagtcagtttccccgcccctacagctgtcctcttggctctggtgctgcccagtgtccgccctgctcgcccacagaggccacagctcagctgatagcaacctcatccttccagattcccaggctacacacttggggcatcaccctcgagtccacggtcacacgtgctgcaccaaatctgtcacctgctgtcttccaagtctgttgaccctgcccagtttcctcacctccatcataaccatcagcccggatctaggttcctgttcctgccttgtccccgcctatcctcgccatcttgtggctgtttcaaggcagcagccaaagactttctcaggtaacaaaaaaaaaatgaatcattaccttttttttttttgcaatccacaaaacaagtagtttctgtcattaacaagatgttatgtacaacccactaaattgttcacgacagcatcatcccgggtgatgagccatagtttgaaaaagggccttcttgccttatgcaaatgctgcttagttattcccagtcaaggccagcctcattcctgtgctttctctgactacctcatctgtccactggcgaatctgagaggctggaagttttagccctctggtaacaatgtccctatttaatcacaaaaagtaggtagtcaggaatgttccactgtgtcccaagcactggggtgacagcccaggcagctctctcggagagcatctggcttcataatgtggcctcagaagcagggccctcctcgcagatgtcagctaagttgttcaccgtgtcctcaagtggatggtttcctgtgtctaagtgggactcttaggcttgagataagaacagcgaactttgagagtttagtatgtcagacatttcatacgcatgagccctaatctcaaaatccaatggtctattttccctaatttcctcaaatgaggaagttcattaattcagcaaaatatttgtgcacttactatgtgctaagcatggttctaagcactggagatatagcagtgactaaggtggataaaaatctgcccctggggccagacgcgatggctcacgcctgtaatcccaacacttttgggaggtgggcggatcacgaggtcaggagttcaagaccagcctggccaacatggtgaaaccccatctctactagaaatacaaaaattagccaggcttggtggcgtgcacctgtaatcccagatactagggtggctgaggcaggagaattgcttaaacctgggaggtgggggttgcaatgagccgagatcacgccattgcgctccagcctggcaacagagggaggctccctctcaaaacaacaacaacaacaacaaaaatctcactcactgattagtaacctttttcagttacaaagaaaaacaacatactcgctaaactccctaacatcaggagccatcaggcaaattatctcaagtcttgatttacaaaccaaacccttatgcctctgattacacaggggaccggtctgacaaactttttttttttttttgaggtaggtttttgttggctggagtgcagtggcgcaatcacggctcactgcagacttgacctcccagactcaagtgatcctctcaccttagcctcccgaatagctgggattaaaagtgtgcgccaccatgcccggataattttttgtttttttgtagagacgagggatctcactatgttactcaggctggtttcgaactcctgatctcaaatgatcctcacaccttggcctcccaaagtgctgggattataggtgtgagccaccatgtctggacacaaatattctttttctttttttaatttaatttttcaaatagagaatgtatgttggctgggcacagtgcctcatgcctgtaatcccagcactttgggaggctgaggtgagaggatcgcttgaattcatgagtttgagaccagcctgggcaatctggcaaaaccctgtctctacaaaaaatacaaaaattagcccagcatggtggtgtgcactggtagtcccagctattcygggggctgaggtaggagaatcacttgaacccaggaggtggaggctgcagtgagccgagattgcatcactgcactccaacctaggcaacagaatgagaccccgtctcaaaaaaaaaaaaaaaaaatagatgggatcttactgtgttgcccaggctggcctctaattcccaagctcaagtgatcctcctgccccagcctcccagagtgccggaactacaggcatgagccatcacacccagccaataaacattcttttctgataagcaactgcagaacttaagccagtttcagccagcttacagaagctgtgaacaacctgtttagccaatgcacatgagctcacctcctctcataaatatgtatacagcttttccctcaaacctgctaaatatgtatgaatatgggccctgtgaggcataaaacccaacctgtcctttctctcttggaagagagcaccttcagtgcatgctgcaaaccatctcttcctggtttgcaaacaagtatcaacaataaagtgctcctttctactatttagccaccctggtgatcttctagacaacattatgcgtatttctgctaggaacattagtgttcaaatctctgtgtaggcagatgttttcattttttgtaggtagatatctcaggctggacttgctgggccatatggtaaatttatgtttaacttctacagattttgtgaagtggttatactgtcttatatccccaccagtagtgaatgtgggttcatatatatatatagtttttttttttttttttttttgagacagtcttactctgtcacccaggctggagtgccgtggcacaatcgcggctcactgcaacctccgcctcccaggttcaagccattctcctgcctcagcctctcgagtagctgggattacaggcgcccaccaccacacccggctaatttttttctatttttaatagagacggggtttcaccatgttagccaggctggtttcaaattcctgacctcaactgatccgcccgccttggcctcccaaagtgctgggattacaggcctgagacgtcgtgcccggcctcatttcattttttagagcatcacaaactacctctccagctcatcttgctagagttactgcataatccatgcattcctgccaaggatcagccatcttcttgagtcggagggcttcctgctagctcggtgcctggtgttatcaccctcggctcttctggaggtagaggggctacctatcttcttttcattcttttttttttttttttttaatttgagacagagtttcactcttgttgcccaggctggagtgcaatggtgcgattttggctcaccacgacctccgcctcccgggttcaagcgattctcctgcctcagcctcccgagcagctgggattacaggtatgcgccaccatgcccggctaattttgtatttttagtagagacggggtttctccatgttggtcaggctggtctggaactcccgacctcaggtgatccgcctgcctggacctcccaaagtgctgggattacagacgtaagccaccgcgcccagccaatttttgtatttttagtagagacggggtttcgccatgttgcccaagctgatcttgaactcctgacctcaggtgatccacccgcctcggcctcccaaagtgctgggattacaggcgtgggccactgcgcccggccccagtttttctaagttatatagtttaggtttcacaactagatctatgatccattctaggttaatttttgcatatgggtttcttttttttttttttaggatgagtgtgtggatatccaattatacctacaacatttgttgaagacaccatctcttcttgttttcccaagtttccacacacattattgataaaataaatttttttggggggggtgctgggtgtcgctgggctgtaactccttacctcaagccatctgcccacctcggcatcccaaagcgctgggattacaggcgtgagccaccgccccgggccgaaggcattatcctttctccactgaattgcactttcatttttgtcaaaaattaattgctcacatatcggaactctattctgttgcattgatccatttgtctacctggacgccaataccacactttctttcttttttaaattaatttatttattgagacagggtctctcagtcagggtggagtgcagtggtgcaatcaaagctcaccacagcctcagcctcttggactcaggtgatcctcccatctcagcctcccgagtagctggactacaggtacgtgcctggctcattttttgtagagacggggttttgccatgttgcccaggctgggtatcttttttttttttttcttttttgagatggagtcttgcgtcttgctctgtcatccaggctggagtgcagtggcgcgatctcggttcactgcaatctctgcctccctagtagctgggttcaagcgattctcctgcctcagcctccctagtagctgggattacaggcgccggccacctcgcccggctaatttttgtatttttaggtttactggcgtgagcaaccgcggccggccccaatactacactttcttgtttactgtgtagtccttatcttctggcgcaaagcgggcactcgctaaaaacctgaatgaaagtataaagcaggccgggcgcagtggctcatgcctgtaatcccagcattttgggaggccggggcgggcggatcacgaggtcaggagttcgagaccagcctggccaacatagtgaaaccctgtctctactaaaaatacaaaaaaaaaaaaaaaaaaaaaaaaaaaaaaaaaaaaagccgggcatggtggcgctcgcctgtagtcccagctactcgggaggctgaggcaggagaatcaatcgcttgaactcgggaggcagagattgtggtgagccgagatcgcgccactgcactccagcctgggcaacagagtgagactccgtctccaaaaaaaaaaaaaaaaagaaaagtatgaaacgatgagtacaatgagtagccagccgcctgccccacctaccccgccgctccggactgccgcctgcgccgagcctaggccgcccagcctgactgaaactgccgctgctgaactcagcgtatccagtcccgcagctgaccaatcggagctcgcccttccggggcccgccccattccaggaatcgacctccgcaccggcctcgaaaattgaccaatcggttgtgtagctccgctcttagtcccgcccccacgctgaaactgacacttcggatcgccgagtaacgctcaccagacgtcccggccctgcccctcacctgaccaatcaagacggccggccgaggcccctggaacggctcagg

SEQ ID NO: 95239 - DNA, 53009 bp, Homo sapiens
tttcacaacattggccagcatggtctcaaactcctgacctcagatgatccaactgcctcagcctcccaaagtgctgggattacaggcgtgagccactgcgcctgccttatttatttatttatttattgagacggagtttcactcttgttgcccaggctggagtatagtggcgcgatctcggctcaccacaacctccacctcctgggttcaagcagtcctcctgcctcagcctcccgagtagctgggattacaggaacctgccaccacacctggctaatttttgtatttttagtagagatggagtttcaccatgttggccaggctggtctggaactccttacttgtgatctgcccaccgtggcctcccaaagttctgggattacaggtgtgagccaccacccccagtcctatttatttatttatttatttagagagagggtctcactctgttgcccaggctggagtgcagtggcacgatcacagctcactgcaacctccatctcccaggcttaagtgatcctcccaactcagcctcccaagtagctagaactataggccgtcaccattatgcccagctaattttttttttttttttggtattttttggagaggcaggtttttgccacattgcccaggctggtcttgagctcctgaactcaagcagtcctcctaccttggcctcccagagtgctgggattacaggtgtgagccaccacacttaaccttctttatttttttttttcaatttttattttaggttcagggagtacatgtgcaggtttattacaaggggatattgtgtgatgctgaggtttaggcttttttttttttgagatggagtttcgctcttgttgcccaggctggagtgaaatggcacgatcttggctcaccacaacctccacctcccaggttcaagcaattctcctgcctcagcctcccgagtagctgggattacaggcgtgtgccaccatgcctggctaattttttgtatttttagtagagacagggttctccatgttggtcaggctggtctggaactcctgacctcagatgatccacctgcctcagccttccaaagtgctgggattacaggcgtgagccaccgtgcccagccttaaggtactgcactccagtctgggagacagagtgagactctgtctcaaaaaaaaaaaaaaaagaaagaggacattttattatgatttatttttactattattattattagggaggcttaagtgctagtgagaggtgatcatccatctagcagcacagaatatggccatcctaccgaagcccttgctcttcctggggccaaaaaaggaaatgaataaaagaaaaggatgaaaatgagaaaagcccctcatgtcaccgggcagctgccctccaggccagctatcctttctacaccttccctagaaatctgagtcctgcgcctttaactgtccacagcacgtgcagcacgtaccagaagtaacatctggacggcagccaccactggttaaagagacaggccccctttctccatgaagcttgggcagggttcaagtttcagcaatttggtgaagggaacaggaaacagatacmaaaggaggagarggcagsctttgccagagtgaatcctttctcccagagaggccagcagcctccaagattgattccccctcctgacttaaaatgacttttgggcatgggactcccactgcccaaggggttttttcttttccttttttttgagacagagtcttactctgtaactcaggcagaagtacagtggtacaattacggctcactgcagcctcaacctcttgggctcaagtgatcctcccacttcagcctcctgagaagctgagattacaggcgcacaccaccatgccctcctaattttttttgtggagacgggaggtgggtgggggcggagggacgggtctatgttgcccaggctggtcttgaactcctggtctcaaaggatcctcccacctcagcctcccaaagtgttgggattacaggcgtgagtcatggcacctggcctcaaggttttgttttttttttctattcatagtacatcaccattgaggttctccttggactacagcaaatggagggttagagctgggttccaatgctgcctcccttactgtagttctgcatcagttgtgtggcgtcgagcagattgcttcacttctctgggtctgttttctcattttgcaaatggggcaatactgtttaattagcaaggctgttgcgagcagggaatgagggagagttttgaaaactgaaccaggggccgggagcattggctcacacgtgtaatcccagcactttgggaggctgaggaaggcagatgtcttgagctcaggagttttagaccagcctggccgacattgtgaaaccctgtctctacaaaaaaaaaaaaaaaaaaaaaaattagccaggcaaggtgcatgcctgtagtcccagctactcaggaggctgaggtgggagaatcacctgagcccaggaagttgaggctgcagtgggctgtaatcacaccactgcactccagcctgggcagcaaagtgagaccctgtctcaaaaaaaaagagaacatggaaccagccaacaaatgctcattctcctccctctgctcctcctggcatttcctcttcctccaggggtctggagtctgagtctgcatcctcctgaatccaaaacatccggtggattctggcaccaagtcctgtctccagatgctgaaactcccagccctggatcccagctgggaggtaggggccctggattctgctcaggsctcttccttttacttgccttgggaccttgagcttgctgccccatgcctatggatatcacttgtgctatctgtgcaatgagcacatctccatacaatgagatgatttccacacaatgagatgatttccaaggttcccagtgactgactctatctttgtttttttaatagagatgggggaagggttttgctatagtgtccaggctggtctggaactcctgggcccaagcagtcctcctgccttggcctcccgaagtgctgggattacaggcatgagtctctgtgccggcctggacctatattctaaaaatagcatgtattgattttgtttgaatatatatatatattttttcaagacggagttttgctcttgttgcccaggctagagtgcaatggtgcgatctcggctcactgcaatctccgccttccaggctcaagaaattctcctgcctcagcctcccaagtagctgggattacaggaatgcgccaccatgcccagataattttgtatttttggtagagacagggtttctccatgttggtcaggctggtcttgaaatcccgacgtctggtgatctgcctgcctccacctcccaaagggctggtattacaggcataagccaccatgccccgccgattttgtttgaattttacaaatagtatatatttattgaaaaaaaaagaaaaatataaataacaaaataaatacttggaaataatataaaacatcaaaaattgtctatataaatatgaaataatcccacaacctggaaataatcacagtaaatatttggccataattttctcctagcattgtctctatgcatgtatacatcgataagaatatatttttggctgggcgcgatggctcacgcctataatcccaacactttgggaggccgaggctggtggatcacgaggtcaggagttcaagaccagcctggccaagatggtgaaacctcatctctactaaaaatacaaaaatgagccaggcatggtggcaggcacctgtaatcccagctactcggaaggctgaggcaaagaattgcttgaaccagggaggcggaggttgcagtgagctgagattgtgccactgcactccaacctgggctatacagtgagactccatctcaaaaaaaaaaaaaaagaaggtatttttactgagtggaaccatactatatattctgcttttccacttaacatcatatgggtagtgtatttctctggctgcagcatctgaatgctattttgtttttatttttattttttggtttgtttgttttttttgaggcaggttctgactctcttgcccaggctggagtgcagcggtgtgatcatggctcactgcaacctccacctcccgggctcaagtgatcctccccagtcagcctcctgaatagctgggactacaggcacatgccaccatgcccagctaatttttgtttttttagtaaagaaggggtttcaccatgttgcccaggctggtcttgaattcctgggctcaagcaatctggctgtcttggcctcccaaagtactgggattacaggcatgaaccaccgcacccagctcatctgaatgctgttgatttattaatatcttttcccagcacagacgcatagcctgctctttgtcgtccattgacattcgtgacattccttctctcccacccctttgccccctgcagggaaccccctgccagcctagggttacacctgccacccactcctctggagcctaatcagctgggagaaggctcctgggtccctgtctaaggtcttttttttctttttttttttttttgagacagagtttcgctctgtcgcctaggctggagtgcagtggttcaatcttggctcactgcaaactcagtctcctgggttcaagtgattctactgcctcagcctcctgagtagctgggattacaggcgcgcgccaccacgcctggctaatttttgtattttagtagagacagagtttcaccatgttggtcaagctggtcttgaactcctgaccttgtgatccgctcgcctcagcctcccaaagtgctgggattacaggtgtgagccaccgtgcccggcctctgtctgaggtttcttccaaggaaggaaggatttttgttcagaggtggctgcccctgtctgacatctggtccaggagcccttactctagagaccgttgagttgtttgttgggctttgggtatctgtgaagaggccctaaaaactttcatcgattcgtttactcatttaacaattaatctctctagggtgtggtggctcagcctgtaatcccagcactttgggaggccaaggcgggtggatcatctgagggtgggagttcaagaccagcctgaccaacatggagaaaccccacctctactaaaaatacaaaattagctgggcatggtggcacatgcctgtaatcccagctactcgggaggctgaggcaggagaattgcttgaacccgggaggcggaggttgccgtgaccccagatctcgccgttgcactccagcctgggcaacaagagtgaaactctgtctcaaaaaaaaggtagaaaaattagccagggatggtggctcaggcctgtgatcccacctacttgggaggctgagatgggaggatcgcttgagcccgggaggtcgaggctgcagcaagcggtgatcacgccactgcactccagcctgggcaactgaaagcaaccttgtctcaaaaaaatgaaaaaaaaaaaacaaaaaacaaaaaaacctcagaagcaagactttccttggctcagaggtttgcctcccagggacacaaagggagatcaagtgattgccttttggggagagtggagacgggcttcctgcatttccagtgcctgggtgggccacgtaggggtgtccgtgtctctgaacgcatccgtgcccaccctcaccccttgggttttgggaaggactaatgaaatcatgaaaactgacttccttggggcttgacctggggctgctctaagtgcgctacaggtaacgccattaacccgtgcaagacccaatgaacagacgctatcataagccccacttttcaggcgagcaaacaggggctcgtggctatcgatgccatggagccttggcccagaacctggggtctagaaatcgtggcctctctctcctctcaccgccctctttctggtcggagtgaaccccccagagaagggagggagacggcagggcctgacggaagccccgggagctgcacagagaggcggagggagctgccctaataaggagaggcccggacttgggcatatctgcagaaaaacccttccccactaggcaggcgcgggggagggcgtggaggggcggggtggtgccgcccccggggcgggcccagtgcgtggcagcgggacctgcggccccgtcgcgaagtttccagccctgcgagcgccgccgggtcggccgatcgtcccccatacctcggccatgcggcccctgctgctactggccctgctgggctggctgctgctggccgaagcgaagggcgacgccaagccggagggtgagggagcgaaggccgggggcgggagcgcggatccgggcgggagggctggtgtcgggctgcctccctgggaacgacctgaatgggaggcctgggctggagagggagtctgggttccggctccttgtccacttaatcgctggtgacttgaacaaatcacttcccctcttggggctgcggttcctgcttcgggaaggaaagggtgacagctgagtcccattcagcacagaaaggctcaaataataatagttttcataataatarccgacaatggctattctgcccagtgctcactatgggccaggcatcagttaggcatgattgctaccctggtaagtgtttccttctattatccccgttttccagctgggcaaactgaggctccagagttcattcacttgcccaagatcatacaacttgtgggccttggaaccaggatttaccccacccacccaggtgtctggttccagagccaggaggcctcatgaccatgggartraggggtcttgagggggacaggggaggaatgggggtagaaggtgtggctcactttgtggataagtttgtgctttcatccatgtcccctgtggtctgcttagcccctgccagggtggtcttcctctctgcagtttattttttttattttayttaatgtattatttatttagttatttatttatttttgagacagagtcttgctctgtcgcccaggctggaacgcagtatgcgatctcggcttactgcaacctctgcctcccaggtaaaagcaattcttttttttttttttgagatggagtctcgctctgtcgcccaggctggaatgcagtggcacaatctcagctcactgcaacctccacctcccaggttcaagtgtttctcctgcctcggcctcccaagtagctgggattacaggcacgtgccaccatgcctagctaatttttgtatttttagttgagatggggtttcaccatgctggccaggctggtcttgaacttctgacctcttgatccgctggcctcagcctcccaaaatgtttggattacaggcgtgagccatcgcgcccggccggttcaagcgactcctgtacctcagcctcccaggtaggtgggatcacagacatgtgccaccrtgcccagctaatttttgtatttttggtggagatggggtttcaccatgttggccaggctggtcttgaactcttgacctcaggtgatcagcccaccttggtctcccaaagtgttgggattacaggcgtgagccaccacacctggccctctctgcagtttatacttgaggaaactgaggcccagacaggtgaagtgactgtccagggtggtccagacagaggtggttggtcygaggtcagctgggctccagtctagcgctctttctacttcctcaaggcagattggattgcagtgtgtgccccactgtcctgagtgggtgcttccctcctccccagccctccctggcatgggccatctccagggctgtcccgagaagggcatagactgcggacagtcccagcaaagccaagcagaagtggcggtactttccatggcattctcctccttcagcttaccctcctggagaacctgaaactgtatcaccagaaggatcccgggttctttgggtcaggaatgggaaccaccatttattttattttatttatttaatttttttttgagacagtgtttcactgtgtcccccaggctggagtgcagtagcatgaccttggctcactgcaacctctgtctcctgggttcaagcaattctcgtgcgtcagcctcccaagtagctgggattacaggcctgcaccaccacgcccagctaatttttgtatctttagaagagacgaggtttcgccatgttggccaggctggtttcaaactcctgacctcaagtgatcctcctgcctcggcctcccaaagtgctgggattacaggtgggagccactgcacccagccaggaaccaccatttcttttcttttctttctttttttttttttgaggcagagtttcactcccgttgcccaggctggagtccaatggtgcgatctcagctcactgcaacctccgcctcccaggttcaagcgattctcctgcctcaatctccctagtggctgggattacaggcggatgccacaacgctcagctaatgtttgtatttttagtagagayggggtttcaccatgttggtcaggctggtttcaaactcttgatctcaggtgatccgcctacctcggcctcccaaagtaccgggattacaggcgtgagccaccgcgcccggccaggaactgccatttcttgagtacctccctcggaccaggttgtgcccaaggccccacgtctcccagtggtaaagccggcggtgcttgctctctgtgaggcttggtgttctagcctgcaagacccggtgatactacctcacgcctggagctctaacaagaattccaggggatgaagttggggagagttcagctcaatgcctggcccatgaaaggccctcggcaaagggcattttctctcccagtcccagggctgctggcttacagcagggcagtaagacagctcagaaagtccagtgatggaaacgctgaccaccgggctgtgcaaagggctctcggcctgggtcccctcactggccaggagccctgttgtggcctagttttctgggcctttgatccccctgcttctgctgacatggggtgcctgcatcccagaccatcccaggagagaaaccgcagctgcccatgatgaagcccggtgagttgaattgaagagggaccagactgatgacagggcgttaggcaccctgatccccagcaagtgacaggaggagggcagagcagatccaaggaagccttcacagagggtgctgctatgggyggaggacaggatcagtgtgctactgaggtaacccaggtagagcacctggtaggtagaaagcacatctgtgctcactgatgcacaagagagcagatccccaggcctggggctaatgtcaggccagtctgagttgggccctttgcttcccttctccatttggatccctccctgttttccatttttttttttttttttaagttttcattttctttttttttttttctttgagacagagtctcgctttgtcgcccaggctggagtgcagtggcacgatctcagcgcactgcagcctccacctccagggttcaagcgattctcctgtctcagcctcccaagtagctgggatcacaggcatgcaccaccatgcctggctaatttttgtatttttagtagagacggggttttgcaatgttagccaggctggtctcaatcctgacctcaagcgatttgcccaccttggcttcccaaagtgctgggattacaggcctgagccaccacgcccggccaggatccctttgctaagtaagaaatcatcaactccattttggagatgggaagactgaggtcctggtaggttaaacatctggtctctcattgccagarctggttggaggtggggtcattgtctggaactcagacctactgttcatttctgcacctctggacgggaagggggtgctgttgcctggaaatgctgcctgggggagcctgctcagctcccccagacccagctgaggtgtgacctttagccagctggacaggaggacagagtgggttgctcatcttccctgcaggtcttgcctgagcatcccactgactagtgtgtgtgtttggtggggggtaccccagcagcccccaaagaggccagctcttccctttccctggcagatggatgggaggaggcagctactgaggtggattcagctggagtagggaaggggatttgctgtggagtctcggggagtgagatgggtggggtgctgtcagcagcttgtctgtcccctcacccaaaacgcatggccttggtgcatggagagaaacatggaccgttttcacttttgggggctcccaatgagaggggggtacagagcacctcacttcagtagacaccccacgtctgagggaagagatgttgcgccatcctgggggggcttccagaacaagatgggagacacaagaaggcttcaacaaagcaatatcttccatcacagggaactgggagaataaaaggcaacatccaaacaggcagatatccctagagccgaggtcagatgtcccacagcccttcctcccgtttgtagaaacttctagcagatctccagctcctgcctttccctgtgggccttgatttggccgtggtgagagaaggacagctgcagagatcagaggctcagctggccgttcaggtcatgctgttccctactagagaacagaagggtcccaggagtcagtcaggctgcactggatggtgtgggggtggggccgggtctggggagacctaagtgggcagctggccccggggaggctaaggttggctcccacgtgcagggcatcccaagctcctgccagaccctgttcctggcttcagttcaagcctggggtggggatgaaggatgggggaggggagagggcggaagggcttcattcattcccgcctccccagggagcagactgggtgtgtcatgactgtgccttgactcaggccacacagtgaccacccacgccttgggctgggactgcttggggaggagggggcatccggtggcacagtcaaaccaggggtgcccagaggtcccattcttccaggagctcatcacatacgcacaccccaaccaagccctcaccgtcagtctctccacatcattctttttctttttctttttttgagatggagtctcgctcacctagtctggagtgaaatggcatgatctcagctcactgcaacctctgccccctgggttcaagcagttctcctgcctcagtctcccgagtagctgggattacaggcgcccaccatcatgcccagctaatttttgtatttttagtagagatggggtttcgccatgttggccaggctggtctcgagctcctgacctcatgtgatccacccgccttggcctcccaaagtgctaggattacaggtgtgagccaccgcacacatcattcttctcttaaaagtttttctaaattttatttttttgtacagacagggtctcactgtgttgccccggctggtcttgaaccctcaggctcaagtgatcatccccaccttggccccccaaagaccgggattacaggtgtgagccactgcacctggctaattcctgtggcccagtagcatgactatagctcactgcagccttcacctcctgggctcaagcaatcctcctgcctcagcttcctgagtagctgggcctagaggtgcgtgccaccatgtctggctaattttttaattttttgtagagacagggtctcactttgttgcacaggttggtcttgaactcagggcctcaaataagcctcctgccttggtctccctaagtgttgacattacaggtgtgagccaccccaccctctgcatcattcttgctctcaggaaggcagctcccctttattcctgacccccagggcagcatctaccaagacacagctcccctttaggggaggcaccctgtcgccagaacccccccgcagctaccaaggcaggcactgtgccaagcgctttacggcattggctcattgaatcctcatgaaagtctctggagggaggtactatcatctgtattattcccattttacagatgagaaaactgaggcacggagaggmtaarttccctgcccagcaatctgtctttagcaccctctctgytgtatctcattgatttctgctgatcctggatcacgggttcatctggggaagtcattgctggactttgggcagtaggtggggagggctgagagctctgggtgccaggccttggccttagcccaaggcagctggctggaccagacagaaagcagatgggaggggccttggtrctcgaaaatgaatcttccacatccatgccttaagggtttctctggcctggcctaacagtgagctgggaaaagacctcaccacgtgactgcagttgggtgcttgtgctgcagaggccagagagaaggcactggaagcgctggcttttgtctgcagccaggagtctggcatcttaggatgttgggctcttggacagggaaatgaagacaagagcatgggcatttagaattccaactcattcccatttcacctaaaggttctgtgactttgggtcaggtatttagcctctctgtgcctcggtttcctcacccgaagaagcagtgataaaaatatcaccttcctcgtagagtgttgaccgtgaaataagataatgaatgtaacatgcctcatacagcacacggtatctcaccgggttcagtggtggtagctgttcctaaaagtactttgtttgtttgttttgttttttgttttttgtttttgagagggagacttgctctgtcacccaggctagagtgcagtggcaccacaaaagtacaaaagtaccttccatgttgctgcttttttttttgagacagagtttcactctgtcacccgggctggggtgcagtggcacaatcttggctcactgcaacctctgcctcctggtttcaagtgattctcctgccttagtctcctaagtagctgggattattattattattattattattatttttgagatggagtttcacttttgttgcccaggctagagtgcaatggcacaatctgggctcattgcaacctctgcctcctgggtcaagcaattctcctatctcagcctcctgaatagcagggattataggcgcctgccaccatgcccagctaaattttttttgtatttttagtagagacggggtttcatcacattggttaggctggtctcaaactcctgacctcaggtgatccgcccgcctaggcctctcaaagtgctaggataacaggcgtgagccaccgcgcccggactagtagctgggattacatgcaccaccgtataacttgcagtatgtaatatgcaccactgcctggctaatttttgtatttttagtagagacggggttttgccatgttggccaggtgggacttgaattcctgacctcaggtgatctgtccaccttggcctcccaaagtgctgggattacaggtgtgtgagccactgtgcccggcctttttttttttttttgagacagagtttcaccctgttgcccaggctggagtacagtggcacaaccctggctcactgcaacctctgcctcctgggttcaagcaattctcgtgcctcagccttctgagtagctgggactacaggctcttgccaccacgtctagctaatttttgtatttttagtagagacggggtttcaccatgttggccaggctggtctcaaatttctgatctcaactgatctgcctgcctcagcttcccctcacttcccaaagtgctgggattacaggtgtgagccactgtgtcaggcctcacgtagctgcttaaggccagaatgtacagtgtgtcttggtcatgcccagtcccagccatggtgagggagagggagaccaaggaaataaagatgtggccctggcctggcagagggagaaggagcaggtttgtaccaatacgtcaactactgggcaaaccaagactgcacgtgcaaaggagtgaccacatgggatgagattaaggagggcttcctggaggaggtagactggaggcctctttaggggaaggaatgtgtgttgcagacaggtcaagggaatggggtgcaggctgggtttactgaggctgtttccttggggatgttaggaggtcatgccagggtctcttgttggagggcttgccttcagttctcttgttgtgaaccgcctcccagacccctgcattgcagcccagtgtcagcggaccaaggggatggattggaccagtgattcccaaatgtggctgacatcagaaatcacctgggaaaggtaggaaaaatccagactcctgggcccacctcagacccctagccctggggcctaggagcctggattccacaacctctcttgtgatgctgatgtgtgggcaggtttgggaccctctgaactggacaatcacgtgggatcctcaaccagagaggcaggctctgcgtggcccaaggaacccgggagttttttttgtttgtttggttttttgttttttgtttttgtttttgagatggagacttgctctgtcacccaggctagagtgcagtggcattatctcggctcactgcaatctctgccccctgggttcaagcagttctctgcctccacctcccgagtagctgggattacaggctcccgcccaccaccatgcctagctaatttttgtatttttagtaaagatggggtttcaccatgttggccaggctggtcttgaactcctgayctcatgatccacctgccttggcctcccaaagtgctaggattataggcatgagccaccgtgcccggctttttttttctttctttttttttttttgagacagagttttgttcttgtcgcccaggccggactgcaatggcacagtctctgctcactgcagccgccacctcccgggttcaagcgattctcttgcctgagcctcacgagtagttgggattacaggcatgtgccaccacrcccggctaatttttgtattcttagtagagacagggtttcaccatgttgaccaggctgctctcaaactcctgacctcaggtgatccacctgcctcagcctctcaaagtgctgcgattacaggcgtgagtcaccacgcctggccayggaacctgggggttaaggtcccagtgtgggctctcagcagcactgtttccctggaaaacagggaatagacaggttatagggaggaaagtgggcatgtggggagggcacagctagacagctcccttacatagatagagagacagggccctctcaacagatggcctggccaccgtccctggctgggcagtgcatgcatttaggttaagagaggagactctgggttcaggcttgtgtccaagtcctggtgctgctgcttcctagctcccttgggcacattactcgccagctgtacccttggtttcctaactggaaagtcgggggttagtatgtgtgaagtgcttggaacagcattggctgggcacggtggctcatgcctgtaatccagcactttgggaagctgaggcaggcagatcacctgaggtcatgagtttgcgaccagcctggccaacatggtgaaaccccatctctactaaaaatacaaaaaattagctgggcrtggtggccggcacctgtaatcccaactatttaggaggctgaggcatgagaatcgcttgaacccaggagatagaggttgtagtgagacaagatctagccactgcactccagcctgggtgacagagcgagactctgtctcaaaaaaaaaaaattgtgtctggcacacagaaaatgctcgatgaaggtaagccattattgttgctgttattgagaagcaggaacctgagaaaggggctttgagccacgccaccccatccccttcccccacccctgctgctggagttcaagagcctgttccatcaagaatcctgaattgcgcatgcacgcgtacacacacacacacacacacacacacacacactcactcacatgctctcacgctggctttttccatccatgaaatgtgacactcttcctgtccccagcagccccctgttgccaagagggcctcagagctggtggctctggttctcttcacctggggagagacttcaccgtcctggcaggagctcgggggagcccttccccaagtgtgagcagcatccctcgtttctggatcccaggttcaggtagtgaggcctctccttcccacacctgcctggtgtatccaccccctcctcccccagcaccgcagctaatccctgccaatccctgctgggccgcctggcgccagccctctgccctggggccagctccctgccccggctacccctgccccagctacccctgccccgccagctctggcaagccaggcccctttgttcctacagtctaggttcctcctgacttcctgaggtggtgggaggggagggccttacctgcctgctgtcaatctggccaccaggtgaraagtgtaagctgcagaccctcagggagctaagactcacccagggaaacaatgatgagcactgcagtgtgggtcttgcctctgtggcttggaggccagagagggcaggagaaatccgagaaggcttcatagaggtggaagggacgtcattgtcactggccctgggacctggaggaaggttagagaaaggagacacaggccgggtgtggtggctcacgcctgtaatcccagcactttgggaggccaaggtgcgcagattggttgaggctgggagttccagaccagcctgagtaacatggtgaaacctcatctccactaaaaaatttagctgggcttggtggggtgcacctgcagtccctcccagctacctgggaggytaaggtgggaggatcacctgagtgcaggaagtcaaggttgcagtgagccatgagccatgattgtgcctctgcactccagcctgggcaacgggagtgagattgggtctcaaaaaaaaaaacccaaaaaacaaaaacaagaaaggggacacagagggagccatggtcccttgcatgggaggtcccttgcatgggaggtcccttgcatggtcccttgcatgatcccttgcatgggaggaacccagcaaggagagaccccctccagttggaggagggcctgcatgatggagagggatgagtatatcacccgccagatcagagagggccttgaatgccaggccaaggcatttgcttctcattaatcagcaccagtaatacctctttatttttatttatttttatttttatttttgaggtggagtcttgctctgtcacccaggctggagtgcagtggtgcgatcttggctcactgcaacctctaccttctgggttcaagcaattctcctgtctcagcctcccaagtagctaggactacaggcacatgccaccacgcccagctaatttttgtatttttagtagagacggggtttcaccatgttggccaggctgttctcgaactcctgatctcaagtgatctgcctgcctcagcctcccaaagtgctgggattaccggtgtgagccactgtgaccagccttcagtaatacctcttcatgtgtgccgagcatcccaataaagattttacatgcctgatctcatttaattactccagcagccctgagaagtaggtactattattatccctgctttccaagggggaaactgagtctcagaagggctagggacttgccccaggtcacatggctattaaggagcagagctaggattctaaccaggcaggctagctccagactcctcgcttctcagagaacacagcttcaaagtgtgctctgagaggggcttccccagggctccctgagatgctctctggggagttatttccagaagattctgttgcagaggcaggccacactacagagcctgggagaggttccttgttaaaattgtaggaatggctgccctggccaaaggtcagcagtggaccagtagatttcaagtcagtttccactctgggccgactcattggttctaagagcctcaagcatggtgttgggagaatctagagccatgtgatactcagcaagaaagactgtgagatagattagcaatgtctgtcctgggttaggtatggagagcagggacctgtgagccatgtatttgctgtccctgggctaattgtctatcattggccagagagatcttcctggtggtcagcattcagagtaatcttccttccacaccctctaaagccagaaactcagtcctataatgtagggtgtagacacctctcctgtctacagcacatgcttcakgacatgttggtcagtgtatttgtctgttttatgttgctgtaaagaagtacccgtggctgggtgatttctcaagaggtttatttggctcacagttctgcaggctgtacaagcataccaccagcatctgttctgcttccagtgaggcctcaggaagctttgactcatggcaggcatgtcacatggtgagagctggagcaagagagaggaggaagtgcaaggctcttttaaacaaccagctctctgctgggcacggtggctcatgcctgtaatcctggcactttgggaggccaaggcgtgtggatcatttgcggtcaggagtttgagaccagcctggccaacatgatgaaaccccgcctctattaaaaatacaaaaattagctgggcatggtggcgagtgcctgtagtcccagctactcaggaggcggaggttgcagtgagttgagattgtgccactgcactccagcttcggtgacagagtgagatgctgtctcaaaaaaaaaaaaacaaaaacaaacaaacaaacaaaaaaaacaacccagctctcttggtcgggcatgatgactcatgcttgtaatcccagcactttcggaggctgaagcagatcaccagaggtcagctgttcaagaccagcctggccaacgtggcaaagccccgtgtctactaaaaacataaaaattagccaggtgtggtggcacccrcctgtagtcccagctacttgggaggctgaggcaggagaatagcttgaacccaggaggtggaggttgcagtgagctgagatcatgccactgcactccagcctgggtgacagagtgagactctgtctcaaaaaaataaaaaccaaccagctctcacatgaactcagagcaagaactcactcattaccaaggagatggcaccaagccattcatgagggatctacctctgtgacccaaacacctsccactgggccccacctccaacagtggggatcacatttcaatgtgcaatttggaggggacaaatatccaactatatcggtcagttactgggtggagggagccctggaggagactcaggagacctgggttatttcctgctctatcatcctttcttccctgggccctgttctgtaatgggttgacatgaagacacttyctgccagaatttgacaggtcactgggaacaaagacctcctccctgtcacctccctcatcctccattcccattcaccataccctcctctgtctgcagacaaccttttagtcctcacggtggccactaaggagaccgagggattccgtcgcttcaagcgctcagctyagttcttcaactacaagatccaggtaaggggtttcctgggtgaggcagagacagtgaggggtggcaggaggatctaggagctagtgtcctttccaaactacyacgtctcttaagatagacttggggccacaggggaggcttctggaagcctgaaggatgaaaatgagttagtcgggaatgggaagacacagcagaggacacagcatgagtctagggggtgatggagagggaaagagttggctaaagaaatgctcagatgttagtgtgcaggagcctcagctgagaggctagtttagaggacagggcctcgggatcagcatttccacaagtaccaccccgtaatttggggatgggcacggtctagacatcttcccggtattataaacactgctctaaagaaacatgagtggtcccgcacaggggctcacgcctgtattcccagcactttgggagtctgatgatccactgaggtcaggagttcgagaccagcctggccaacatggcgaaaccccatctctactaaaaatataaaaaaattagctgggcatgatggcacgcacctgtaatcccagctgcttaggaggctgaggcgggagaatcacttgaacctgggaggcggaggttgcagtgagccraggtggcgtcactgcactccagcctgggcaatagagtgaaactctgtctcaaaaaaaaaaaagaaaataaaagaaaaaagaaacatgagctaatgcccgatcgaccactggcatgggcttggtgtcrtctgtgtgcagtccatggggctgagccctgcagsgagacgagtatcctgagtgcttccttatgtcaggcacaaggttgggcactggcaatagggtgatggacaatacagaacatgtcattgcttacacagagcttgcaatctagtggcattaagtcagcargcaagtgtatcagctcacatgaatgagggttgcagcagagggttgcttcaggcatggctggatccagggattcaagcagcaaagtgagggccttgtgtttccatctctaggccctgtttgttttaatcgtggtggcaagatgaccaccagccacagattcatgtgccccagtttctcaacttcagcagaaggagacaggctttcctttttaggaaaggcctgcagactgttctgtttttcacagaacagtcccagggaaggcgctgataggccatgctggggtcacatgctcaaatctccggatgtgggaggggcaggaagggtgggacattctgattggacaggcatggtcacatgaccaccaggaaccggctaatcctcatacaggtggagaatggtttccttacaggggagggtcagagttgctggacccmcagragcaaaaaaattatttctttttctctttttttgagacggagtgttgctctgtctcccaggctgaagtgcaatggagcgatttcggctcactggaacccccacctcccgggttcaagcaattctcctactttagcctcccgagtagctggaattagaggcatgtgccaccacacgccgctaatttttgtgtttttagtagagacagggtttcgccatgttggccagtctggtcttgaattcctgacctcaggtggtccacacgtctcggcctyccaaagtgctgggattaccagcatgagccaccacggccagccstggaaaaatatttctttaccaaaagcccgtgttaaggggtgtttctctccaggcgcttggyctaggggaggactggaatgtggagaaggggacgtcggcaggtggagggcagaaggtccggctgctgaagaaarctctggagaagcacgcagacaaggaggatctggtcattctcttyrcagacaggtaggtgggtcaggrcttcctagcctgggcccctccgcggaagatagaagaatattctaaaatgaggccctcccagaacatcrgggaagaagggggaccactctagctaaggttgcctagttttagggtgtccattcccggtcttagtaaagcccattcccaggcttggtgaaaagataaagaggaggtgacccatgagtgtgatgggccccctttaagtaagagaagaatgacatgttgtggggaccatctctttgcccagggtgcgggtgggaacatggcaggcagggctgcagacagagacaggtccatttcccagatggtggcccaggctggcgtgggcagagggccatttgtggagcacttgatccctggtccctcctgtctgtgccctcactgggcccctgctcacccttgccctgctccgtcttctcgctgctctggccacagctatgacgtgctgtttgcatcggggccccgggagctcctgaagaagttccggcagkccaggagccaggtggtcttctctgctgaggagctcatctacccagaccgcaggctggagaccaagtawccggtggtgtccgatggcaagaggttcctgggctctggaggtgagaggcctgggtgcagggcgcttggcccagcagaggggtccatctactgcctttgtggggaccccccttrtttgacgtgcaatctgggtgtctcacagrtctccagtgcagaatgtcctgaatagagctcctgacttttcaaccccaaatgtgctcccctgcagttctgatctcattcaacagacacgcagccccatrgacagaacccaggagtcactcctgactcctcccttgccctcctccacctacgtccaatgccagtcacctgtctactactttttaaattttgagacggcatctcagtctgttgcccaggctggagtgcagtggtgggatctcagctcactgcagcctccgcctcttgggctcaagcaatcctcctgcctcagccatccaagtcactgggattacaggcatgcaccactatgcccggctaatttttgtatatttagtagagatggggtatcgccatgttggccaggtgggtctcgaactcctggccttaagtgatccacctgcctcggcctcccaaagtgctgggattataggcatgagtcaccacacctggccacctgcctcctacttcctaaagatctctggaatctgctctctctggcccacagttcactgccaccattctcactgggctcctggccgttggtaggagcctccttactgctctgccattccctaccctcatgcccttccaggccattctccatccagcagccagaggtgtctttaaacgatgcaaatccaaggccaggcgcggtggctcacgcctgtaatgtcagcactttgggaagccgaggtgggaggatcacttgaggccaggagttcaagaccagcctggccaacatggcgaaaccccatctctactaaaaatataaaaggtagccgggcgtggtggtacacgcctgtaatcccagctacttgggaagctgaggcaggagaatctcttgaacccaggaggtagaggttgcagtgagctgagatggtgccactgcactcaaaaaaataaataatttttttaaataaaaaataatactatatttttttataatgtaaaatatattatatatattatatataataatttatataatatatataatatatatattggtggctcatgcctgtaatctcagcactttgggaggccgaggtgggcggatcacgaggtcaggagatcgagaccatcctggctaacacgatgaaaccccgtctccactaaaaatacaaaaaattagccaggtgtggtggcaggcgcctgtagtcccagctactcgggaggctgaggcaggagaatggcatgaacccgggaggcggagcttgcagtgagccgagatcgtgccactgcactccagmctgggcgacagagcgagacattgtcttaaaaataaataaataaataaagatgcaaattcacacacatcacttaatgactttccactgcacggagaataaaatccacaggcctcttttcaaccttagatggggatctgccatctgccctcaacagacacttttttccactggtccagagtaagcacagtccagatggccttgccctggcccaggcccaggagtagggatgtcccattgctcttgtggttgcttgtcaccagtctgtactctagccaggggcccatgtgggcttccccactatgccaggtctcagcccccaaggcactctgtgagcttggcccagcctttcccttctctgggccaggtttcccagataactrtaaaaagggacaccaggcctgtatcctcccagccctgctctccaggggctcctcgtacaatccgtttcttcaccacctatrtggtgcccagcactgaacagtacagyttagtgggcaccattggtcttattcttggggtcattaggaactcattaataagtgacattcactggcagccccatttccaacctgcagccccacctcctgtcaattcaggaggacttctgagaggtgacagggtttgtgggcatatgagtggaggtggataagagggaagggtgggaggaggcccctgacttagaggctggaagctaagrgtccgtcttggtgtccccacccaccaaccttcaggcttcatcggttatgcccccaacctcagcaaactggtggccgagtgggagggccaggacagcgacagcgatcarctgttttacaccaagatcttcttggacccggagaagagggtaagaggcagtgggcgggccaaggagagggggctggggatccaccggccaggctgcacgggaacagctcctctcaggcctgaacccctgggttggtgtcttagtctatgcaggctgctctgacaaactgccataggctgggtggctcccaaacaacggatgtggatttctcatggttctggaggccggaagggtgagatcacagttgggttctggtcagagccctctaactggtacagacacagctgacttctctctgtgtcctcagatggtggaagggggtagggagctcactggggcctcattgataaggacactaatcctatttttttatttttgggatggagtctcactgtattgcccaggctagagtacagtggtgcgatctcggctcactacagcctctacctccctggttcaagcgattctcgagcctcagcgtctcgagtagcggggactacaggcgtgcaccaccacgtttggctgatttttgtatttttagtagagacagggtttcactacgttcgccaggctggtctcgaactcctgtcctcaggtgatttacccgcctcggcctctcaaagtgctgggattacagtcgtgagccaccgtgcccggctgtcgggtcttaaagaggcagcattgttcattggttcagaataaggacttcagggccaggctgcctgggttccaatcccagctcaccatttactagctgtgtgacattgggcaacttctctgtcccttgttttttccgttatgaaatgcaataatgggccagacccagtggctcatgcctgtaatcccagcactttggaggccaaagcgggtggatcacctgaggtcaggagtttgagaccagcctggccaacatgatgaaaccctgtctctactaaaaatataaagattagccgtgcgtggtggtgggtgcctgtaatcccagctactcaggaggctgaggcaggagaattgcttggacctgggaggcggaggttgcagtgagccgagattgtgccattgcactgcagcctgggygacaagagccagactccatctcaaaaaaaaaagcaataatgrtaatactttctcacagagatgttgtcaggattaaattgattaatatatgtagaatagtttatttatttatttgagacagggtctcactgtcacccaggctgatgcgcagtggcagaaacatagctcactgcagcctcagcctcccggactcaagcgatcctcccacctcagcctcctgagtagctgggactataggcctgcgtcaccatgtctggctaattttaagatttttttatagagatgaagttttgctatgttgcccaagctggtctcaaactcctgggctcaagtgatccttctgcctcagcctcccaaagtgctggaatgacaggagtgagccaccgcacccgactcgtgtagaatatttggagtagcggccaggtgcggtggctcacacctgtcatcccagcactttgggaggcggggggcgggggcggatcacctgaggtcaggagttcgagaccagcctgctcaatgtggtgaaatcccatctctagcaaaaaaaaaaaaaaaaaaaaaaaaaattagctgggtatggtggcacatgcccgtagtcccagctactcaggagtctgaggcaggagaatcgcttgaacccaggaggcggaggttgcagtgagtcgaggtcgtgccattgcactccagcctgggtgacaagagcgaaactctttctcaaaaaaaagaatatttggagtagctatgtgcgtgtagtggagtgcttggcaggtgctggttactcttaacggccgtcattgttgtaggtgagccggctgcattcttagattccttccagttcagagtccctggttttctgtgagtagagccactagactgtagaccccaggagcttggctgctggccttctctgggcacctagctgccctgatgtgacgtggcagagtcggtgtggggaatgagggctgaacttggggacagattccccacactgggtgagatgtagccccagcctcccccagggcctgtccctgctgcagtctggtaccttctttcctgcaggagcagatcaatatcaccctggaccaccgctgccgtatcttccagaacctggatggagccttgggtgagcagcccccacggggaggggtggatcctcagaggggtgataggaagaattccaggcagggcccragcccagrgaggagaaatgggctgcttctttctggccattgtgctgagaggtcactggcctcatccccaggtccccaggggccacttggatatcctggcgcagagccatgtctctcttgggggcgggggacaagtragcattcagcctgggaggagttgggggatgcgcacagcaggtgctggaccccctgccctgcataccaggtccttacaggtgggccctctttccccactttcccggccctcccaccttccaggtgaaggagtcctgggctaggggcaggaactcagctggtgggacaggcagcttgggaagcaaaaggctacttgacccttgatgccgcaaacatccctgggcctggcctcatgtctgtggctggtgatgacattgctttgccgcaggtcttcctgtcttcctgagtgacctcaggcaagtcacacctcctccccacaggggactcagttttcttatctttacaaaagggaagtgaaccggatccactgattgctgattttgtggataaatgggcccttttgagaatctgatgaaagctacggctctgctcccagagaaacgcagaaaatgccctttgcctgtggtttctgggggttaagaagcactgagttcagatccacgcaggtcaggagctatctgttttcctttttttttcttcttttttaagatggagtcttgctccatcgcccaggctggaatgcagtggcgaattctcgactcactgcaacctccgcctcccaggttcaagtgattctcctgcctcagcctcccaagtagctgggattacaggcgcacaccaccatgcccggctaatttttgtatttttttagtagagatggggtttcaccatgttggccaggctggtctcgaactcctgacctcaggtgatccacctgccttggcctcccaaagtgctgagattacagacgtgagccatcgtgcccagccctattttaatttttaaaatagagacagggtctcactatgttgcgcaggcttgtctcaaactcctgggctcaagtgatcctcccaccttggcctcccaaagtgctgggattacaggtgtgcgccagcgtgcccagctgaaatacccattttcctatgtgcagactaatagggtcaaacatgggtattgggggccaggcactgtaatcccagcactttgggaggccaaggcgggtggatcaccagaggtcatgagttcaagaccagcctgaccaacatggtgaaaccccgtctctactaaaaatacaaaaattagctgggtgtggtggcatgtgcctgtaatcccagctactcaggaggctgaggcaggaaaatcacttgaacctgggaggcggaggttgcagtgagccgagatcatgccactacactccacactgggcaatagaatgagactccatttctaaaaaacaaaaaacaaaaacacacacaaaaaacatgagtattggaaccctgctgcaggggctccctccactgggacaagatctgtcctgatcatgcccaggcctcccctgcatgtggctctggcattttctcagtgctgctctgcctactcagagaaggcgcgtcccagaccctttctcttggggcttctctgaggtgcctggagctgggatgttccaggtcttcgttcttctcccagcccctgcttctgactgtaagtaaccacaacaagtacaggggttgccgtggattctgtgctcatgatgggccaggcttggtgccccacgcttgytcaacacaaatcctccccctcaccccatgaagaagggattattcctattttatagatgaggaaactgaggcttagagagaagtgacttgcccgwggacataatctactcactgcacagctgggatttgagcccagctggttggaccctgagcctgacctctgggtctgatgctgggtgggactgkgctttctgacccccagatgaggtcgtgctcaagtttgaaatgggccatgtgagagcgaggaacctggcctatgacaccctcccggtcctgatccatggcaacgggccaaccaaggtagggggtccccagcccctggggagtgtgggagggggccagagccctaatttcattctcactgtgaccccacagtgtctccctggggccagggccaccttcctggggcctgctatgaactcactgcctctgtcctcacatctgagctcagcgtgatgccttcttttcctgctgtggtggtcagtggtactctgtctgttcttgctggtcacaggacacgtaggaggctgccatccccttccaggcctaggctgggctaccagagccatctgcactgtcaccccagggcagagtcacttattcactcagtaaacctttatttcatgtttgcaccagacagtaagacatagtcataagcaggacggatgtcctgcattcatggtgacagaagggactgggtgcagatgyggccagggacagaatggacctcactggtccctggggaactggctcatagctcatagcatatttgagtgtggtccttcaccgctggaatgagggagaggaaggaggatgtgatgtgtttaaaatgcaaatttgctgatttcacccaggatctgttcagatggaatctctgagcggggtgggacccaggaatctgcattttacaagctctcgggagaagcactagagtgccaagccctcccctgccctctctcagagcggcttggtgatctcctggggatggagcattatctccaagaccctcttagggagtgggagggggctggatggtgctgacccactgggggcccagggagatgtgagtcagggctatggcaggtggggctggctggcttctctgtgaccccacgtctccccgacagctgcagttgaactacctgggcaactacatcccgcgcttctggaccttcgaaacaggctgcaccgtgtgtgacgaaggcttgcgcagcctcaagggcattggggtgaggctgcgcccaggcctgtgcctgagggacacggggggctcagtcccctgagatggcgagatgggtgattctggaatagactccattgtctttggtggaaagtgaaggggtcacctccctgcctggggttctatcccggttgccacccaagtgcctcctcctggaagccctctcagattgcatgtctctagcttcccccgagatgtccaggttctgrtttcttctgcctggtccttcaggmtctcctgcagccccctccccatcccatgaacctcatcctcatttaygactcacctcgaacaccacgccagccacgatctcctgacagcaggccctcaaccgagtccttgttccaggcctgggctcctgctgctstctccccggggcaccctcctgctgcttccctgcccccccgtaccccctgactggagttccccggcccgggcacctttcttgggaagtctacatgcttctgattctggctctgactcccttgggccaccctggggtggagtggcagtgctgtgactggacactgctggactcttgtgccgccctccctggtgcaggatgaagctctgcccacggtcctggtcggcgtgttcatcgaacagcccacgccgtttgtgtccctgttcttccagcggctcctgcggctccactacccccagaaacacatgygacttttcatccacaaccacgtgagtaacaggygctctgtggggtcgtcatgtggcttagatccagggcccagcttcacaaggtagcccgagacctctgagggtctcaccgaatctagcttatctgggccaaatgacaatcaccagtggactgtgtccccaaatcactgagttaactttggagtcagactgggtgagtttgaatcccagcgccgctattttattggctgtgtgaccttgggcacattactcaacctctctgtgctttagtttctcatctataaaataggcataaaagtcgggcgcggtggctcatgcctgtaatcccagcactttgggaggcccaggtgggcagattatctgaggtcgggagttcgagactagcctgaccaacatggtgaaaccctgcctctactaaaaatacaaaattaagctgggtgtggtggcagatgcctgtaatcccagctactcaggaggctgaggcaggagaatcgcttgaacctgggaggcagaggttgcagtgagccgagattgcgccattgcactccagcctggacaacaagagcaaaactccgtctcaaaaaaaataaaaataaataaataaataaataaaataaaatagggataataattgtgcaatcacacagaattgctgcaagggctaagcaagctgacatgcgaagttygtaaaaggtgcctggtgcacaggacgcatctagttgcttctaactgttgtcatcttcacttccatccctgtcactgttaatccttcctaccttcctaattgtacctggtggcagtcaaattggttttcttttctttttttttttttttgagacagagtctcgctgtgtcacccaggctggagtgcagtggcacgatctcggctcactgcaacctctgcctcttgggttcaagcgattctcctgcctcagcctcccaagtaactgagactacaggcatgcgccatcacaactggctaattttttgtatttttttttttttttttgagacggagtcttgctctgttgcccaggctggagtgcaatggcgtgatctcagctcagtgcaacctctgcctcccaggttcaagccattctcctgcctcagcctcccgagtagctgggattacaggcgcctgccaccgtgcctggctaattttttgtattttagtagagatagggtttcactatgttggccaggatggtctcgatctcctgacctcgtgatctgcctgcctccgcctgccaaagtgctgcgattacagccatgagccaccgcacccagctggatggttgtttttccttttttttttttttttgagatggagtcttgctgtgtctcccaggctagagtgcaatggtgcgatcttggctcactgcaacctccgcctcccaagttcaagcagttctctgcctctgcaacctccgcctcccgggttcaagcagttctctgcctcagcctcctcccragtasctggaattacaagtgcctgccaccatgcccggctaatttttgtatttttagtagagacgtggtttcaccatcttggccaggctagtcttgaactcctgacctggtgatctacccgcctcggcctcccaaagtgctgcgaatacaggcgtgagccactgtgcctggcctggactgttgtttttcaaagcgaagttgaggatcacctggcacattttgtaacaaagtggatctctgggccacacccaggaatcarcaatgtctctggatgtgggatcctgagcgtggtggcggagctctatcctgatgacagaggctcttaggaggcctgacctggtcagaggagaatgggcaaaggatggccagggaagggtgttcctggcacagggctggcatgggcaaaggtctggagacaggaaagcagatggccggggtgccagagatgaaggggcacagcctggcagtgacaggaggtgctacagtccctgggtggaagctgtgtcctccttcctcacccccgcatccccttccccatccccaaccccaggagyagcaccacaaggctcaggtggaagagttcctggcacagcatggcagcgagtaccagtctgtgaagctggtgggccctgargtgcggatggcgaatgcagatgccaggaacatgggcgcgtgagttgtgggccacagtactctccactgacagtgggggcaggggagctgtggctgtggtaaggagcagcaggctgagtgacaggagttcagaaggctgtgtgtgctctagcaagttcctgcccctttctgggccttggagtttccatctgtcaaaaggggaaatagcctctgtcctgccaacccccggggctcctgggcagggctgagccatgttatttgggttcaggaagcaaatcagagaaagaggaaggactgggggcaaaagtagacaaaggctgactattagggagccaaccttgaatgttttactttattatatataaaaaaaaaaggccgagagcagtggctcatgcctgtaatccctgcactttgagaggccaaagttgaaggattgcttgaggccaggagttcaagagcagcctgggcaacatagcgagaccctatctcttcaaaaattaaaaaaaaatagccaagtgtggtggcttgaacctggggtcccagctactgaagaagctgaggcaggaggacctcttgagcccgggaagtcgaggttgcatgagctatgattgcaccactgtgttccagcctgggaaacagagcgagaccttgtctcataaagcaaaacaaaaacaaagaaagaagtaatttgtgttgcttgtagaagagtcagacagtccagatcaaaggttggcaaacttcctgctaaggattagatcataaatctttgcaaattggctctgccggctctgtgacaaccctcagctctgccctagtagcacagaggctgcattccagcaaaatttcatttatggacactgaaatttgactttcatgtcatttatttttttttctttttgagacttggtgtcactcttgtcatccaggctggagtgcagtggcaggatcatagcttactgtagcctcaaacccctgggttcaagtgatcctcctgcctcagccccccaagaagctgggactacaggcatgtgccatcacatccagttaatttttaaatatttatttatttatttatttagagactgagtctcactccgtcactcaggctggagcgcagtggcgcgatctcggctcactgcaacctccccgtcccaggttcaagccattctcttgcctcagcctctcaagtagatgggattacaggtgcttgccaccacacctggctaatttttgtatttttagtagagacgaggtttcaccatgttttccaggcctgtctcaagctcccgaactcaagtgatccgcccgccttggcctccctaagtgctgggattacaggtgtgagccactgcgcctggttaatttatttatttttattttttgtagagacaggatcttgctatgttgcccaggctggtctcaaactcctggcttgaagttatcctcccgtctcagcctcccagagtgctgggattacaggcatgagccactgcacctggtgatgaccttcacataatttttacatcttcttttgatttttgttttcttttttttttttttttttttgagatggagtctcgctctgtcacccaggctggagtgcaatggtgcaatattggctcactgcaagctctgcctcccacgttcacgccattctcctgtcttagcctcccgagtagctgtgactacaggtgcccaccaccatgcccggctaattttttgtatttttagtagagacggggtttcaccgtgttagccaggatggtctcgatctcctgacctcgtgatccatccacctcagcctcccaaagtgctgggattacaggcgtgagccaccacgccctgccgatttgtttttttcttgaaacaacttaaaaacataaaatcagccaagtgcagtggctgtaatcccagcactttgggaggccaaggattgcttgagctggggaagttgaggctgcagtgagctatgattgtgcattccagcttggctgacacagtgagacccccatctctaaaaaaggaaaaaaggccgggtgcagtggctcgcatctgtaatcccagcactttgggaggccgaggcgggcagatcacctgaagtcaggagttcgagaccagcctggccaacatggtaaaaccctgtctctactaaaaatacaaaaattagcctggcatggtggtgcacgcctctaatcccagctacttgggaggcagaggcaggagaatcgcttgaacccgggaggtggaggttgcagtgagctgagattgtgccattgcattccagcctgggcaacagagtgagactcgttctcaaaaaaataaaataaaataaaaataaaaaaaagaaaaacataaagctgttcttagcccatgagctgtacaaaaccaggcagggccagagtttgactcacagaccctcgtttgctgagtcctgtaccagataaacaaaagtaacacagatttttaaggcttttggtacaagttaccaaattgcatttcagaaaggcagccccagcttactccccaccctgggccatgtaggcacctgtgggctgtgttcttcccagtaccagrattttcagggcacttgataccagttgccaacctctgggccttgggtgagagagcccagcagtccaggggtttgggactcagagtcgggaggaacctttgaggctgctggtgtgacctctctaaagccccttggctgatatrtggtgaagccagactgtggtcacagatgtgagcagccaccagtagctccaggatcaggtgcactgaccctgtgtcctcctccttgcagagacctgtgccggcaggaccgcagctgcacctactacttcagcgtggatgctgacgtggccctgaccgagcccaacagcctgcggctgctgatccaacagaacaagtraggctgctccgtctgcacccagcactgctcaggactggcctggtcctggggtggcagccctccttgccttcctcctcctcctcctcatccacctcctcttcctcctctttttccttctcctgctcctctttctcctcctcgtcttcctcctygtcttcctcctcctcttcctcttcctcctcttcctcctttttcctcctcctcctcgtcttcctcatcctctttctcctcctcctcttcctcctcctccttggcctcacctattacccagagctgtggatccccagcctgataccccaggttctgatagagaaggtgtcctgccctgtctgctcctggctgccccatgggagggagcaggtaccagaagagccaaacccccgacaccccggccaaggcactgcctgtctcagtgaggtgcttggggatccctgcgtgcaggttgaggggcacctacctccccccatccctggttagtgctgtctcctactcccagtgggcagcgacctcctactgaggtgctcccttccctcaggaacgtcattgccccgctgatgacccggcatgggaggctgtggtcgaacttctggggggctctcagtgcagatggctactatgcccgttccgaggactacgtggacattgtgcaggggcggcgtgtgtgagtacctgcagggtgggggtgggtgggggacaccttcatctggcttctgcctgggcttgtggggctccctccctattattcctgttcttgttaccctcaaattcctgttgaacctgaagcaaggaagacttcagttagacacacagaaggacttcctgacaaataggcccatgtgtccagggcgggggaatcaaatcagcacaattgtgcccccctagcctgtgacttcccttctcacacccagacwccaggctatgactccccaccaccaccctgtgaccccctccatcttccccaccaccagcctctgacccccacccrctttctgtctctcccacagtggtgtctggaatgtgccctatatttcaaacatctacttgatcaagggcagtgccctgcggggtgagctgcagtcctcagatctcttccaccacagcaagctggaccccgacatggccttctgtgccaacatccggcagcaggtcagccaggagcgggcagcacaggaygccctctggatggggcaggcgggaaggtgggcctccagctctgaccctcatggygggccgccttgtcaccgtaggcctgggagctccagagattctagcagggcatctcggaagccaccagggcctgctggaggaatgggggccgtcgggcacgagggctggtcctcaggggtctgcagggaccattttagctgacctggtttttataccatctattttatttacatttttggaatagcccaaagaaaacggaactttccacctaaaggtactccaagtgatgtgcccgagagacacctcaccctgtctctgcgccccaccccatatatttttgtgactttttttttttttttaaacatgcagcaagatgaagttttcccctgtgaccaacatttcaggaccagaacacgctccttttcttttacgcattttttctttcattctgtgttcagtcctctgggaagacttccctgatcacattctyagtgtcaggcctgggctgggccctggggacatagcggtgactgcacttggtctctgatattgggaacttcagttcggcgggtggaggaggctgcactgttgcccgtctgggagcgtgcaggggaggggtgagggcaggggaggggtgggggagcgcctcttccaccgggcctgtcctccccaggatgtgttcatgttcctgaccaaccggcacacccttggccatctgctctccctagacagctascgcaccacccacctgcacaacgacctctgggaggtgttcagcaaccccgaggtgaggccagggtgggcacataggggctgggagcaaaggggcccagtgatcctgcagtcggagggacttccctctcagagtcttacaacagccaggacccctgtaggccacctgccaccctcccttcaccccaggaggctatagggcaggatttgggtagggagagaagggtgtccagagaggcaacaccatctattggaggagggaccaggactcaagaggcctgggtttgtggcctagatctgccatcatctgggacttagttgagccttccagctttggggaccttagttatcttagctccaaaatgggtatactgtcccagcctgtcttacccatgagggtgttgtgatgatcagaaggggagacagttgtaactgtttctagacgttgggagctcacagctgatgggtgtaagcacatgcctgcacacagacatrtacacacaagcacacacatgtacatacatgtgcaaacaccacctcctatgggcacacctgtgcacccagacaacacacacgcacccagtgggtgcaggtgaacacctgcctctgtcaagcacgtacaccttcactcccactttgaggggtctgctctgagcatccctggcagttgagccaatggtgaggaccctagcctgcttcccacttcccacaggactggaaggagaagtacatccaccagaactacaccaaagccctggcmgggaagctggtggagacggtaagggccatggacaccctcttggaccagccttgcctgctgcagggggcagggcacagaagggaaactgcttgccctggggagtgggggacagcaggatgggagttgggggtggagggatgggagttggggggcggcaggatgggagttgggggtggcgggatgggaatgggggggcggcgggatgggagtggggggtggtgggatgggggtggggggaggcaggatggcccctctacctgttggcactttcctgctggaggctgtgggagtctgcagggcctctctacctggcccaggcaggaaggaggaaaacatcctggatgtgatggccactgtggcccaccatgcctggaccacttcggggagtggctgcttctctccactcactaatgtctgcttcccccgagcctggggcctctgccccctccctccctccatgcccatgtttctgtctgaccttggcgctggtagctctgtgacctcggctgggaaagtctgtctctgggctctgcctcctcctccccactcagtctctccaggattgacaaggccctgctccccggggacactgggagggctccctggcttgggtgtgtggccctgaagaggaaggaggattctgtggtgccactgtggacccccttgactgagtccctgccctccccagccctgcccggatgtctattggttccccatcttcacggaggtggcctgtgatgagctggtggaggagatggagcactttggccagtggtctctgggcaacaacaaggtgggaccctgatgcctgggctggggccgcagggaggctgcctctccatcagtgcygctcacwgtctggggtcttctggcaagctggcctggccaccctttctgggactcttgacataggggtgctggcatgggtatctgcaggcaggtaggagtagagrgattgagaaacctgagatggagtttggtccctgagctgctgttgccaccgtgtggctttgagttgccttgaccgtaagctactaggttttcagttcctggtttgctattggaatggcttagcttggttccctagacttcccccaggtggagctggggaggaaagggccaaggtgggatgaggggcattaggaagggctgtcgggtccaagttcatcagacagcaggagcaggtggcctgctgagggtgctaggccctgtgttctctccgtgagaatcccaacacctgttcctgtcctggaaagttcaggtaccatttttttttttcttttcakgtgtgtgtgtgtgtatatatatatatatataaaaagaaatatatatagattttatttatatatatrtatatatwttttttttaaataatagagacggggtctggctgtgttgcccaggctggttgtgaaccaggcacaatttcattttatttattttaattaattaattaattaattaatttagagaccgagtctcactctgtcgcccaggctggagtacagtggcgcaatcttggctcattgcaacctctgcctcccaggttcaagagattctcatgcctcagcttgccgagtagctgggattatagacgtgtgccaccacgcccagctaatctttgtattctttatttatttaattgtgtgtgtgtaaattttttttttttttttaaggcagtgtctcgttctgtcacctaggctggagtgcagtggcatgatctcagctcactgcaaccttcctttcccaagttcaagcagttttcttgcctcagcctctccagtagctgggactacaggygtgtgccaccatccctggctaatttttgtatttttagtagacactgggtttcaccatgttggccaggctggtctcaaactcctggcctcaggtaagctacccacctcggcctcccaaattgctgggattacaggcgtgagccaccgtgtctggcctaaggcacctttttattttatttattttttttattttaatgatcccagaacatttatttccataggattttgataaaagagcacaatcttgaataaaaatacaccactgtacttaaaggcaacattacctactaagcaaactctgtccttagccctttcacagaagagaaactgcagaaaggaatttttcgtctcctgacagttttacaacattcatatctcctatgtacttcaagccccaacccacctctgattttcttttttcttttttttttttttgaatggagtctcgctgtgtcgcccaggctggagtgcagtggcgccatctcagctcactgcaacctycgcctcccaggttcaagcagttctcttgcctcagcctcccgagtagctgggattacaggcgcctgccaccatgcccgactaatttttgtatatttagtagagatgggtttcaccattttggtcaggctggtctcgaactcctgacctcatgttgtgatccacctgcctcagcctcccaaagtggtgggattacaggcatgagccaccgcaccgggcaccccacctctcattttctacgtcctttttttttttttttttggtgaagtggagcctcgctctgtcgcccaggctggggtgcagtggtgcagtggtgcagtggtgcgatctcggctcactgaaacctctgcctcctgagttcaagtgattctcttgcctcagcttcacaagtagctgggattacaggtgctggccaccatgcctaattttttttttttttttttttttgagacggagttttgctcgtcacccaggtggagtgcaatggcacaatctcagctcactgcaacctccgcctgagtagctaggattacaggtacccaccactacgcctggctaatttttgtatttttagtagagacaggggtttcaccgtgtttgtgaggctggtctgaaactcctgacctccggtgatccacccaccttggcctcccaaagtgctgggattacaggcgtgagccaccgtgcctggcctcattttctaagttgtttaacagaaatgtgtgttcccaagtttaaggcaccgtttttaaaggcacatgagaccctggacctgtgtgccaacctctgacctggcaactggactaacctgaagttctggttatcttcctaatccacatgctttggttgctgagctgatctccagaagccaggaactggactagcccgtgcattctgggggctggctgatgcttgtgctccagtgacagggccagacctcggaccccagctgactctggccctggaacaagttttcagtgctctgtaacaaatgactgtggctcagaataacacccgtgtgttatctcctggtttctgtgggtcaggaatctgggcccagtttagctgggtcattgaggtgtcagctggggttggggtctcatctgaggcccaggattccattccaaactcacttggttgttgcagaattcattcccctgcagctgtagaacttaacttgcttcttcaaggccagcaagagacagaatctctcttcagtatcctcctttagccaggcgcagtggttcatgcctataatcccaacactttgggaggctgaggcaggaggatcgcttgagtccaggggtttaagaccagcctgggcaacatagtgagacctcatctctacaaagaataaaattagtggctgggtgcatggctcacgcctgtaatcccagcactttgggaggccgaggtgggcagatcacctgaggtcaggagttcgagaccagcctggccaacatgatgaaaccccatctctactaaaaatacaaaaaaaaaaaaaaattagccaggcatggtggcgcacgcctgtaatcccagctactcgggaggctgaggcaggagaatcacttgaactcaggcggtggaggttgcagtgagctgaaatgacgccattgcactccagcctgggcaacagagtgagactccgtcacacacacacaaaaataaaaataataaaaataaaattagttgggcgtgatggtgcgtgcctgtagtcccagctacacgggagggtgaggtgggaggatcacttaggcctggaaggttgaggctgcagtgagctgaagttgcrccactgcgctcttacctgtgcaacagagggataccctgtctcaaaaaataaggtctttctgcagatgactcacctagtaggtcaggcccccccaggataatctcccttttgattaacccaaagtcaactgattaggagccttaattgtatctgcaaagcctgttcagttttgtcatgtaatgtggtccggtcacattcccgggtrtaggagaggggagtagacagagcctgggggccatcctagaattctgcctaaacattcacctcggtcacctccaggacaaccgcatccagggtggctacgagaacgtkccgactattgacatccacatgaaccagatcggctttgagcgggagtgscacaaattcctgctggagtacattgcgcccatgacggagaagctctaccccggctactacaccagggtgggcaagcctggggcatagccaggatgcggggacagttgggtggggtgtcagtggagtggctgggactggtgggggtagggtgggaggtggagaaactgggaggggccgaggtggagtgagggtgtggggagcgtgggaggggcaagggtggggcatgaggtagagggactgaggggtggggatggggttgggaagagcaggggtggggtgggaagtggtagagaagctgggaggggtggagaggagtagggagcctgggaggggcaggggtgagtgggagtggaaagcctagaggggcgggggggcaggggtgagggagtggagagactggaaggggcaggagttggtggggaggtcgaggccagtgtggggcagggggatggggtgggaggggtagggtggagtggggggcttgggtggaagggccaggggtgggtgggggctggagagtctggcaaggggaggggctggggaaggggttgggttggagtacgggtggaggaacatcccagcttatgggagaggcctggatatttggtccccaggcaggagtgaggtctcaccgcacacaccccctccatctagtagcgtgtgggaagacagggtgctgggctgggactctagggccggctagttggcctctagcctgagctggagtctcactcagcctcatgagtagctgggattacaggcacctgccaccaygcctggctaatttttgtattttttgtagagacagggtttcaccatgttggccaggctggtctcaaattcctgacctcaagtaatccgcccacctctgcctccaaaagtgctgggattacaggcatgagccaccgtgcctggccgacctcagctcttttgaatctttcttccttgtcattaaccctgcctcagtggctcctataccagcccaccaaaaaagcacccctgcccaccttagctggccagcgtgcccactccctccctagccacaagcctgtgccccaygcctgggccctgcttcgtccgaagcagccttcttccaatagtgaggaaaaccctgaactcctgttactgacagttgtcattcatcccttgaatgcttactgtggttccccggaaacaattacctggctggcctcggttaattctcacaattctttccagtgctrtcactcatgtgtctgtccactgctaccttggctttctccaaggtactttctccaagactcagttccttccttggtctctggtttctccagatacctgcccatggcgtgcctgggtcctgcctcagggaatccagcctggatagttgccagaaagggttgtgaggattggatgcccccctttgtctttgtcttttcattcattccttcgttcctttcttcccttccttccttccttcctctctctctctctctctctttctttctctctctctttctctttctctgtctctttttctttcttttctttcgcacttgtcacccaggctggagtgcagtggcgcaatcttggctcactacaatctccgcctcccagattcaagcgattctccggcctcagcctcccaagtagctgcgattacagacgcccaccaccatgtctggctaattttttgtaatttcagtagagatggggtttcaccatgttggccaggctggtctcaaactcctgacctcaggtgatccgcccaccttggcctcccaaagtgctggaattacaggcgtgagtaccatgtccggcctccttccctttcatttcttctcttccctttcatttcttctcttcccttttcctcccttcctccctccctcccttcctttcttccttcccctctgttctcttccttccctccctctctcccctctgtccatacatttttgttgagaaccttttctgtgccaggtagttgcaggcactcgagcatagagccccatgtagacctggcccctgtaagctgacctgcagcaggccagaccaggccccatgtgtgcaccctcctctcctggcctttgtgtcctccttaactaacacgggctctcttgtccccctgccttggtacaggcccagtttgacctggcctttgtcgtccgctacaagcctgatgagcagccctcactgatkccacaccatgatgcctccaccttcaccatcaacatcgccctgaacygagtcggggtggattacgaggtgagcaggagccagccggggtcaaggggccggcaatggggatgaggagggctagctgrggagagscttcagggtggttgaggcagaggggccccaggtaaccagtgccagagaaccagaaaaaaaaggatgtgggtctgtgggagggcttcctggaagggttcacagtctagcaggaggaggggccaggctcttaagctactattttaagagatttttgggctcggcatggtggctgatgcctgcaatcccagcagtttgggaggccaaggcaggcagatcacttggggccaggagtttgagaccagcctggccaacatggcgaaaccccatttccactaaaaatagaaaaattagctgggcgtggtagcacacacctgtaatcttagctacccagaaggctgaggcatgagaatctcttgaacccaagaggtggaggttgcagtgagctgagatcatgccactgcactccagcctgggcaacagagcgagactctgtctccaaaaaaaacaaaaagaggttttttgaacttagccctgggctgggtgctgtggagaacactcataaaaacagctataatccttttttttttctttttcgagacagggtcttgctctgtcacccaggctggagtgtagtggcatgatcacagttcactgcagcctcaacctcctgggcccaagcaatcctcccacctcagcccccccaagtagttgggaccacaggcgtgtgccaccatggccagctaattttttttcttgcttttagagatggggtttcactatgttgcccaggctggagctataattttttgagagcttacaacaaacatatcaggcatccctaatccaargattctcaaccaggagcaactgtggcctgcaagggacattggcagtacctggagacataattggtttttacaactatgaggggctactggcatctagtgggtagaagtcagagatgcccgggacagccttccacagcaaagtgtctatagtggtgaggttgggaagcttgatcctcagctctcaattgtaacatctcatttaattctcactatcctgttctgtttaaccctcattttacagaaggggaaactgaagctcaggttggtcacagttagtaaagagtggaggtgatgtctgcccagggctgcctgactccaaggacagagctcttgatcacttactctttgggtttttttttttttgagacagtctcattctgttgcccaggctggagtacagtggcgcgatctcggctcactgcctcctgggttcaagtgattctgtctcagcttcccgaatagctgggattacaggcgtgcgctgctacacccctggtttttgtatttttagtagagatggggtctcaccatgttggccatgctggtcttgaactcctgacctcaggtggtccacccgccttggcctgccaaagtgctgggattacaggcgtgagccaccactcctggccactactcttcatttagtgtcttccttagcagcgcttgtggctgtcactccagaaggcatccccaggcaggcagtgctgagggccacttggccatgacaggagatcatgacgggagaacagacgggcaggggggcggtggggaaaggccactgatgctttctgtctcccagggcrggggctgtcggttcctgcgctacaactgttccatccgagccccaaggaagggctggaccctcatgcaccctggacgactcacgcattaccaygaggggctscccaccaccaggggcacccgctacatcgcagtctccttcgtcgatccctaattggccaggcctgaccctcttggacctttcttctttgccgacaaccactgcccagcagcctctgggacctsggggtcccagggaacccagtccagcctcctggctgttgacttcccattgctcttggagccaccaatcaaagagattcaaagagattcctgcaggccagaggcggaacacacctttatggctggggctctccgtggtgttctggacccagcccctggagacaccattcacttttactgctttgtagtgactcgtgctctccaacctgtcttcctgaaaaaccaaggcccccttcccccacctcttccatggggtgagacttgagcagaacaggggcttccccaagttgcccagaaagactgtctgggtgagaagccatggccagagcttctcccaggcacaggtgttgcaccagggacttctgcttcaagttttggggtaaagacacctggatcagactccaagggctgccctgagtctgggacttctgcctccatggctggtcatgagagcaaaccgtagtcccctggagacagcsactccagagaacctcttgggagacagaagaggcatctgtgcacagctcgatyttctacttgcctgtkgggaggggagtgacaggtccacacaccacactgggtcaccctgtcctggatgcctmtgaagagagggacagaccgtcagaaactggagagtttctattaaaggtcatttaaaccactgaagggaagatgctcagggcgagtgggtgtgtgtgtgtcttggtgtgagtgtctgcagggagagaggttttaagagccctctttttttttttttttctttttttgagacagagtctcactctgtcttccaggctggagtgcaatgacgctatccccgctttctgcaacccccgcctcctgggttcaagtaattctcctgcctcagccttccgagcagctggggctacaggcacccatcaccacgcctggctaatttttgtttttttattaaagaaagggtttcaccaggttggtctggctggtcttgaactcctgacctcagatgatccacccacctcggcctcccaaagtgctgggattacaggcatgagccaccgtgcccggccaagagccctctttttagagcctttaagaaaggtcatgctagcctctcgacccctgagtagctgggattataggtatccatgcctgacacatttttgtattttttgtagaaacggggtttcatttcaccgtgttggccaggctggtctcgaactcctgacctcaggtgatccatccgcctcggcctcccaaagtactggattacaggcgtgagccaccatcccaggcctgaaagtcttttaaaaaagatttttgaggccaggcacagtggctcacacctgtaatcccagcacttaggctgaggcaggcggattacctgaggtcaggagtttgagaccagcctgggcaacgtggcgaaaccctgtctctactaataatatgaaaaaatcagccggttgtgttggcatgcgcctgtaatcccagctactcgggaggctgaggcaggagaatcgcttgaacccaggtggtggaggttgcaatgagccaagattgggccactgcactccagtctgggtgacagagcaagactccatctcaattaaaaaaaaaaaaagattttttagtcttttcattttcaaaattgactcattgtaaattcaaacagcacaaatcttaatctttctgtcatcctttccccccagctgctcagttcctctctctgaaagccaccatgtctaatctgttttttgaacgttcttgagctggtttgtgccgacacaagcctgtgtgtgtgtttgtgtatgttagggttatttttgtttttgtttttgagatggagtctcactctgtcgcccaggctggagtgcaatggcatgatctcggctcactgcaacctctgcctcccgggttcaagcaattctcgtgcctcagcttcccgagtagctgggattacaggcacccgccaccacgcccagctagtttttgtatttttagtagatatgaggtttcaccatgttggccacggtggtctccaactcctgacctcagatgatccacctgcctcggcctcccaaagtgctggcattacaggtgtgagccactgtgcccggcatagggttgtttttaactgttaacttttttctgattacaaactcatcttcaccatgaaaaagtcaaacaaaataggtaacatggggggccggatgctgtggctcacatctgtaatcccagtactttgggaggctgaggcgggtggatcacttgtggtcaagagtttgagaccagcctggccaacatggcaaaacccccatctctacaaaaaaatacaaaaattagccaggtgtggtggcaggtgcctgtaatcccagctacttgggaggctgagctgggagaatcacttgaacctgggaggtggaggttgcagtgagccaagattgcaccactacactccagcgtgggtgacagagcaataacctgtcaacaacaacaacaacaaaaagtaatatggaccgggtgcagtggctcatgcctgtaatcccagcgctttgggaggctgaggtggtaggatcacttgaggccaggaattctcaaccagcatggccaacatggcaaaaccctgtctctattaaaaatacaaaaataaggtgggctttatggcacatgcctgtaaacccaactactcaggaggctgcagcacgagaatcgcttgaacccgggaggcagaggttgtagtgagttgagattgtgccactgcactccagcctgggtgagagagcaagactcttgtcttaaaaaaaaaaacaaaaacgtaagaaagaaaggtctcctggagttgtacatcagtgtgctctgcacccattcccaataacactcagcactgctaggagagttttgtcatcccgagggttgaaacgaggattcagccatctcaatgagaaacacatgttaatgggttgaaacatatctccaaactgagatttcctctacttgctgggcaagtatgcagatgtgtttcagagataaagcccagctgctgggcagagtacaagactaaatgcctgggaatggattcagaggttcctacagcagtccaggcaagtgaccaggacctagaccaatgcttgcagggaaatttagggaagaggagggagtgggcaggggagatgtttaggagagagaacatccaggctttcacctgacgggcaagattctgctaaaaaggaaaaggaaggctgggcgtggtggctcacacctgtaatcccagcactttgggaggctgaggcgggtggatcacctgaggtcaggagtttgagaccagcctggccaacatggtgaaaccccatctctactaaaaatacaaaaattagccaggcatggtggtgcacgcctgtaatcccagctagtggggagactgaggcgggagaattgcctgaggcggaggttgcggtgagccaagatggtgccactgagctccagtctgggcaacagagtgagagcgagactctttctcaaaaaaaaagaaaaaaaaaaaaaaagaggaaatggaatttatagttcctgccctcagagaatggaagtggaatttagagttcctctccttagggagtccagagattgtggaggaggaaacaatccgacccagtaccaggcagctagcagctgaggccccaargcacgctacatcccagacagggccctgtctacaccctgaggctgagtctgcgtgtggccccacagtccacagtcagacccgcggggcactaggctactcagagggcagtgtgggcaggacagctccctttggccatcgtcatgagactgataaaccagtcacttctatatcagagtactgatttgcctcttgaggttgtttgtggcaataaattgaggttgttctaccatggttatagagcagcaccatcccacagaattacagtttgacccacaaatgcaagctacttatgtaattttaaattttctagtagcgacatttttaaaaagaaacaggtgcaattaatcttagtaatgtatttaacccaaatgacccaaaatattatcacttcaacatgtagtcagcatataaatagtaatgggctaatagccctgcactgtggcaggtacctgtaacccggcattttgggaagccgaggcaggagaagattgcttgactccaggagtccaggagttcaggacaccagcctgggtaacaaagtgaaatgcttccccatgtctacaaaagataaatactaggcatggctgcagcatctgtggtcagctacttgggaggctgagtgaggtgggaggattacttgagcccaggagttcgaggctgcagtgagccgtgattgcaccactgcactccagcttgagtgaagagtgagactctggctcaaagatagattttttttttcttttttgagacggagtctctgttgcccaggctggagtgcagtggcatgatctcggctcactgcaacctccaccgcccgtgttcaagcgattctcctgcctcttcctcccgagtgcactatcatgcctggctaatttttgtatttttagtacagacggggtttcaccatgttggccaggctggtcttgaactcccgatgcacccgcctcgccctcctaaaatgctggaattacaggcttgagccaccgcgcccggtcgatatttttttttcctaaaaattgagatagtttaacagccttttttgtcctaagtcttatagcgcatctccgtttgcactggctcaggactcgagagccacacgtggctagtgcctactgttctggcgcgctcaggcttggagccttctctgcggaggccaagtcctgcaagggatctgtttgctgcggtttcctagtagtgtctgccgcatcactggggcccggtgatctgggtaaccatgtgagcttgggtaacctctcctctccctctcctgggactgctgtggacgttaaatacagcggtggatgttagagacgcagttcagtcactggcattgattcgccgttgttgctgctcttctttcctcaaaggcgactgaagggcagcaggcccatgctcgcttctgtctgcccgatgagtcacttcaccctaggcctggccctctagagaacactcctctaagattacagaatgcaaatctggattccagagctggcagaggccccagggtcaggctctaggacaaccggcgaaaaagcgggaacctctactccacgcccttggtttttcgccccttgacagcttgaggctccgccccgctttgccccgcccccccagctccggccgacgcccaccggaactacagcccccatgatgcagtgggagtccgagcctctgcgtcgtccgcttgggacgcgccggcggaggagtggcgcgcggaggagtggcgcgctgagacgccgctcgaagcgccgagtcgcggggcagcagaggcgtaaggagtaggcggggcgagccggctgggctcagggtccaccagctcacccgggtcgaggggcaatctgaggcgactggwgacgcgcttatccacttccctcctcccgcctcccccyggggtggcgctcgctggtgacgtagtgagtgtgatggccgccgcgaggccgggaaggtgaaggtgagagggcgagcaagccggggtggcggggactggcccggcccggcccggcgagtcctgagcagctcggcgtgggccgacgggattctggggccacgggggtctgggatgcagtcaagcggggtccccactctccggcctcgccgccgggccctccccggccctgagaggagggggcgggccacgggacctgggactggtcggtggggtcccctgtagcttctcatcgcccccgcctttccacccttcacggccatgttctacccctgccccttctctatttttcatcctgtcttcattttgccagcatttactcagcacctgataggtgtccacgttcaccgcgggagcgccctgccatccccactttgggcagttactgccttctcgttcagccctgtttacttatatgacttctcaccggactgtaaggccctggagggcaggactgtttcttatccatttctaacgtggcgcctgacacacacagagaaggcacacagaaaatgttgaataaatagctgttaagacgcacgaaggcagaactgcccgttaccccctctcgtaatccttcattgccctctttaaattctcaatcatctctctctcttctacccagaaaagggctctggttatctcttttctacccagaaaagggctctggttatccgcctctggtgtcccaaggtttggggcttgggggaggaaggcagctcaatgtagttaaaaaaggaaggaggccggtcgcagtggatcacacctgtaatcccagcactttgggaggctgaggcgggcggatcacctgaggtcaggagttggagaccagcctggccaacatggtgaaaccccgtctgtgctaaaaccaaaaactagccgggcttgctggcacacgcctgtaatcccatctactcaggaggctgaggcaggagaatcgcttgaacccgggaggcggaggttgagccgagatcgcgctgctgcactccaggagctttggagtcaaagggagctaatatttcagatcccagcttagacaaatcttcaagtattccagccctctgtccca
